United States Patent Application Publication US 2014/0057251 A1 - sequence listing, part 67

SEQ ID NO: 107411 - DNA, 905 bp, Cannabis sativa
caagtcctgcaagattagaatgttatgagctaactgcctatgtttaacaaaagctccttggttttcatgtatgagctcaggaagcacttcagaaagtctagaacaaatcatcttagagatgcatttgtatatagtactgcagcaggcaataggtctgtagtcactagcattttggggattctaagtcttggggataagagagatggttgtctcgttcacctccttcgaaagataaccatgttgaaagaatccaaggataaattcagaaatatcatctcccagttcagcgcaaagccctttaaaaaaacctgcaccaaatccttccggccctgggcttttagccgaatcaataccaaaaagcgcctctttcacatccttctttgtaaaaggctgaattattttcacctgttgcaccagatttaacttgttaccatattcaagacagtcattctccacccttctagtagaagagctatttctccccatgatttagaaagtgatcaatgacccggtcatactcatcaacaaccttcccatcaatgctataagaacaaatcttgttttccactttcctctttttcatgattgagtggaagtagctcgaattttcatctccatatcttatccagttcaccttcgagttctggtgaaggtagctaaaatattgtttttggatctcttggaaagcctcataaagctttctctcccccctcgctgctacttcattgtcgggattactatccgactgctcctgagcattgctgtaggcctcttttgcagctttgtaactattgactagatcttcatttttggagacaaagcatcttttaaggacatgtttgatcctaaacagctgctgataaaagcttttaagatctgtagtagtcttcttttcccaaaccttt

SEQ ID NO: 107412 - DNA, 1349 bp, Cannabis sativa
caatcgtactcttttttgattgtcaagtgtcaattaaacctgttaagtgtcaattcaaaaacacgtgacgataaatttatttagtttatttaatacatagttcaataatatgttttcacgtatttctgagttgacacttaatggccaaaaaagagtatgacagcaacaaaatcgtaacttttattgtcattttcaagatcatatgtgtaacaattataaatgttaagagaattttgcgttaaatatctcttaattatattagttatgtttaaaagctaataaatcatcataataaatagaataaacacactaattaaacctcatgagaagagtttttgttgagccaataatcaaaccattgtcccatttcatcattccaaaaaacaatttccattgccttttttctcattagagaagcctttgtaaactgttcagagatgcaatcatctcctgtaacttttgccaagaaagcaatattcaattccatctgatcatcaagttaaacataaattaataaatcttctcatcatattaattagggatatttgtgacaaaattcctttaatatttacaattattacatatatggtcctaaaaaaataagcaaaagtactttaatttatgaattttgttgcagtcgtattattttttggcggttatgtcaattaagtttgttaaatgtcaacttagaaacacttgaagacataagtattttacttatttaatacgtggtccaataatatatcgccatgtatttttaagctatacttgatggccgaaaaataatacgactgcaacaaaattataaaataaaatactttataaatattaaaagaatttcatcacaaatatcccaattaattatatatattaggatcacttttggccacataccccaagtatgaaagcattcaagtcaacgggtagaattgaagttgtagcaagtgtagtaaaatctgtgtgatccctataactccaagaaatttgattatcaattataactaaatagaattacattataaaaaaatcaaaacaccaaaaaatatcaatagaacaataataacaataaacaattattaatattatattatgataaaattatttttaaataactataatctttaacacaaatattacaatttagaataaaattattaattttacacaaataaatttataaactatatgcatatattttattaaaatacaattattcttatatagagggtatacaaaattaagaaaatatataactaattataatttagaggtaatttttatttaaaactaattcaaattggaacttgatttttttatagcaaatcagagattattcttgaataaaatat

SEQ ID NO: 107413 - DNA, 820 bp, Cannabis sativa
tatatatttatattttaattatttgagtagaacacgcgtgtttataaaatgaaaggtgatgggtttgtaagtagtggcttattttgttaatgaaaacgaaataaagaaaaaggtaagtagtacgtagtggtaacaatccacgcaccaattgaacatcttgtttctctctctagtctctatcataccaattgaatgttgggaaatattaaaagatacctccggctaatattttctttacatataaatattattattagtctaattaaatattatgttatatgtagtttaatataataatttttaaaaaatatcgctaaccaatcgcacgataacgtatttagagatgctaattactactgaagtccaataacaatactcttaaatttaataaccacaccaaatattattatttcccaatttatatctcaccattgattgccccatttctatttcaattatttgatcatggtcatgaatatattgggacaagttctatgactattgcacacatttttacacaagttttaagctattagattataaagatttaatggtcaacaataaaacacactaatgttatttagtaagaaataaaatttaaatcacttccaaataaaaaaaaaaataacaaaaaagtattaattattaaatttatagaaacattttcatttatacttttataattaactttttatttatttataaaaataaaaacaacataactttaaaatgaaaacaacataatctcgaaatgaaataactttataaaatggaaccagtataacgtcgaaataaaaatagcataacttcaaaataaaaa

SEQ ID NO: 107414 - DNA, 946 bp, Cannabis sativa
tgaagatgtatatatggaacaaccttttggctatgtcagccccacacaaccatcccatgtgtgcaagttacaaaaagctatctatggcctccgtcaagcccctcgggcgtggtttgatcgactgaaaaatgtgctcttttctcttggcttttgcaattcagtctccgactcatccttattctactacaaaaattctggtgctaagttatatctccttgtttatgtcgacgatatcttattaactgggaacaacactcacaaggtcaaaacaatgatcaccaaactccaacagtttttctctctcaaaacgcttggctcggtcaattattttcttggtttcgaaatcactaggggggcgtatggtattcatttgtcacaaggaaaatacactactgatttactcaacaaaacacacatgctactatctcatgagagtccgactcccatatcaataagtgacaaactcagcgccacagacagcaagctattcgaacagcccacgttctttagaagtgtcttggggggcctacaattcttgacacttagccggcctgacatcgccttcaccgtcaataagttgagtcaattcatgcataaacctacacaacatcactagaatgtgtgcaagcgattgttaaggtatctaaaagggacaatcggacaaggtataatgttcaagcaatctaaagatctcaatgtcgaatgcttcagtgatgccgattgggctggatccatagatgatcgaaaatctacaactggctactgtgtctacttgggaggtaatcttatcacttggagttctaagaaacaaaaggctgttgcaaaatcgttcacagaagctgaatatagagccttatcacaaactgccactgaagtggcctggcttaactctttgttcaaagaaattggcatccctcacaagctgcctgccataatctggtgcgac

SEQ ID NO: 107415 - DNA, 708 bp, Cannabis sativa
tcttctgcttctgcttccctctcttccgaactaaaaacaacaaaaaagactagaatattatatttgatattattgtttgtgagaagaagtgctctcaaatattgagtattgctattaggtattagtagtacttagtactttcaagacgtgtctttttacgattggttaacgatactttctaaaagctattatgttaaactatatgagatccaatactaaattacaccaccactagatattaacaggtaagataataattatcacccctgagtatttctctcaaatatttctctcaagtatttctctcaaatatttggtgttcaatacattgccttacacaacacaacagtagttgtagtgtaaaatagtacatttttgggagtagcaaatgaaactgactgacacctatcacgtgctttcatttccttttcatttcttcatttatttatttatttatttattttatttgaagaagaaaagagctttatttcaaaactggccactggggccacacatacaggaggagtttccttcctcttctcattcaattcctcttcttcttcttcttcttcttctcactactctttaagcttttctcactgcttagctttcctttcctttcagtttcactcaccagatctccctcttcacctacccaaatccaaccctaaggtacccctatcctttcttgctctcttcttcattctg

SEQ ID NO: 107416 - DNA, 1408 bp, Cannabis sativa
  modified_base (1255)..(1256): a, c, t, g, unknown or other
aagtgagtatattttaataaaatacaatatgagagtatttttgattaatagataaaaaaaaaagtatttttcaacttatcctcaattacttttttattgtggtgataacactattattgtgaacaactatatattcgagatttaagagaatttatatgaaataattaatcatgaaataaatatgtaaatcaagcaatagataatagcaaaaaattatctctgacttttttattgattgagaaataagacaaattagattttatttattaggacataaaatatcaacagcttcatatttttattcataatacattatcatgtaaaaaaaaagttgcaacttatccttgatagaaaatattacactgaaaatatttataaataaaacccaattatttttgcttataatttttgtttatttaatataatacgtaaaaatatatgatgtaaaacaacaaaacaagaaagtagtttaattttcaagtatttctagtagcggtgttattcaaatcgtctacacctcacaaattgtccccagttaaaattttttgtgatatagtttgtgtggttttaaatttaataattatgatttaaataatacttcagtatacattacaaacttactaatttttacatatgatatatttttttcatatattttcacatatgaacaaatgagtaatgttaggtacacatttaaattgaacacatttattatacataaataatgtacataaataatgtgtaataaatattagttatttatatttgtaagtggaattatattacttttaattatataattgaaattaattacatattattatgtgtaactagtgtgtataatttttatatgtccatcttaatcatttcccatgaacaaatatatataatattgcatcattttttagagacaatgtaatgatgtgtatggatttaataatgctgacagtataaattattcaaattgtacttcatcgtaccacttttttgcaattttaagatcttgtgttgtagtatgattgtagtttgagaaattacaaaaattgaaatatctaatttgatttgaaaaattagttgaaacccacactgttcatactgcgaacacacttaggtgtcgttcggtaacacttttattttttatttttttaatcacagaatgaaagtaaaatttttgtttttaaaaattttgctttaaaaaaaaaaaatccgttctgtaaccacttttgtttctcaattttaaaaacagaaaacaaanntgtgttctgtaaagttcattttcattttcatttttttattttatttacgtcgggtctaggtccggggtcggatttgggttcaagtcagaggttggatttagcgccagggccgtggagggatttgggtctgggtctgatcgaagtccaagata

SEQ ID NO: 107417 - DNA, 1063 bp, Cannabis sativa
ccccgccggtaatcactaatattggcgaatttcactctaattaccggcggatccttccgcccctaattcttctaattgttgtagtgaactattttacaaaatacgtaactacaaaagtggtcatctagtgactaccaaaatattgcctactatcccaaagatcaaacactcaaggtttaaccgtcccgatatgtacaattttcatctgctcgcactcactgcttcttagccttagctttgcccttacctacacatgtaagaatagttgtgagccgacaaactcagtaagaaaagcataatcatatcataaacataaactgaattataactaggcgcccatacactcaatcataaccctatcccgcatcccacgcgtactaaatctagaacgttcatacgatagtactattgaccataatattaacctatactcggtactctagtcatactgatgtgatagcatcaatcaatacttatgccaaacatacattcatcggtatctagtataactctatgtatacatatatcgctatttcaatatgttatataatacaaattcataaacatgcacgcaaaatatgtaatcacatatgcatagttaatttgagtggaactgttgcttgacggtttagaggcccctaagtcataacattgataaagctgataaatcattacgtgttatcgtgatttcatactaactatgcaattcgttgctaatcaacgagtttgttagaaaaacgtgattaattaaaactttccataattaaactttaaattaaaataaataaagtttacataaaccgggatcccattgtttaacatttacaactgttttataaaatatgtaactacaaaagtggtcgcttatgctgccccaaagatcgaacactccaggtctaactgccctgatatgtataatcttcatctactcgcactcactaccactcaccttgagctttgtccttacctacacatgtaagaataactgtgagtcgatagactcagtaaaaaaagcataatcatatcataaacttaaacagaattataactaggcgcccatatg

SEQ ID NO: 107418 - DNA, 1030 bp, Cannabis sativa
  modified_base (32)..(34): a, c, t, g, unknown or other
ttttgggatcccaactgttgtaaagtttaaannnttacaagttttattttcattccgtttattgcaaaagtttaatttctgcgctattttgattagtaattcagatttaggggattagggtttcgtaaataacttgggtagcgtgcctaatttttagggcgttacagttaaagtgaggggaggcgtaatttttttttgataagtgagaggaggaaaaagtaaacttaaaaagaagaaaaatatacttttggtgggattagaacccttgtcctctaatctatatgctaagtagcttaatcactacaccaaaattaatattatctttataaatattatctttaattataaatttatattgtaactaactaaaatacatatatattttttttttcggatttttttttcaagggggcgactgccccgcctcgctcatacctgggtccgcccctggttgtgagattgatttctcgttgttttcaaactttttgtcgagaaaagtgtatttttaaaatttttaaactttataagtatatttttataaataaaaattttaagtcgtaaaattataaataaaatacgaacaaaaatctttttgaaaattcccatatttttttcttaaaaaaaatccccacactttactatttgttgtcgttgtccctcccaccatagaatatacgaaccaatcaaataagcaattttttgagcaaaaataaaaatgtcaaactaaccaaatccacatctaaaacttttcaatttcagttagaaattaaatctacaaattcaaaaatattttaaatttatgtcagattatcaagattactctatgaataaattgttgggctttgtaccctaaataaatctctatttcaatgtaatctttaccattcaattatcaataaagaaacagaagtattttcatcacttacttagtatgtcatttggttcatgtcatcatttatttgtttatttgatttataaattcatctaaatccttattacattgatgttattgtttattgtgtcgtcagca

SEQ ID NO: 107419 - DNA, 1511 bp, Cannabis sativa
caattctacataacctcctatcaattaatttaaaaatctcaattgcacttgcagcaaacaaaaacagtgttttggaatcatcactgaaatcataatcaattttaaagtcatgccttctcttgtaaacaaatttccatgtacatataacagtatgttgtttatttgtatctggaaaataaatcacttctttatagcaaagtaatgtaactcgtatattttggtttataataataaaaagcaagtgcagaaaatattgcaacccatattttatttcatacagtactcagaagttgaaccaaaattatctagaaaaatttacaatatgatttgaggaaagacgcacatgggaaacaaacaagatatgataagaacctgctgcaaaatactcaaaccaatagcaaaatctccaaatagtagctagaaacagtagtaacaattgaagattagcaatggaatagaattaaagagtggggaactctccaatatatatactaacctattctcactcacaacaaaagcactcccaatacattgacccttttcatttattctcttattttgtattctattaacttggggcctaacaagatagcaccactttcattgaattttcaacttagtataaaagaaatgtttggccataatacagatttttcttgtaagtactacataggcagccaagagggtgatcaaattctgaaattgactataaaagcgataaaaaagctagaaaattctgtaaatactgttgttccgtatattgatacaaagacccgggatctttgtagatacgatataagaaacagtagcatgtttgattggccttgtaagcaatgaacaactgctttttataataagtcccaactaggatccttaaataattacaacaatactataccaagattgagagagaatttagaatagaatattatggaattaactagtcgatctagtgtttgatattatatgaaggaaatgataagaaaaaagtgatacctcaactctctctagagcaaaatctcaaagtcaaactcaccctccaccaaccccacaaacctagcaccccaaatattttaaagatccctaaatttgatgagaatgagagcctagccaaacaaaaccactagggtagagcccacaatatactgaaaaacaactttaaatttattaaggaaaacataccttatcactgaaaccaaacatcacagaagaacccacatcacgatattcatactaacaactccaaatcacaatattcatactcaagcaacaaaacataatgagcttaatcaaagtttttcttatacaaattgaataaacagaatataggcaactaatgtaagaaaatctcaattatctcacacaacacaattgaaaccaaaagaaatcataagaaaatattgctcaaactgaactaaccttatttgtcaacttgtcttctctttagaactcaaatctggagtaagcccattgcaattcaaaacctgattaaagtaaatcagaaaaataaa

SEQ ID NO: 107420 - DNA, 1540 bp, Cannabis sativa
aaaaacactctctcaaatcaagacaaaagagaaaaatgacgtttcatgtccttccattttgaattctattacactccaatggatctagtgtaaatattttattaaatttaaaaataaataaataaatattatactgtattggattagttcctccaaatctcaactatcatataagaacatttgttacataagaagagtaacacactttgtaaaatcctttttcacaatttagtagttaaaatattagttaatttacttgaatatttgatataatttaaatgttatttttattgtaattgttttttttaatgactgttttgatttaatatggcattatttgcataaaagataaaattttctttttatagaaataatgatataatttaaagtttaaaacgacactaacaaattttagtgttattttacaactgacgctagaagtgtatatatatattttcactaaattcataatttttaaaaataaatttatatttgtattacaataaccctatttattttaaatttaattgtatattataattaaatattaattaaaaataatataaacatttctaatatgatcaaataaggtacaaatatttatataataattaaattccataaaatatcagttaaattacatttttaattaccatacaaacactaataagaaagactaattaagccttgtgttcttcatatttagcacaatagtggaacattgtcttctttgtattttgcataatactgaaaggttctacaatacttacattaatgccaaattttttcttaatacatttaaaagtggtagaaattatgaataccctttctcatttccatttgccttttctttactgctaaaaactttttaacatatagaatagattagatatagatgagaacaaaagaattgctcatgtgattaacatcgtctttcccttaattaatgatacttttattgtggaagaagaggtgaaatgaaatggaaaaatcttattgaattggattgaataaaaaaacaagagttaccacatatatataaagaatagagaaaataagctaactatcctaatcaagaagtaactaatctaaggtcagtaattaactaaccataactattctaacagaatgtaacagcaaccatttgacaaacggttaatggtaataaccgatataaccaatgaatctaataccccttcaatatcgactatatatgtcatgtatagacatcttgttgatgtgagtagtaagtgtggaagaaggtaatagtttggtgaatgcattaattgtaagtgtcgattccaattgtagatcagttcgctaaatcaacacacttcctactggtgaaaataatgcatacagtagatcagtatatggagttgtatgttaaagtgatagtacgcctacatggagctccgaagtcctttgttttggatagggatctaaggttcacctctaagttttgagaaagtctccaaagagccatgagtataaagatgaaattcagtataactttctaccctcagacacatggccagtc

SEQ ID NO: 107421 - DNA, 662 bp, Cannabis sativa
aagaatttcaaactgtaattttttttttgcggtgcgggtggtttgaacggtttgagcggtttgatgaacacccctactttctatagctaataattcaataaaaatattactttaaacttttatattatttaataagtgggtaatttaataaaatcatgaattttgtgttagactaaaaatttaaacttaatataactcattaatttgataaatttagactttcaggaactaatttatatgtatatggagcaatatatactatagtatatggagcaataaatccagaataaatattatatactcacgtggtaatattttatagttaagttaaacgtcgtttgattatatactattactacaacaaaatttatcaatagccacaatattattagcgacgggtaaaatccacccctaataatagtagtaacattagcgacggaacatgaattcgccactaattctactatttattttttttaaaaaaaaaattattagcggtagactcgttagccccaccgctaataatattaaaaaataaaataaaaaaaaataatcgttagaattattagcggcatgacattaacagcggtctcgccactaataattgtatatttacccaaccccgacattcagtactggtttcaatactttatttttgctcg

SEQ ID NO: 107422 - DNA, 2119 bp, Cannabis sativa
ggagatatcccaagaattaaggtgttcaatgggtaataacaagttatgaagtgatatgtgttgatcatgctattgttatatgagaagcttgaagtcctgaagcggtaagaggatgagttaatagaaactcttaatgagatctatactctatgtggagtggagtaccaagctacaggagtactcttgatagactcacctatgtgaatgtggaagtggagccgcttcctataaaatttggggcaaaatttctagaacgttcactatactgggatagacgtgcatgtccattgacgcacgggcttgtttgaataaattcttaaaagattggtgcatggtacaatgttagagatagagttcaagacttcgggtcattctagtaaaatctaaatcgtattcactacacaagattcaaatcgaaagatatctttatttaagcattgtcttatagttgtctgatattgctcgagaaaatatttttaaaaatttcaagttggggattgttggaactttgcgaaattgtgtaaaaaaagataaaaagtgaagtgtgtgagtgattggagtcccacatgggatagaaacattttattagaagtgtatgtatagtggaagtttgagatttgggtataggccccaaggggtacctagttttgtgcgcatgggtgaggactcacatactggaccaccacacgcgcatccctgtccgaccgacccgagtcggccggcgggtgaggtgtcacttgttttttaaaataaaaaattattcaataaatatttatttattaattaattattttatacgttgaatgaagtagtaaaaagcaattagtcaatccacttttcactaccatgatccaactcctccacaattatattaccgttttcttaccgtttaattttggatcgacttctctatataagtcgtatcagaacaatgaaagaacacatcctttcaactaaaaaaataaatttcttcttccttatggtttttcttagagcaataattttgggtataatcgaacgatattgttcggtgcagaacatatcgtatacgagaggctgttttatcctgaaaataccgtggttgctagactgtcgtgcacacttcgagcagagctgcgaaacgtcttgaagaaagcgatattgttcgcgactcagccagaatcttctatcggcaattcgttctagttttattattttaaattcgatataacaattttaaatctacacatggatcatctgcaatcattcatttgaacctttatatagttaactgtaaaatctcgttgagaaaaactctaaagaaacaaccaaaggatgcttggttatggttatgacattgacttattaagtgtcaaaacacctgcaagcaagtaaaaacatgctcagtgagttttttttatatatataaacaaaaatttgaatagggattaataataagcttttgtaaaaacaaataaatttattctattatatttggtaaaagatgggaacaatagtgtttaaaaaagtcaagaattaggtagagttggtctattttttgaaaatgatcttcaataacttatgacagcggcataggacttttgcgacaccctatatatccttcctggaggattttttattttttaattgaatccccttgaggatgttgacaacgtacgtactattggtctcttccaacaatgtgaatggtttagttttgaaataacaattatatacacattaatcaattattccaatattttatattatttgctacgagattgtgtctgttattggaagtcttgctaatgaaaattggaattggccatgcccttgtgtcactactgctggaaaatatatatctatatttattggaacaagaaatcgggattagggtttaccctagtgattttcaatgtgtaaatgctatgccagtatgtattgagattaaggattatgcgttcaaggcataatcgggttggactcggtaactagaaccaagttgaatcgttgtaaagccttattgtatttaaacatgttagtataacacgtgggtctatgccacatagacataaatagacgtgtgagcgtaacacgcaggtctatattaaatagacaaatatgaatggcattattgtat

SEQ ID NO: 107423 - DNA, 835 bp, Cannabis sativa
atgcatttgcatttcttttacttggttcaaccagttctcctgcatcgaacaaaaatgtacgacaacacatgagacttcgaaagtaaagctaacaactgaaactttgaaagcaactaaccaggtgtttctcttcgtcagaaagcgctttatccattccatcgaacagtttaccccaccttgctcgatgcgcgtcgacagttgctgctgtgcatttcattgcatgtggattattattgtcttcatcaagtgaaaattccttcgatagcaagaaaggcaactctgtagtgattacagctcgaactctcttcttactgcgtcgcagggctgcaatgcaacaacataacagagtaaaattccactcaaggcatgagaatatggtttatgggccattagtacaatagcactacaaaatatttagataaagggtttaccagaaagacgtcctttaatgtcttgttgtagaagatccaaccactgagaagcaacagttgcagctgagaaacatagaaccgaaagtgtcagtgatatgtcaaccattcattctaattaaatagttttaattgtccaaggattaaatgaaacaaagtaggggcagaaacaacagatcataaaataaaatgaataaattaaaatactaaccttttgcggaaagatgtgaagctgaatcctcattagaggtggagctctcattctcagacatcttaattgatgatgataacttcatagccagtgcatcgtcctcatttacaactgtagattgcaatacaccagttacatcggaaaacctatcttccatgatttgatcactttctccttcattctcttgcttaaatgt

SEQ ID NO: 107424 - DNA, 1238 bp, Cannabis sativa
  modified_base (143)..(159): a, c, t, g, unknown or other
accttgtattttctaaaattttacaaataggaccctgaattgattttttgtcaaaaaaaaaacttaataataatctgatctaaaatgttatgacaaaaccggttatattttttatatttgttcatgttagaaattatcttaannnnnnnnnnnnnnnnnaataaaattattaaaaattgagctaaaagtcatatttatatcatattgaaaaatacaagattcatttttctgtttaacaaaacagatagttcaattagtaacttttacaaaacacagggtctaaattagtatttacccatatatatttcacatgctaaaaatacattagttaataaaatattcacaaagaacaggtcttcaagggaacatcttcaataggcaacttatcttgaggatatgaacaatcaataatattgttggagttatgaggcaacaaatcccaagtctcaactttgaaggaagttttcaaatcagggaacaatgtcatggtagtgttggagatgcaaatacccgtgaaggtgtttccgggtagcacttcgtactcggccgcgacggtgacattttcggccaccatatcacggcagttgatgttggaaacatcggacaagagagtggggtcataaccctctgcatgtgtcttgtaaaactcattgactcgaaacacaaattgcatggttttaaggataaatcttcgtgtgaagatgtctttgatgtaaccaccacgacccggtgcagttttgatcctcagtgcagcttgagtgtcgatggccgtaacatcttcagctctaatgtctttgattccacctgacatttcacttcccagagctatggttgcactatctggagaaatgcatgtaagtcgtcgaattatgatgtgttcgcttggcattcccatcttaattccgtattgatcgaaaccactctttattgctatgcaatcatcacccgacacaataaagcaatcctctattcgagtgttgctacatgagtcttcatcaaatcaaatatatttgttattgtttgttattaattttttttaataaaatatatttgtcttaatattattattaattaactatatatctctcacctgggttgattccatctgtgttaggaatatcgattggagcaagaattgttagcccttggactattatattgctgcaatgcaaacacacagtcactcgtaaatgtcaataattacttttaggggtatttttattttatactttaaaata

SEQ ID NO: 107425 - DNA, 917 bp, Cannabis sativa
taatgatgatcatgaacccctcttcttcttcagctactaatagtcatgtcaatgtggccacaaccatggctcatcattatgatcatcatggatatttagacggttcaaacttgatgagatcattaggaagtaacatttcattgtcatcatcaaatattaaaggcatcgaaaatggtggtctgactagggattttctaggatcgggatcaggggtagtaatggcccaaaggaaactcttgtcacataattcctgtggttcatcagctatgggattgagccaattcagtggcaaccactgatcgatggtatactgtttatatgtgatgatgatggtttttgtggatatgtacatgtgaactcagtggggtgcgaagatcaatatatcatgaagaaatgaaatggaaaatgtgaccatctcaggctgcagaagcaggaggccggggccacccaaagaaaaaacatttgaatatgtcagaagtgcggaacgaagagtgaactacgagtcaattatatacatttatgtctatcattaatatttattcattatttgtcttcctttgttgttatccttcgtgttgtttagtcttttgtctttgaatcacttatccttttcctctatagaatttttcttttcgcgctttcttcattaagcacagaaaactacatcacgataacgataacgtgacacgtaatgcctatatatagttgaccgtatgccaaagttatttttgagctactaaataagtaaattattgataaaaataaaaccatatatttttattggtgttataatttaatatatttgagatccaatagacttactctaaacttataagaaatgcatatatgcatgtgtccctacttaaaagcctgctgcaataatattctaataaaaaagtattaatgtaactcatata

SEQ ID NO: 107426 - DNA, 786 bp, Cannabis sativa
  modified_base (599)..(599): a, c, t, g, unknown or other
aaaaagaagaaaaaaattgcttaaaagtaaaatatatttctttcaaaataaattaaaaaaatagtaatagcaaaataacatttgtggttatttaattttttcaatcataattgttctgaaaaaataataacaataaaatatctattttatttgttcttattgtttaattatttttttctcaagtcatttcatatttatatttttaattttttttaaaaggaaaatcttacctaacgcgccaaatggcgcgtcctccttccaccaacagcaagctggacccacacgcgtcagcctttgtccttaaaacttgctgaaaccgtaataaagtaaaaagaagttagaaaaagataaaaaagataaaaaatacatatctaattaaaaaagtaaataggaaagttttttagtcaattcttgtaaatttcctaaaattcttcccatatataaagtgagagtaacttagaaaatatgatatttttctcatcttttttcattgtttcttactgaaatatgacatatgtgagccatcaaagaaaaaaataacagaaataatattattgttccaaaacacgttctcaaataaataatatatatatatttanatataaatatttatatatttataacctcaaacacaatccttataagagtataaaagaagtagtagataacccatcaaacatattgtataaaaaagaaattttctttctaatacatggaagaacaataaattgcataaaaaaaaatacctttcaatagtatttgagctgatcctacagaaatatttgg

SEQ ID NO: 107427 - DNA, 2612 bp, Cannabis sativa
tttttttttttttcattttctctttcttctcttcattttatattgagattagtattttttttaataaaaaaagataaggtatatttatggtaaaagtgacataattattaataaaaaattataaaatatactattttatactatttttcaattttttttttattttttttaatagtaacaaaatatataatgtatatattaaatataatattaacttagtaaacaattaatggtattattttttttgttctatttttttaatatcattttttttaaatatactacaaaattatttttcatgtaaaatatcttaaataaatatgtatcacattaattttataaaaatattagataaaattattttaaaaatacataaaaaaaacaacaaaattacaaaatacagttgttcagaattttaacattttaacattttatttattgaaaatactgtctttattttatgttgtattattgttaatttattgttagtttttgttatttatatattatttttatgttattttcatgttgttttttttattatttttacgttattttatagaacaacgtaaaaatattaaagtatatatatgaatgtaaaagtgtaatttttcaaccaaaaatagtactttgtgtaaattaaaaaataaaatatattaccaagataaaatatcaaagcaattttttttttaaagaagtaaatgtttaattttttgttgttacatatatttttgagtagatgtaaaattaatttgcagttgcttttaagtttatttattcttttgagattacttaagtgttattttttaagttaatgcaatgtattaattcctaattaattttcatattcttatattaaagttggattgctatttagttgtttgttcattattaattagttgttcgaccaagagaaaaataaatttatatttaatttttatgggtacaatatatttttgaaacgctttgtaattccttttgagtttagtttatttattaatcgtgtttttatttattcttggagatatgcagcctgtggagttattttataatgtctatttaaatattatgttacagtggagttattatatatatatttatttatttatttattgttatttagttgttcaattaagaaaaattaaatatatatatttagtttttaatggatacatatattaagattgttgttgtgttatttttctaagattatttgtgtttttcaagttaacaccacatgttgtctcataactttttatatttaaaatagggttgttatctaattgtttgctctttgttatatatttagttgtttaactacgtaaaaaaattaaatgaatatatgtttacttttttatgggtatatatatattttttaagttaatgcactagtattttgcagctgtttttactctttttcttaagaatatttatcagttgttttttaatttcttttgagttaatgtaatgtgttgttaactaattaatttacgtattagtatgaaattgttatctagttattttattttcttcatatttaattgttcaatcaagagaaaaatagcttatgttttaatttttcacggttcatactttttgttgtttattggtttctttcattttgtgcactattagttgatgtacaattgatttaaaattattgttgtgttatttgtctaagattatttgtgtttttcaagttaacaccacatgttgatgtctaataacttttcatattaaaatagggttgttatctaattgtttgttcgttgttatttagttgtttaactacgtaaaaaaaattaaatgaaaataagtttactttttatgggtatacatttttttttaagttaatgcaccagtattatgcagttgcttttacttttttctttaagattatttatcagttgtttttgattttttttttgagttaatgcaatgagttgttaactaattaatttatgtattataatatgaagttgttatctagttattttatttcttcatatttaattgtttaatcaagagaaaaatagtttatggtttttcatggttcatactttttgttgtttgttggtttctttcatattttctacactattagttgatgtacaattaattttcatattaaaatagaattgttattgtgttgtttattcgttgttattaggttgtttaacaaagagaaaaatgagtatatatttatttttttaatgtgtagacatattattaagttagtttacaagtgttatgtagtgattatttgtgtatttttttcttatttgatgtaatttatgaagttattttcaagcctatttaacttgcatattttaataagttattatacagttgtttatttgttgttatttagttattcaaccaaataaaaatgaatatatatacatgtttattttatttcatacattagtggtgtttttttttttttttttacttttttagagttgttttcatgcctatgtaatttgcatattgtagtggagtttattatgcagttgttcttttgttgttatttagttgtttaactaagagaaataaatgtatatatacatgtttttttattttattttttaagttgacgtaagtgttgatgc

SEQ ID NO: 107428 - DNA, 682 bp, Cannabis sativa
attagacgaaccggtccttgatcaaaccatagtgagtgaatgataatcatagtccaagttataattctcattaaaaaaaaaacaaggaaatgtaatacagaaagatgtatgtgttgtttcctttttataatgaaagtattattggaacacggattaaactaatagtgaataaatgtagagtgcaacaaacaacaaacatgatggtcactggtcagaacatgaaacgacgtttgagctgtatttgaagaagagtaagcgaagagggaaaggttagggaagggaagggaagccacattccatatgctataaaagcaaagttgatggaagttgttggttgaaacagagggagaatctaggccatcagtttcaatgctcaaagccttaccattagaaatgtgggaacatttcaactttttcaagaaagctcatcacatggcttgggaccctccattgttgagtatcatgggggcctaaattttcactttgcctaaacaaatttgccagaaattttgtccgcatgccccatattttaaaaaaacagtatgagtttgcttcaagtaaaatttacaagataagaaaccaaacaaattgcggtgatatgcataatctaatagttacacactttttcttacaatttaaagagcagattccaaattcaaatcccccttcactaatatcaaaa

SEQ ID NO: 107429 - DNA, 921 bp, Cannabis sativa
  modified_base (202)..(204): a, c, t, g, unknown or other
ttttttgtgtagaattgaaaaaaaaaaattaatattaaaagtagatttttggtgttgatttaacattaaatttgggttttcccaatggagatgctttaagaagctagctgatgttcatagattatctgttcatagattatctgttaacaggggcagaggtagtttaggggctggtgtggccatggcccccccaagattttannnaatgtgtaatatatgtagtatagctaaattattaattatgtatacctatttgcatataaatgtgtaatataagtatttgtatatacaaaaaaaaaaaaggaaaaaaattataagtaaaaagaatatttaaattttatttttgacactatagtttagaatttttttaaagtttatcagtgatcttaaataactacaatggtacacaatcatgaaataaaatgtactgaagaattttgttagatctcaaaacagataaagcatgccagaacacaattttataagatgtattacatggtacaaaatatatatattacatgaatatatatatatatatattacatggtacaaaaaattattagatatttctatagtagatcccttagaaaagacgtttctatccctattaatttttgtattcagaagaattttttagttcgattttttctttataattgtctacgttgtaattatttagaatcacatttaaatttttagaaaattctaaatagtttacagtgcttaaaataagattcaattattttgttgatgcgtgcctattttttcttatacatgtggtaagcaatagttaaaattttattttcggcattgtaaattatttagattttttttaaaaaacgtatgcgcttataaaaaaaataaactaaattttttttacgtgaaacaaataaaagatgtatcaaaacaatcttttaaggg

SEQ ID NO: 107430 - DNA, 747 bp, Cannabis sativa
  modified_base (28)..(66): a, c, t, g, unknown or other
ataatggttttagaagttcatatttagnnnnnnnnnnnnnnnnnnnnnnnnnnnnnnnnnnnnnnnggtaaaataatttccaacaagcagctgatcttggcgtttccattgatgaaattgaagattaggttcaccggtaacaagaatttggggaggaggaacaccagtggacgagatctcatcaagatcttgtcctatgatggtgggaacaacttgtgattttcaagcaagaaaatttgtgcgatcgagtttgatcgtgagagaggcagtcagagaatggggaaagtgatttggtggtggtggtggagccaagaccggcgtagcagcgggagctgtgggttgagtaggaccgtgatgaattctagaattgtttgctgttaatgccatcagtgacagaggtcaatagtgattgataccatgtaaagctttgacaatggctaaaccttgaattgaaaagaagcaaagcattgaacaagagagtagagcattgaacagaacagtaaacaaaagaaaacaagagagaataagcgaaagaagcttaaccaagaatggttagcttaccactttatttatacagatctaataagcaagagtacaaagttagttagcagaaaataacgactataactaactgaaagtaacaactaagccaacaaaacaacactagtaataaaattactggtttacactcactattttaaaaaacactattatgttactatctgatattttaatatatatatatat

SEQ ID NO: 107431 - DNA, 1342 bp, Cannabis sativa
tgagatgggatgatctagtacctcggaatagttgtaaaaaatttagcaattctcatttatgaaattggctattctattttcctccctcatttatttaatgcatgtatgaaaatacattgtatggtcatctcctcttttctgtcatgtgatcttactgcgttgaactaggaaactatggtacatccttacttgagttctaaagtttccagtaacttcagcttctacctcaataaaagaaaccactcctgaatcagcttgagcttgatacagagcttcttgaaagattgatttagttttatgataattgatttcaacatctcatatggatcatctgttaaatttttttaggaggtgctttaatcaaacagtttttaaatagacaacttttaaattcctaccaaaaattggtttacaccaaatatcataaaccagttgcttaaaatcctcatgctctatcaaaaagttgtaaaatcaaaaaggctttattccaatattttgtaggacagtagaaagtaataacataagagcaatgatttgaaacttttttttattgaaaagtcacacaaaaatcaggaaacgtatctaatcaggcttcattcttaaatgcatgatcaatccgagaataaagtctcacactacaaaaagggatttttgtatcgattaacatgtctggtcaaactcgttgactgacgcaaaagtcaaccatcacttttttacttctgttgttaatcgacgctaataatagttttttgcatcagttgctacttcgacaccaaaacgaaaaactgatgctaaagatgatattttatttataaaaaaaaaaaaattattggggtcaaattttgcgttgattttgctcagacgcaccttttattaggggtgtacgtcggtcgatttagtcgggttatagcatatttttatcaactcaatataaatatcgggttgcaaatatttaatcgtaacccgcctaatcaaaaattagagaaagttcaccctgcccaatgatttcgtcagtttggtggggttaacccgtccaaaccgttcttcacttttttcttttataattattattgttagtttttactattcaaataattaatttttttaaaaaataaaaatatgttatttatatttcaagttaaaaaatactatagtttaaattaattttaagaagcttaatataagataaatataattgagtaaacataaaataattaaaaaaagtaataaaacatggtagagttttaaactttaacttcaatatccaaatacaataaaaattattaactataaagtctaagttttaagttaaacactaaaatgtctaaactttaaatacaaa

SEQ ID NO: 107432 - DNA, 2897 bp, Cannabis sativa
  modified_base (1055)..(1060): a, c, t, g, unknown or other
  modified_base (1206)..(1215): a, c, t, g, unknown or other
  modified_base (1781)..(1804): a, c, t, g, unknown or other
catattcaatggtggacttaattatggaacaatcttcatctttctcgcagatctcgaggcgaattcgataaagtgtgaagcccaactcaaggaatcctccttccaccacttcaacttccttcactcgctgctcgttgtctatcttagtgaacttctccttcaaacttttaaacttcgccacacctgattaggaatatttgattattatgtaaaaattgcttctatgaatttttttattagcaaaataattttacaaaaaaatttgttagtaaaataatcttgtatggtcgcaggaccaatcataagttgcatttgatcataaactgctacaaatttatactgtgcaaccaaagattttatttaatgatcgtgagtagagtatataccagggacaaaatctaggtggagagttgttccaacaccgccatcgccttcaactacattaattttttcgataacagatttgagttgttcctcgatgagctttactagacgaagagtcccacagagctcccaaacttgactggctggtgccttgaattctagctcatggcaaagttgaccactcaccatgtttgtgctcttttggtttgattatattgtaattgtgtttttgttggatagaatagatgattgttgtttggatatatatagtgagatttagtattataagtagcatcgaattcataggaattttggaatagcctgctagaaattctcatgccgttaactttgttgtcgattgaattttaatttattgtgttttgactttttgttcttataactaatccaaaaagaatctaaaattaggaagaatgaaaatgtaagaatatgcgtgtaagagtaaagaaaaaaattgttaaaatttatcttaaaaaaagaatactttttcaatttttgaaatggggagccattttaaccaaaactaatcttcatattcacagcttattagtactatttcattatgtctagtgagaaaaaaatattccaagacgggtctgagcaacatttcacaaaggagtatcactataaagaaatgtgagattttcactatnnnnnntaaaatgattgttagtgcttgaaactaacttgttctctcaatgtatccaatagaaaagtgatgcacgacggtcttggctatgtccctgtgacatttcatgatattttgggatgtggaggatgagattttaagagaacactaacgannnnnnnnnnaagaaaaaaacttgttaaaatttaccctgaaaagaagaatgttttcaatctttaaaatggggagctattttaacaaaatttaacacaaaaccaatcttcatattcatgtcttattagtatgatttcattgtgtctagtggaaaaaaatattctaagatgggtccaggctacatttcacaaaggagtacaactatcagaaatatgagattttcactatttcgattaaaatgattattagtgcttgacaactactttttctctcaatgtattcaatagaagagtgatgcacaatggtcttagcattgtccttgtaaaatttcatattttttcgagatgtgtagggtgagattttaagagaacactaacgagtataagagtgaggaataaactttttaaaatttaccctgaaaagaagaatatttttaattttttaattagaaagtcatttcaaccaaatttaacgtgaaaccaatcttcatattcacgtcttagtaatacgaattcattttaactagtgggaaaaaaatatttcaagatgggattgggccacatttcacaaaggggtnnnnnnnnnnnnnnnnnnnnnnnntcactatttcgattaaaataattattagtgcttgaaaactactttttctataaatgtgtcatatagaaaagtgattcacaatggtcttagctttgtccctatgaaattttataatttttcgtgatgtgtagagtgagaatataatagaacagtaacaagtgtaagagtaaggaaaaatcttgttaaaatttaccctgaaaagaagaatattttcaattttttgaaatagggagcaattataaccaaatttaatacaaaatcattcttcatattcacgtcttagtagtacgaattcattgtaaatagtggaaaaaatatttcgagatgggtctaggccatatttcacaaaggggtacctctatcagagttgtgaaattttcactatttcgattaaaatgattattagtgttataaaactattttttatctaaatgtattcaatagaagagcgatgcacagtggtcttggttttgtctctgtgaaatttcataaattttaaagatgtgtatgatgagatttttagagaacattaacgagtgtaagagtaagaaaaaaattattaaaatttaccctaaaaaagagaatattttcaatttttaaaatagggagccattttaactaaatttaacacaaaaccaatcttcatatttacatcttattagtacgatttcattgtgtctagtgggaaaaaatattccgagatgggtccaggccacatttcacaaaactatcagaaatgtgagattttcattgttttgattaaaataattattaatgcttgaatactactttatctcttttaggttatttttagtattaattttagattaattttagtataattttaatttagttttaattgtgtttggagcatttttacgcttgttatcttttatttttgcagatttaaaataaaagaagattagaaaaatatcagaagaaaaagatggaaaaaaagataaaaatatctcacaaaaagatgatatttaaaatagagaaaattatgcaagaaaataaagttgaaactttaagccttaatacgactatgttctaattatattttggaaaaagtcaaaacatgaaagttctagat

SEQ ID NO: 107433 - DNA, 2434 bp, Cannabis sativa
acgtagccaatttattggtgaacttcgggaaaaactggtgttttctaaccctattcttactgtttttgtgtgtgtgtttgaggatagatcatatcgtgttggatttgatcttgtgtttgtgtttaatctgggatttgtgggttatttgagggttagcttcgagtttctcagagtgaaactctttgctagggtttcgaggaaaacctagggctgagggaaagtgattgggaaggttctcgatcatttgggttttgtctaaggaaaaacagggtcgtattgacccttctgactttaaaaagtcgggattgttaaaggttgaaattgaccttgtttaaactgattaaattgattgttggtaattggctaatttcctacaacagtaatttatcagacttgagcacaaaaggttacgaatgttatccgatttgttgcactaatacatgggctcgtcgcttgccaaatggacacaagatgtgttatatgggtcatagacggtacttgcctaaagatcatcatgatagacggaagaagaaagcatttgatgatactgaagagggagatatgactccttttccactgtcaagggaataaattctccaagaagtagaactagtagattttatgtatgaataggcgcaaaaatgatattctgttgctggcgcttaggacaccaaagtatcatagacgtgtcagggctgttggatatgttagtacttgaaaaatattatttcattatttagacaaaataaatatttgttaactttatttattaatttgcaagttaattggcaaggagtctaaacgtttttgcaggaagaaaagggaagtttttgatgttatggctcaaaaatagaggagataaacaaattaaaaaaaaaatagatcccttaaatagaagaaaaaatgttgtcaaacaagaacagaatgagggtgagtatgttcaagaagaacatgctcaagattatgttctacaagaccatgctcatcaggagtatgttctacaagaacatgctaaggaggatgttccatagaattatgctcaggagtttgttcccctatataagccacctctcatgtacagttttcctaaatagagggtagttgagatagtatttctctactcagacaatatcgataacaaagtggtcacaacttatttgtacaaacatgatggtcccatcaaagttcacaccttggactttgatgattcacatgccgcattctatttttcaaaaatgttgtaaaagaagatgttgaaatcctagtatatcaattgaggggtgcagatatgttgaggaagtagcatgttcctaccttggcctaaatacttaagtttaacatccgaggtaaaatttatttcttagaaattatcattacaaatcatatatataaattttgatatattatggtattttgtatagggcccacttgcttaaccacttcaacacgtgctatgtcgaaaggaaaaggtctcatgccttgttaaaaaaacgacagtaatcaagttgatctataattcactccagagattatggtgcaaatcccaaggcaatcagatggatggttggagagttttttagattaaaggagaaaaaagctataatcccaattccggtacctcgtggattcatagcgtctcgtacctagatcataaaatttggagaagatttgcagttggtggtattgtgtgatttcatcaaaaaccaaggaatagtactttttgaaatgatatatactccctttaacctaattcacttgatatattaatttctactaaaattattataaaactttaatacttaataatttaatacatgaacatttgggaggggttatatgatttgagacgaatattcaaggtttacgacccaaagcttctcacagtgcacagtataaccgatatagagaaggaacaatcctttgatgttgtgtcacaaaaattggctcgttggttatcattgataaaaagtcaacatcaaatgttctttattcccttattccccgacatatcaggtaaatactacttaagagataatttaaaattattttatttattataacttaaaattattttgacaatatcttatatacatatatgtatttttttagtgtccattaaatgctaaaggtcatttcaccagagaaaattatccatttagacactatagatggctacaaaattctccaataaatttatgcaatgttaaaaagataataatttgattactctttatataacaaatcttttaattatgggtattacccatgaatgggtaaaattagaaaattttgagtttttatacttaatttttctatctaattaaacaaagctcttatttttgtatcatatgggctgagattgttccatcggtaaaaaaaaattaaaaaaaaaaagctttttagcaagaaaaataagaaaagaaaaagttgagtt

SEQ ID NO: 107434 - DNA, 833 bp, Cannabis sativa
  modified_base (662)..(674): a, c, t, g, unknown or other
tgacctaatatcaaatatgttttcggcaaatatatatatgctgatatatgtgaaaatatcaaccaaaatacttacataaagacctcagaaatagatccacatatcctactaattaataccatccttttcattctagtttcaaataaaatgcttatattgtttatgttattgtacttgttatttatttttatttatatactagtatcataatagtaaaataaataaaggtataaattcatgaaaataaatgacaacaaatacttaacaaaaaaatgaacaacaaatactttagtccacgtggccttttaaaatgaatttcctttttcagggtaagtaaatgagatgtgagcaagtaaagggacacgtggtcaacttcatttgtcagtgtaagtaaatgacagcaattcaagtgggacacatgttgctttaacattaatttccttgttttaaaacaagcagattaaaaggatgaaaatcaaaaatatatatatagagagatatagtattgaaattcacaataacaccatagataaaaggatgaaaataaaaaatatatatatagagatatagtatttttgtttttaatttattttttttggttaattatcaatttttctcttttatagtcattaaaaattctccctgaactattaagattgttnnnnnnnnnnnnntttgtctaattttagtaaaaaatcataagatctattaattaataaattcgttcaaaataataatagaatgcactctagaggaacagtcatccaactgaagcatatgacctagagtctcttgtcaagcaatgaaccaacttatttgcagatcgttttaca

SEQ ID NO: 107435 - DNA, 1266 bp, Cannabis sativa
gatgccagcacttggttctggtaagtcccctttaacagtacattatgttccccccgtccgtgagtataccagccttaggcctatagggttcgatgagggcctctgaggtttagaatgctttctacccggtgagggaatcatgccaaagagtattatttttcccacctgggctattatttaggtcggtctcggatgggttctggacctccgacgcctattcctttggatccttcaacctacttgtcttccagctggtttcttccctcggacagttatctcagggatgatgaagccaccgtcatgattcgagactttgctagggctgagttagagagtaagggtaggactagttttattgctcttttgctaagtgcatactattctcatgaatgtcctaacacttatttctttgttgcagcaaccagaccccatggacgatctcttggctacccttgctgaggcttacagcctcaatgcttctccgcctccggctacttcccagttggttactcccgggaggtcctcctccaacgccccttcaggcacgatcgtcttggtggacgaggaggaggaagttgaagaaggtgaagtggcggatgcggccgcccttgagcgcaagcacaagggcaagatggtggaggtggaaccttctaagcggacccggaggggagacactccggcgccaagcaatgactccgggattccttccgaggcggaggaatacactgtgccacacggcacagtgttgaccccgattcctggagacgaggagaggcaaaatctctgcgtggccaagcacaactacgccctcgacgagtacagcctggggcatgctaaggtggaggccttgaagagaattttgtgggaggagcagcagaacactcttaacgaggatgccttccggaatccatgagacctaaacatggatctgctgatggactgtttcaactgctttgtcgggcccactctggctccttttgcctcggagatgactagccagttcgtctcccacatgacgcaattcccgcctaaaagatatgctgcttgtgcctccctgaactctgtctaccaggcccaagacattagctctgccatggccgcggtgagtactttgtaatttattccatcccttgatattttgtctaaggcatccgatctcactcttgtctctttctttagattactgctgagaccgccgccttaccaagactataattgaccatggcttcgtcatgtccgaattcgggggcatagacgaggccgtga

SEQ ID NO: 107436 - DNA, 1277 bp, Cannabis sativa
aaaaaaaaaaaaaaaacttttcagttttgagatttttcgtctctctatcttgcccccctacagattctaccaccaccacattaaaattaaaatcctaatttatttgggtacaatggtaggcgaacggaacaacaccgggcgagcaaatgtggggagaacgacgggcgacgatgggctgtagctttgggcagttgggcgaatgggaaggagcttcgaatcttaacttgaaacaccttcttagtcacgtagtggtcctctctcactctcccctactccctttctttctctcgtcagcgtcgtgccctcctccagcgaccgacggttcttgaccgttttgggtttgacgggggcttggttttggcagctccattttgaggtatatctctctttgtttttaatttgtatttttttatgtgtaatggagacttctggtggtttaggtctgacgattttcctcacccatttattctaatttgtgtatatatacatatttattgatatatgtgtgattatttttgggtcaaagtagaaggggttcttccttatttgatatatatatatatgtatacattttttttttctaatttcaacttacatagatctattttactctctcaaatctgctaaggaaaataaaatttctcaagtaatgtctctgtgtagggggacgccgttaaagttcgtcgtggatggtggatttctgggctcgtggttgcaggaaggctaaggcttggtgttagatgggcaaaaggaattttgatatggggtagagattattgtgggaattgcttagaaagtagctataggcttggtgttagatgggcaaaagggatttagaccttttcttttttatctttgcatttttcacagaattgtatatttgtaattgctttatgtatatttgtaattgctttgaaatatgtaattagatttagttaattaaaattattattgttatatttaattgtatttgtatataattaatataaattattctttataatatataaaatttgaattaaattaaattaaatattatttttttaaaaaaatatttaatatagtggcactttttgtgtgtcactatatctccaaaatattaataaaaaagaaaaaaaaaagatatagtgacacttcatgcatgtggttgttatctttttagtctgacaaaaccggacactatacgtctatagtgacacgcagaaaatgaatgcaaaaggtttcagtgacacgtgtgaaatgtcactaaaaattgtctttccagtcaccctcattag

SEQ ID NO: 107437 - DNA, 1433 bp, Cannabis sativa
aaaagacctcatattaaggaaacatccttattgttatggcacaaaagattgggtcatatttccagagaaagggttgatcgtttaattaaatctgaaatacttcctcaatgatgaatttggaagagaggccaatgtggagcaatctcccttattcattctcaataccattaattagatcatcttttatcaaatatatatcacactcctctaaccttaagagattattggctaataggatttatatggtttaattaatggtagattataacttaatgggctaattataatcacaaggatgctcttatgagtctctaatacaattagttagtgtaaaacatcccattatgattattgacaaatagtaggcacatagctagtgattgcatgcttatagaattattcttatgattatattagtctaataataattctaacattctcccacttggacaatataatcaaccaccataatattgtctatcacacataagtaactaaataaatcgtacataacatcatatcgataggatacatacattatgtatgaattgaccttgaagacatttaatgaaataataatcattaacaattaaaccaaacgtgcatgagatacaacaaattgagactatgtgcattcatctctttttctgtctgtcacttcactaaacaacacatgtatacataaatataacaacaacgagaaatgactacaatatcattatgtatgttcaaaatacaagtcataagcattccttacaaaatactagcatgtttgatacataataataaaactcccactgagctcaacaagctaggctcctcacaattccattcgagcaacatgctctaaaaacacacatatgggcaagcctttcgttagtgggttttccaacatgcaagtagttggcgtgtactcaatggaaataagagagtcgacaactttctcttcaataaaatagtactatatgtcaatgtgtttggaacaggatgtacttctagcatttttagagaaagctactgctgcagaattatcacaatacaatttcagcagccttgagatagagtctacaacacccaatgtcaaaataaagttctgcaactatattgcttgaaatgtagcctcataacacgacatatactttgcctccattgttgaggatgttgtgagtgcctgtttgacacgtttccacgaaacaactcctccaaccatcatgaaaatgtagcttgatgtgaatttcttatcatccacgcatcttacataatcagtacaactaaatccaattatatcaagagtgtcagctcgccgataagtcaacatatgatccttggtacccctgaagataccgcatgaccttcttagctgctttccaatggctaagtccagtatcactaaagtatctactcaacacgccaaataaatcaaatgctggagt

SEQ ID NO: 107438 - DNA, 995 bp, Cannabis sativa
aagatattgtctttagcaataatgggtgcttagttttctttacctcaattgtaatattttgcagtgcacaataacacattctacaaaagattgtaaaatgtagaaactcaattggattttctttttttgttttgaattactaaactttgatggtatcttatggttttcatgaagctttaatatttttgaagaggtgttacaacaatcagctgtaactttatagtgtgtacaagttgaatcttttacacatttcattgatcacatttataagagcatttgaagggagaaatgaatgaagatttagtaaactatttttatcaatacttgaaaattaaattcttagtttagatagctatataatctccattgcccattggattgaagggctatatactctaacttgaccaatgtataaaagtttttttatttaatatatatactctagctatatataaatgtataaatttttttataaaatcattattactgttattatgttttttcatctgtatattagaaatctaaataataaaaatgtagagggagaattgcattaacatttgtaattttttccttacttcatattgtccattgatttataatcatcattttaagtagtatattttgttagtttattatagtctatttgaagtctttttccaatagttataaactgtcatttaatgtggcttttctcaatggttataaactgccatttaaagagatattactttccatcagttactatcaactcgatggaagtcttttccaacagttataaactttcatttaaagtgacttttttcaacagttcttaaccgttcatttaaagtaactttttctaacggttataaactatcatttaaagttccgcatttttatgacactcatataggtaacagttttaggaaccatttgaaaataatataaatgacagttataaaccgatgttaaaatgccaattttgtattagtgcagagagagagagagagaga

SEQ ID NO: 107439 - DNA, 2736 bp, Cannabis sativa
ttcatatttaggatgttaaaataacatacttgtgggtagagctaagatcctggtaaaataaatttcaacaaataaagcattacatgctatattcaatggagttggtgaaatttttattaaacttatatcttcttgtgaatctactaaagatgcttggaaaatttttcaaacccaatttgaaggaacaactcatgttaagcgatctagatttataattcttcacaccaagtttgatgatcttagaatatctgataataaatctttgtttgaatcttatgaaagattatttgatattgctgtcaatttttttgcctcgggagaaaaacttgatgaatagtgatagtaaaaaaaaattgtgagagtcctttctaatagattcgatgctaagctattggctatgggagaagcaaaagatatcagcaagatggaggtggaggagttgatggggtccttgcatacctttgaactaaatcaataaatcatgcaaatagacaaacctaagttaactattgatagaggtaaatgtattgcttttaatgttgcttaaaaagtaagtttagataaagaagaagatgatgagatggatattataactagaaactttcaaaaatacataaaaaaaaaaataagtgacaaaaataattttttgaaattctctaaaggtaatacttttttaaaatcttcaatgactaacaatcaaaagagaatttaatgaatggaatgtgaaggctttggtcacattcagtctaaatgtgaaaatacactgaaaaagaattaaaaaaatttcaatgtcaaatggagtgatgatgaaactgatagtgatgaagatatttctaacaatgttgtattaacctcagtttcttataagttttgtttgtgactcacaggtgaaagaaagattggtgtgcttgaataattccattaaggaggaatctgattctaatgaatctgaaatctgtgaggagtccctggctgagtcttacaaggctatgtatgaaaagttgatacatgttacttttgaaaatagatcattgtcaaaaataaataaataaatatctcatcaaattgaatctcttgaattgaaaattaaagaatgtgagactgatttttgttcaaaagatgaataataattctattaaagaaggaagttaaaaatttcaagaaaaatgttcaaatgcttaacctcagatctttatttttgaggaagttcagaatgctagtcaaaaaggctttgctagtctttgatcaaatggtacagaaaggcctggaaaaaaaaattgtaaaatctagcgtttcagcaaatttacctactgctacaaattcaacgtctgcaactacaaaggcgtcatctgtagaaagtatctagtaagtttaaaaaatttaagatctgaagtaaggaggtttattctaatttttcatttttgtggtattaaagggcatttaggcctaaatgtttcaccatgaaaaatatttacaaaacaaattattttggttattaaaaattttttcaaaagaaacatagtgccttgacagaaaaatagatcgaaaatgaaaaatatctatatgatttttttgataaaagtgttgcttcataaatgtggtatttagacagttgttattctagacatatgacatatgacaatagttttttggtgaacatcaagccaattcagtgtggcgaggtcacaattggcaatggtttagtaggaaatgtcattggtacgggaactctcaatttttaaggattaccaaggttgaaaattatgatgttagttgagggattaagggctaatttacttagcattagtcagatttgtgatcaaggtatactgtcaattttgacaatgatcattattttgttcttaacagtgataaacaatgtattttacaagggtttagatctaattataattgttatgatctcactcattttcttactcttcataatgcatgtgataataccagtgttatacatatttctagagattcaattcaacactctcgtacaaaacacaattataatagacattattttattagggaactagttgacaaccaaacattgcagttggaatatgttgatattgaaaaaaaattggtggatattttcactaagaccctagatccaactcagtttaactccctcaaaaaatctttaggggtttgcattgtctaattcttttcatttggttctctattttgtacaaatattttgagtagttcttatcttccatctatttttctttcatccttagttggaaaaacatgcttatacttttggatgataattagcttagtttcttgtactctttatacttttgaggttgggttagaagatttgagttacttatatatgtgtgattgtgataaattaaaatattaatatagagttgcgcaatttttatttcagtttcttgtcaggatcctaactggaatagatctacccatactaaggcgtgaaagccatcatttgagtgagatgaaactttataattaggagttatgaagaggatgaactaccatagaaaagggttaccttcagtatggtgtgacaacatccagttgtgggatcaaattgaaaaaggtgaaaaatgaaaatcttgccaaggacaatgatcctattttaactgcacacactaatgtctgacaagtgtgtacaagtttttaagtctcctatactaaaaaaaatcatagtgcacattttatgaaactgttatacccgaaattcggctagca

SEQ ID NO: 107440 - DNA, 1497 bp, Cannabis sativa
tgcggaatcgtgcgtgcggattgattgggattgattggctattttatgaacacccctaccaataaggttccttagaaactggctcagctcttgatgaaatcaataatgaaatctatcttatgttgtggtcgtaatccacataactccttgggaaaaacatccagaaactcttttactaccctgatgtcctcaggcccaactattttgagtctgctagtgtctatcacaatcgctgaaaatccaacacatccatctcgtaaaaggtttttggcttataataccgaaatgatcgaaatttgaaaaacctgaattgatctcatgaaaacaaacgactctttatcctcaggctgaaaaatcaccatttcctcttacaatcaatgttggctacatatttagacacatagtccattccaagaatgatgtcaaaatctgcttaaagtaactcgaccatatcaccagttaactccctaccatccactctgatttgcataaacctaacccatctcttggagataactaactgtccactaggtaatacgattctgaactctatcttgtaattatcaaatcacctacccaatttattaattactctgactgccacttatgagtgtgtagctctagaatcaaataatacataataaaaagagttgttaatgagaagctgacctgtcacaactgatggattggactctgcatcggcctggtaatggaaaatacccgtgctagaatcgattttgcctcttgctttggttcttccctcttcagttgtggaccatctcttttgtagtggcccgtcaaacaacattcaaaacatgtcctacctttacatttccccaaataatgcttcttacaacctgagcattctgggtaagtgtcacgaccttcaaaaccaccctgacgaccaccccgacattagttccctcgaaacctcttgttctagcttgaaccattggatatcggtggagcttttcttttctcaccgaaggatgaatcactaacacccttactcgagctaaaagtagaaggagcagtgaccctaccaacaaattgagtaactcggagctcttgaataaactcaatcgcaccctcctgtcgtaacaccttatctaccatttgtacttcccaaatcatgggcttgaagccttcgaatcttagtgttgtactttagcaattgtcggtgttaggagcttcgtattgtgattaaaatccaataatgatagaactagctagtttgcatagacacacgaatggttataagataaaaactagttgtgctgctcgtgacggggttaggctacgcaatttttatatttttagttttcgaatgagaagtcaatccagttttgttaaatagttaattatttgaggaattttcatatatatgggtatggagggtatggtttacttttttatggaataaataaataacactataggattatgggttttttaattttttgacatttatattgggttttttttatgccatatttt

SEQ ID NO: 107441 - DNA, 1597 bp, Cannabis sativa
aaaaaaagtcttattgctgtttattcttttcctttctttgcaaaaagtattgaaacttttttaatattataggccaaaataataataggaaaagaaaagaaaccatatacaaacataaatgctgaaaaaaagattttgtttgactcaactctattacctataaataaacagtcactctattgttgaattaaatatcttttctttgctgttcaaccttttttttttcctttctttgtggaatatctaattaattacgtttctgggcattgttttttttttttttggtgcgtttactaataaattaaaatttacaacctagtgaagtgacaaacttaataaaactagtttaggctcttttgactagatgggcaagcatagaactgcttgtatacgtatgtacaaccccatatatatatatatatatttgaatacgtacgtacaacacatgcaaccatatatagaaataaggctattctacatatataacattacatgcaaaaaaactactacatatatattacactcaatcactcagaaaagaagaattaaagacatgaaaacagacacattcatatactccttaattggtccttacaattattattccttccatggtgatggttaactggagggcaaaaaaaaaaaaaaaaagaagactaaatctgaaactacaaaaaagctgaattttttattatatgaacaaaaagagtaataagtatgctttgtaacttaattattaagagtgtttgtgccaaccaagaagcatggagatgcagacccttataatgtagagctttgttctctgttgcctcaccattctcctccatttaccaaatctctttcccatatataagtacctaagactatactaatgatactatattgttgggccaaaaaactctgttgggatcaatctgaagatattagcatatatagcatacttatataatataagctttgaaggtggtctatagtcatgaagaaaaggtcctacttgtacatacaaattgcatctgtgccacgtgcactttctctctccatctaaattaagtcatcaacaaataaaccatctttatcagttagtttttttcctttttctcttttgcctgccattgtttattgtcgttgttcttgtcaaattctctaattaaagctgttttttaagtagacagaaaaaaccatggtctatactttacttaatgatgggcttatctactactactactactatactacaaataccccacataattgaatttaacacaaagtcaagtgtaacattactaacatcacgtgatcctttccattaaattcaactatattatctataatagtatagtagcagtactttttgagtacgttttcatatataatcttttaacaaaatattaattattcaagacacacttgactggataagactatttttaggattgatacactgatcagtacttacactacaaaaaaactgttaagtgataattttttttagaactaaatgtaacttttagttacaacaaaatattacttgcgactaaaacatagtatttagacacaaactgtcactaatttagtagttttagtcacaacaagtatt

SEQ ID NO: 107442 - DNA, 1121 bp, Cannabis sativa
gcccgtgggttcccaagcccacggcagttccaactaaggatactcataatcctaggtgggcctggaccccagaacccaccaaagacacattttttgaaagcccattcgggtcaaagcttgccacctcttctttgtcactgtctatcgcttgtccctcatcgtcagtccttcttcttttagaatcagcgacaattaatgtgggaggattcatagtatctacattctctgtcatcataggctgtccattgtaaatggtatcccttccattattatgctccaaatcattgaccctattttgtaggcaaatatttcttccatgatcccctccgtaagaatttcgattagcataatccccttgatttggtgcattgaattcggcatcatcaactccggcattcactggtgcatcggaaaactgaccgtccgcctctgttccagtccgtagccaacgagctccaaacctctattttcttctaatcggatcagctttcatccataagccaaaaggtttctcgatctcatccagtggtgtatcaaataagcgttggcaaaatcgctctgagtggccaataatactacaaatgaaacagaaggtaggaactgattcatacttgaactgacaccataaccattcaccattagtccgcttcagcttgattcttcgtttcaatggtttctctatgttgactatgactctgatgcgtagataatccctccatatccccaagaaatttttaggatcagatttgataaaagatcctatataattaccaacatttctggcatttgtctcagtcatgaatcccgttttgagattatgaagttgaacccacatatcaagccgatgtagagagactcctcttggatcttcacccctcttcaatctctcaaaaaccaattgaaatatgttaaacgtccaagggctaccatccataaccctttgaatatcaagttcatgataaaattggaagacatagagattaagatccaattctttcacaaacattcctttccccggttgccatagagacgccaatgtgttctgcatagcatcgaaatcaattaacctttttgttaagaacatttaaatatgttcttaagttaatccaaaaataaattaa

SEQ ID NO: 107443 - DNA, 1256 bp, Cannabis sativa
  modified_base (42)..(61): a, c, t, g, unknown or other
ttttagaagttcatatttagggtattaatcaacatacttgtnnnnnnnnnnnnnnnnnnnntaaaataatttccaacacttattaggtacgggcagcaatgatatggaatgtcaggctatggcatagattgaaactattattgggtttcttcctggcagcgtaccttattaggtacgggtagtgacatgtgaaaactgtgcataggtacgggctcgtctgattaggcaatgtgatatattggtgccaagttgtggcacgggctcacctgattaggtggtgcaattctgtgatatatgtgtacatgtttttggcatgaactaacttgattagatgatacgattatgtgatatatgggtgctaagctatggcacgggcttgcctgattaggcaatgcaatacaagattatcatattaaagcatcgacttgtctgattaggcaacgtgatgtaatgaagatggttacttgatgaggtaacatatatatataatttatattattaaatgaatatgatttctgttattggtataatgatattgtattaccaaacatctttatactgatgtttattcgggatagatgtcagtagtgatttgggtttcatcttatgagtaatgcgtgatcgtttgattctaattgtctgagtataaatgatactatttgaataatatattatatgattgttgttattacttttcttgctgagtccttgtaaatcatgggtgctatctggtgcaagtaaagacaaggaaaagctagatcaaccatgaggtgacagtcttctccaacaatgtacatattgaccccacccacctgtgtgccgaatcgtcaggagtttttttgggctgtatctgctgtgtattttgattttgtatttttacttgtcgttgtattagcctttttgtaaaatttttacaacatggatctctggaacacgtttttaatgtcgttatgatgcatgtttttagtattttattttggtcaagtttttatatcatcacggtttttttaattaattaatctattagtgttaaactagtttataaaatcacacacgtgacgtccctacagattaggacgttacaccttggtatcagagcagccatagttttaaaggtcctgaaactagtcgaatatgtacatttgttgtgaagaaaggtcggctcataatatagtaagcgtttatattatttgttattggattacatacctagactattataaagtatgtttgaaaaagtagtatagtgatgatta

SEQ ID NO: 107444 - DNA, 717 bp, Cannabis sativa
tatatatatataaatatataattgaagtataatgcggtaacatagcgatctaaaattcctctaaatgattctatttgttttcttcttaattatcttttattttttaattttttattagatttataaatatttattgatcaattaattaaaaaaatttataattattttttaatttttatatataaaaaatacacatatattttgaattttaaattttatgaaagtatatatataacgttgattgttaattatatgtatactaatctaacaactaacatctcattctctttcttttttaccaaacaaataaaaatttataaccatatatatatacatgttcaaatatcttacctactccactaattattccaaccgtatatatagcattacatcttaaaaaaaataaatatccaattcaatcaattattcaaactatagagaaatatcgattattcatattaatattaacgtatgtatattttcaatgtttctcactcatacaaaatatttatactctctcatgttaggatttataaaacagtcaagaaatatatatattacagatctaaatatattcctaaaagtactttaatatagaaaaccctaaatcatacatctacagaacctttgctaaattaaagaagaagacgatgatgaaagatgagcgaaagcactaatttaaagccattgttggaaattgcagagaaggttttgatc

SEQ ID NO: 107445 - DNA, 1172 bp, Cannabis sativa
gggcataaaacccaacacaaaaggggtatctctatgccattattaagatgtgtgacaaacaaagaagttgcacaactcctatctgaagttcatgaaggcttttgtgtcaatcatgtcaagggcaatgtttatccaagaaaatacaaaggtaaggttatttctcgccaacaatgattgaatattcaaaggcccatgtgaaaaaaatgtgaaaaatgccaaaaattttccaaaattccccaagcaccacccaacaagttgatgcagatgcaaagttcgtgcccctttgctatatggggaatagatcctatcgaacaattgcctaaaggaaaatgtggagtacaagacgcagttgtggttatagattatttcaccaagtggacagacgccaaactactggcaacaatcacttccaagaaagttttggattttgtagtgaaaaatatcatatgccagtatggacttccacaaaaaattattttagataatgggaaacaataaattcaacagctagatgtttacagacttctgcacgacacatgaaatcatcaaaagtttctcggtagttgcacacccccaaacaaatgaagtcaaagcactcaactagacattaaaagacaccatgaagaaatggctcaaagaggccaaggggaactggccggaggaactaccagaggtactttggtcgtacataaaaattgaaggaacaacaattcggaaaacacctttttctatggctatgactatgaggcaatgttttccgttgagttagaacctccatcccatagaagattgacttacgaccaggagactaaccatgccctcctgaccgaatcacttgatgaagttgaaaaaaaaaagagactcagcaaatttaaggttactagctcattagcaaaaagtagctcggtacttcaataaataagtgatacaaaggaagttttttgtgggggacatgatgcttagaaaagtattactgaacacaaaggacagtgcaaaaggtgtgcctgggcctaattgattattgttgatttatctccaagagtaggattgatatcaattgaatcatttgtgatctttattcttttgaatataaattatttttttagatttttatattatttgtggatttaatattacaagtatattgatatttaattttttttttttgatat

SEQ ID NO: 107446 - DNA, 1652 bp, Cannabis sativa
ctttactaatccatatactaaagcggtcattacaaaagttatgggatgcgactctgctgctgctctgtggaaagctcctgaaaatctctatggagctcactcgaaatctcagatggatgatactcatacactgattcaaacaactagaaaaaggttcaacatcaatggaagattatctgaagcaaaagaaggcttggtctgattctctcgccttagttggtgagccatacctaggaaatcagcttatatctaatgtcacttctggctttgatatcgagtatctacccattgtgcttcagatcgaagcccgatcctcaagaacctggcaagagctccaaggaattcttcttgccttcgacaacaagatggaaaggcttcagaacctaagcatcaacaacagcaacaaatctgcttagtccaccaacacaccaaatgctaatttggcaaatcggttgtttcccaacaatagagggtgaggcagtaactcttaatctaatcaaggaaattatcatcaaaatcaaaaccagacaggaggaggtcgaggcaactataatcgtggaggaaacaacaacagtggaagaggtcgtggtggacgaacaaatggacccaagccaacttgtcaagtctgtgggcgctatggtcactctgctgtaatctgctataacagatatgatgaagcctacatgggttcagatccgaggcttggtgggaagacaagccagaaatccaatcaacctccaacagcttacacagcaacaccagaagtggttgacaatgatgcatggttcgtggacagtggggcaagcaatcatgtaactgttgatgagaacaacatgctatacaagcaggactatggtggtaaggaacatctcaccattggtaatggtaataaactacatatttcacacactcagaacaattctaactgtaaaagctttcacaacaggactaaatgtttctccatagtccaaaccagctctctgatgaaaccccttagcaacaagtcttgatttgtacctttggaatgaaccatctgcatttcttttgattctgtgaacccacttgcatccaatcaggctgtttgcctctgacctgggaacaagaatccaggttttgtttcgcttgagggctatgatttcatcattcatagctccattccaacccttgtgctgaggtgcttcagttacatttcttggctctttaaaagtgggcacccactgtaacgccctaatgctaaggcatgctacagtgctttttcaattacagtgcaatcttcgctaatcgaagagttttcttgaaaaacgtgtcaaattaaaactttaatattaattaataaactttataatatattaaaatatttacaagtgtcgggatcccgttttcgaacttttaaaattattatttcaaaatatacatttttcaggtcgcacaacgactaagaaaatacaattcccagatgtcccgagaccgaacactccaagtcgcgttgctttgacatgtacaatcccatctgaactcaagttcactccagttcagttatcgccgttcctttacctacacatgaaagtagaactgtgagtcaacatactcagtaagaaaaatatataacatatcatgcaactttcgatttgtaactaggcgcccatacacct

SEQ ID NO: 107447 - DNA, 868 bp, Cannabis sativa
ttccttttgtggcaaagggttttagattctttactaaacttggtatttctatggcttataatgtgtaaactagtttgccatcattagcacaatgaagttttccatttatgtattctcatgttattgttagagttgttagtacatatagggaattttagcaattgaatagatgtagaatgagttttgcatggataaaattctggtgtggacagagctggggagctgtatcaagttttggaaagaaaactgaaattggacacctttcaacaaactactcttttcatatatttgaatggtaattagtaaatatagtccttatttatagccttttgttctctttccaagacctacaagtgctttttttttagtgaatgacatcaaagtttgaagaatgcaccaatgattttgaccaataagctttattttatttcttaatcagctcattggactattcctaacactagtgaggttgaatctgttccttaaattatgcagaagtcctatgttgtttgccgcttggagcgaaaaactgacgagaaagcgctgaagacaactagtcctgactatgaaacaggtcaaccaagtggtggaaacacgcctgatgatgatcatcagttatctggggtaaaaaagaaaacattgctctccttttaaaacaaatgacaagacaatatgaacctgactatgtacgcttgtttatgtttcagaaattccagttccctggtgtcaaccaactgaatctcgaatcgttgttactaccacaaaactcacgaaatgacaattttggatttctcactggaaaccaagactcatttggagatgttaaagcggaccatgattttgtggattcactcattgttgatcctga

SEQ ID NO: 107448 - DNA, 1180 bp, Cannabis sativa
  modified_base (33)..(40): a, c, t, g, unknown or other
ggtgttaaacaacatacttgttagtagatctannnnnnnngtaaaataaattccaacaagaattacatcggatcaacaataggcgtatgaacacgtgccacccgttaagatacaaacttaagctgagtgaagtttacgcgcgactttggaagtctgtgcagacttggggggcaaatattatcccattttttacatatgacgtggcaacacatactggtgacacgtggctattatttcctacatttggctgaagaaatatttcaaatagagctcagtatacatttgcacggacagagtctgcttgaccaagcagggcaagggtacacgatccgaccaatgcatcaagacttagctatttcaagacttatatcgtgaagctgaagcacacatacaatccctacaatcatgggatcatatcaaagggatatcgcatgctatccgaatctcacaatttatgtattctatataagcaatgtattttcttacatattatagatattgtaagcaaaagggaaaccttcactcatgcatctagctctataaatagtgatccatcctcaatgtaatagggattgaaagaattattttagagagagatctaagataaaacactcagagatttcattgtgagagctttaagagaggaaatactgtatcctttattctcgagttaatacattctaaggggagtaggctattatcgaactaaaagggctgaacctctttaaaatcctgtgttctttactgtttactagttcttaccgtatcttatttatatttttatcgcttattaattaactcattgccgttggctaaaagcgaggtcaacatatataatctatagttattttttcaaatttatttctagtaatatgaaaatatttatttttctcagatttggaaaaattttcttggagttttttttaatggatttgtgttaatcacaattttttatttgtgaaaaagtattcatttataattattatacctaaaattcgactggaggacatgtgtcaatgtaaagggaatgtgaatcagtgcaatatatttttatggaataactcattaattgcgtaagtatcagagtatatttgtaaccggctgactgtaaggtgttaagcgaggaatcaatgtacgaactgacacttagtgtattaacgagaaaccatatgtcactgaa

SEQ ID NO: 107449 - DNA, 1237 bp, Cannabis sativa
gagctaaaaattgtatgattgtaagagcatttaggggatactattcccaaacacattaaagactctaaagttctttcttctgagtattatagtcaatgtttcattaaagtttatcaagctttggctacgttggtctcaaatcattcaccatcactttcgaaatgtcaaaacattcccattatctcaaagaaaatgggggtcacttagatgaaaatcagtcagccaccatatttagaggacaccaacctcccgtcgttggaaaaggcagaaggatgaacaacaaaagtgtgggctaccaagaaaacgctcgaagagagcccctagcactgtgtgacccgataacaactctgatggttaaccccgtcaataagaacgttcaactaccgagaaagtcgtctctggtgcagagccttctatcacatgcatcatcaaatcccgacacatcaaggcatggacctagaaaggaagagcaagtgtgctgagtgggttcaagctctcgggctcgctactatgaagcggaaataagtgacctccactaaaagaataaaaagctagaaactactgtggctggtatgcaaaaagtgttgaatataatactcaaaggcaaaacccaagcctcacatttacgtcataaaagccaccaagtagagaatgagatctcaactccatgtgccaacaaaggtgattccctatcatccactaatagcaacccaagagatgagcacggaagggtcctgtcgcaagacaggagcccaacgagccagttgagacaactcaaacctatccactataaggagattacgttgagggaaacaccccatagcaaaagaaagagacttcaccccagaggcctcatactagggggcacctctcatgaggcccccccaagggcagggcccaatgcaaagcacacacaagacaaagggaggacgagtaaaaggatgaaggagttggaggcagaaatgcaagacctacgccggagaatggccatcgcctctgcagcatcagccacattagacattctttttttcgcaatgccttttaaactcatttttggatcacctttagaggacttcgaaggaggtttcttaagatgctttaaaaaaaatttagcagggaaaaggaacttggaacccaatctagtggtggccatttatacacaacgaaaaaaaaaatgagaaggaaaatacaaaatacagttgtggaagagaaaggatcatgactgaactgggaggtt

SEQ ID NO: 107450 - DNA, 4491 bp, Cannabis sativa
actgagaatgcttttgatattctgcaggaacactcaaaagaaagggatgttgatattcagtttcaagaaccagaaccagtcaagataagaggagggggagtacctcctcttcaaaatggatagatttctagcatggaatgtccgaggagccaacaaccaacaaaaacaaaacttgattaagcaattgattcattctcaaagtgttggtcttgttgggcttcttgagacaagagtcaaggctgccaaacttggagccttgtactctaatgtttttaatggaaggtgttttagagtaacattgcatggcataaaggagggtgaatggttattgcttggaatccgaatactttcagcatcaacatactcaaatgtacaagtcaattgatccatctccaagtctctgctttggatggtaagaattttcttgtcacttttgtttatgcattcaatgatgaggaaggtagaagggctctttggttggatttagaatctcttaatacccaggatgcatggattgtgttgggagattttaatgatatattgaatcaagaggaaagagttgggaatcgggtaaaagaacatcaatctcaactgtttagagattgtatttcttgctgtcatttagaagatattaaaagtagtgggaagttttttacatggtgcaataagcaacatggaggggatcggatatacttaaaattggacaggataatggctaacttgaactggttagacatgtttccaagagccgaggctatttttatgaatgaggggatgtttgatcattcaccagccctcctcacctttcattaagtgacacagatggggaacaagccttttagatatttcaggatgtggaattctcatccagaacatgcaaaccaggtgagcaatatatggaagcagacataccatggcactcaaatgtaccaagttgttgctaaacttaaagctctaaaacctgccttcaagagaatcaatcgagaggggtacacagatctgcatgcaacagtaattaaaacacaggagatccttgctacttgtcaaaataaactcacttcagagccactaaaccagaatgtacaaactgaagaagctgaagccagaaataatttcattcaagctcacaagaaataccaatcatttctccaccagaaagctaaaatcaattgggtcaaagaaggagatgacaacacaaaaaattttcatgcaagcatcaaagccagaaacaacaaaaatagaatcctctctatactagattctcaagggaacagagttgatgatccaggcagaataactgagattttttcagattattataaacaactacttggcacaagcatgccaaatagaaagagagtcatagcaggtgtgctaagaaatgggccaacagttttcaatcaacaaaaaggtagtttgctgcaacctatcacagatgaagagataaagaaggttgtgtttgacattcctggaactaaagcaccaggcccggatggctactctagctatttcttccaagataaatggaatctagttggagaggatatatgtaatgcagtaagatcttttcttcattctgggaagatcttaaaggaaatcaactgcacggctctcaccatcatccccaaagtcagatgccctaataaccctggtgattatagatcaattgcatgttgcaatgtgatctacaaagctgcaacaaaggtgatttgctccagattaaagcatatccttcctgacattgtggctcaaaatcagggaggttttgtccaagggagatttattgtacacaacatcaatgatttgttaagacttggtgagacactatgggaggaaatctgctaaggctaattgcataatcaaacttgatctgcaaaaggcttatgacaccattgagtggaactttcttgaagaagttctaagggatttactctttccagaacaattcatttctcttataatgaattgtattcgaacaccaaaattctctctctttttcaatggatcccttcatggattttttgaatcaaagagaggattaagacaaggagatccactatccccactcctttttgtctttggcatggagtatttgagaagaatcataaagaaagtgggctgcaaaaaggattttgcattccatgagagatgtgatagtcttaagcttaaccatttatgttttgcagatgatgttctactattttgtagaggagacttcaagagtatcattgtatgctataaggtttgaaactcttctcagcaatctctggattgcaacccaataaagccaaatctgccatttattgtagcaacatggaacagcatgagattggaagaattttagaagcatctggtttcacaaggtagcaaaccccttttagatatcttggtgttcctatatgcaccaagaaaatctcaaagtaggaatgcaatgtgttgatagaaaagatgacaacaagaatacaaacatggagcactatgaatatctcttttgcgggcagagctgtactcatcaattcagttctttcagccatccactcttattggcgtcaaattctcaaactcccaaagaagataattcatgagatcgaagctatatgtagggcttttctttggaaaggccaattcatgatgcaaggagcaggattactagcttgggacaaggtttgccaatcaagaacagaaggaggctcgggaattaaaaagattgttgaatggaatttagcttctcttttcaaatatgtgtgggctctagctaataaagaggataacctttgggtcaaatggatacacaatgtgtatcttaaagaagatgattggtgggaataccaagctcatagcaatgggagttggtattggaagcaaatagtggcagcgaagaatcaaattagaaatctggtggacacacaattgctctctcaaaccaggtagaaaatctctcatggatatgaattgctttgccccattcaaaacagggtgtcttggagcaatgaagtgtggaataggtttaacgcacctaaacatagttttatactatggtttgccatacaaaataggttgaaaaccaaggaaagattgcagaaatttcatattgatattaatcctgtttacagcccctgtttacagcaggatgagacaataaatcacctgtttttcagctgctctttctcactaatttgtgtggggaatcaaagaatggttgacatggggggctcggaccacagagttgtcacaactgatcaaatggatccataaagtaaaaatcaacaactttaagaagaaagtaatggcagcagctacatcaagcttggtttatgcaatttggtatgcaaagaatgataaattgtggaacaatcatgtagaaagctgtgatataattgtacagaaagttaaacatagtgtcaaacatagaatagagttgttttggccaaaaaaggtgggacaacaagatagagagtggtttcacaagttgtgaaaagctatacttgaggtcttttgattaaaagatgctattttaattgtatttgattgtaaatgtttgtggaatatcaataaacctgctgatttatcaaaaaaaaaaaaaaaaaaactagttccacaacaagatgactaaaaatgaataatacataatacctcataaaactggttataaattttttttcttaaaaaaaaggtggagatcaattctaaaaatgatgatgcaaaatataaacagaatcaaatttatatataaaaaaaaattaataataactaataataacaaatcataattcaaaatataatataaaagaactagttatatttatcaactagttaaaagtttaaaacaaaaaaattagtttcgtaaagcaaccacgaaaagaatttacacaaaaaaaaactagttaaataaaataaataaatcaaaaatcaattccttaaattaactaaatcaaaatcggttcccaaaataactaaattaaaaacgagttccttgaattagttaaattgaaaatctgaaataaataattcaagaattctgttttgaaatgactttaaataaaaaaccagctacgacataaattaaaataaattcggttacataataaaataactaaaagtaaataatacacattaattcaaaaactggttataatttcatttaaattagttttgaccaactgtgaagtgaaacatcaagaaataaacgaacttatagcatcatattatgcattttgagcaattcacattgttaaacacttcaccatcatcattcatcaactaaacttgcgataacattcgcatacataaaggctacacaaacatactaatcgaatccaaattttaaaacttaggttatatatattgggtgactgtgcaatagttatatttttattgtaaccatcctattatatttttctttaacttataatagcaggttactaataaataaaaattctttttttagaattaattaattattttttaaaaataattaattaaatacttaac

SEQ ID NO: 107451 - DNA, 669 bp, Cannabis sativa
tgatggctgcaatggtctgtccagtggagtcttgaatcacagccccgaaacccatagttgagcgagatgttgaaatagctgcatcagaatataaggtgtacatgcccgtaggtggaagaggaggctgcattccagtagcaggaggagttggaatcgaagtggcaaaatgttgttggctattcgtgtattccttcaaataattgacagcagatactttaatatcatcgagagaaggggacttggattgaaagagggtttggttacgtttgttccaaatggaccacagcaaggcaaagcagagagacaactgatcctttggtagagtttcaaaacctgagaggaggaaatccttaatgtcctgagattggtgagcaatgaagaaacctgcaagacttgttttttcccaaatttttctagctctggaacatcctaggagagaatgggtgacagtatcttgaccatgagaacaaaaagagcaataaggggagggaattattttcctggagaaaaggttagaagaagtgggaagaatgtgatgataagcacgccatatgaaatgtttaatttttggggggatggggagatgccaaagggttttccaccaagttttgaagaaatcctgattagaggttgagggaacagagctagaagaagaggcagaagaagtgg

SEQ ID NO: 107452 - DNA, 1118 bp, Cannabis sativa
atccgaacaaaagtcaaacttatagaagcaacaatgctagaccactttggttctggaaatattatcttgcccaaaagctaaaaggtccaccaggacaaatttaaataccctcatgggataatcaggaacaagcaactaaagagacattcggaagactctcgatatcattctacgttacatcctccaaaagaaaaccctcatgctaagaagtttaaccatcctagagttggattgtctgctctagaaaataacaaaggaaagggtgtaatgggtgacccttcgagaaaatccacacacaatgttccacaaaacaactaaagaacaatcgaccaaccccaacaaaaagaaatggatgctcaagccccagggttaggccaaccaattagtattccatagggcagagtcgtgcgaaacaaagagtcgggtactcaggtatagaggcctaacattcggggatggaaaaactgccccaacgattctattaaccagagcatttgtgtggaggatctagacccttaagatatataacatgtcaacaactgtaatatcctaacatgtcaactttaccaagacaattgagatttgattgaggatgaggtgagtattgttgtattggatttcttattcacatgtcgattgttaaatgagcttaatactacaaccttaatacttgtcccaaagggaaaatgtcaaacattggttagtgactttagaccaattgtgtgttgtaatgtgttatacaaagtggctgtgaatatgatgtatacaagattgagaatcattcttcctatgctaataactcaaaactaagggatttattcgagggagatatatttctcacaataaaataatttgtcgaaaacctaatgtgtcattatggaaggaaaaacaccttgcatgataatactggacttgaagaaagcgtatgatacgatagattgggaattcattgaagaaatattgagagcctttcacttccctcccacagtcattctaataagaatcatggggttccttctcaaaactaatttgtgataagtggagtagtccatgttcttacatatggctcaatattttttcccctgaactttgacatgtagtaaatcgtgtcccctaaa

SEQ ID NO: 107453 - DNA, 1574 bp, Cannabis sativa
  modified_base (48)..(67): a, c, t, g, unknown or other
  modified_base (429)..(433): a, c, t, g, unknown or other
aaatatagtgtaattactaaactgtgtaattattaccctagtaattannnnnnnnnnnnnnnnnnnngttacttccaaacgcacccttaaataaagtttcaagagttttaattgaaacttactcggtcgtagtcacagctcgatatataggctaagtatgattttttcctcctaaactttgatatgtactaaatcatacactcgaatttttttggtcgttaaaaattcccattaaattattgatattgttagatttaatgatttttgtccaatttcatttaattttactaatttggtgattgtctatgtactaaattttgctctccaaacttaaactttgatatctaccaaatcatgccccttaaaacttgacatgtaccaaatcatgacccctgaactttgattcatgttagacttttcttactaaannnnnacaaaaatccttaaatccaacaactcaataattcaggagaatttttaacagccttaaaagtttcggggacataatttgatatatgtcaaaatttggggggcaaaaatcctaattagccttactatagtagaacatctatccaagaatacatttgagaccaaacaaattatattttaattgagacgttataagttacactagaaaaaaatattaaaataccaaaaaatatcaatgtaacaacaataacaataaataatcttgaatactatatcataataaaattattttttaattaaatataatatttatacatgtattataatttagaataaaattatcacttcaacctaaataaatttataaaatatatgtatatatgtatatattaacggttaatcttatttataactgacctaaattggaacttaatttttttataacaaattaaaggttatttttaaatgattaattatgatttttacctctagaattttaatatgtactaaattatgttttctaaactttgaagaatgttaaaaattccccgtcaactattgagattgttggatttaatgatatttgtttaattttagcaagaaaagtctaacatagataaaagttcaaggagcatgattagatacatgtcaaaatgcaaagggcatgatttggtagatatcaaagtctggagaacatgatttagttcatggacaatcaccgaattaataaaattgaatgaaatttgacaaaagttcttaaatataataatttcatcaattcagagagaattttgaatgctcagaaaaattcagaggcataatttagtacatgtaaaattttagagtaaaaattctaattaacattcttaaatagagtatggataaatagagattttagggcccgtttggtacgcagggctaaattggattatttatcccaccctgctagatgggataaataatcccagacagatgaggttagctggattagttatccagacttctaacatgcccaaacactggatttgacaaattaatctgtctaatccaatccaatcctgcgtaccaaacgcgcccttaggctatattttttttttttttttttgaataaaactacatgtcgttttacatcgactcgcgcgcta

SEQ ID NO: 107454 - DNA, 3603 bp, Cannabis sativa
aaaagacaccaatagacgagataatgctaactttaaagacctgaaacataggctaattataacctaacaattagatgagagaagttcgaatatggacatcatctttcattataagaaacatgactttcgtcagcacattattgcatctgtataaataaatttaatacttcggtaaacttttaccggcacaattattgatcggtaaaaaagcttttgttggcgcaattcacttttaccccaacaaaattggcttttaccagtgctattatccgtagaaaaaaactaaatgtcaatgtaaattatggtattcactaatcgatggctaaaataacttttattggcgcagtaatgtgctagcaaaagttttgcacatttttcttaattggcgcacaaggttttgccaacgcaacaatgccttgcaaaacttttgcttgccatttggatttttgcaagtgatactaaaagattatttatttatttattatattttaataatttataataataatataattaattttaaatataaattaaattttaaaaaagcataattaaaaaaatggtattcacattgataattaaaaagtattataattgaactaatatacaaatatgttcgatttgtactaaaattagtaagtaataaaaaattctgaagttattagtaaataaacaaaatattaaaatatgttcagaaaataaagttaaattctaaagttaattataaaatatatattgttctaaagacgggtaatgtcattgtcgttgttgttctgagtctcaggacgatgcgatgacgatctagcacaaggaagagtggggaatggtggaagatccatacgagacaagttgacaccagacacaacctgagagagatactcaaactgatcttagaatcgctttgaggtagagttgttgtgtatcatactactatctaaaatactgagcttcctgatgtgcctcctctacttttctctgtaaggcatcatactgttccatagtaacagtctgtggggcagaagaagtcgtggtaggtgctcttttagccccaactgccttcaatctcgggagatggccaaagcctctcaaatgtcgtgatcgcttttccaatacttgtgtcataacatgcaagtctcgtgggtactgggtgggatttatagcatcctcaacaggctgagcctcaatgggcgctgacttatttgtagccaattcaactatttgctcctaaaaaagtcaaattaattaaatagttgatttgaataaaaaaaaaaatcaaatgaatgtaaattaacataagcttgttgcgcgtattcaatggaccaagtgttgtctctatggtgaaacttttgaaaagtgtccacagtaatttgaagttctcttgtctcgggattaacctatatttaagtaaaaataagtgtcattattatttttctaaaaaaataaaataatacttatcgatatcacaaataaatatataaagttaccccatcaataacatgtgcttcaatagactttgatccacatctttcttgaagtttcatcttactccaattttctttattttttgctgatcttgcttgaatttaacatatttgtgttacaattaattatttattgctggctataacgtaaagtattactaaaattaataatttcatcaaattttttttttttttttgtattcaagtaagcaatgtaatcacttcactcctcttgagttactccgtctagaggtaacatgtctgtcctctcctgtccaagctccttaagatattcaatccattttttcttacaatcaaccccgagtcacgcaaaccttttgacatttcataatcagcatggtccacaaacttagtattatcttgtgggcatataaactttgtctgtaaaaaagctacatacacattaaaattaatacattaattataaatttaagaataatatacaaaatacctcaagtcttttccgcactgaatttatttcaactttaaaaatactttcctacttgaacttattgatggggatggtgttgtagacgttgcaagttttttgcctagatttttagaagtatctctaatctatatatgtcgaccaataacatatagattagttgtgcatgctcttttcgaatggatgaacaactttttttggctagatgactttcctttcttcttttggggatgtatagtcatttagttgtataacattatttgattattaaggatatggcagacctaaaatttaagttgagtggggtgcaattttttttttctaaaatgacactttttgtttatattttaaatgtgagaatttgtgattaagtagtattaaatataataaaaaaataacaattaacaattaaattgtagtttaactcaaccacaaaagcattaaatgtgtcttgttttctttctttctttttttttaaaaaaaaaaataaataaattgggtatatttaaaaagaaaaagggttaatatcattttggaccttgtgtttgtaaaaaatacagattataccatctattttcaaaaatgacaaattagacactgtcttttctaaaattgtacaaaatagtatcctaaacttaattatatatataaccaatttgaagacaatttatagcatgagtaaatacaaaaaatatactcagttttatcataacaactcgatggttgggttataattaatttttattttgacaaaaaattatatcaatgtactattgtgtacaattttaaagaagataggttctaatttattatttaataaaataaaaagtgtaatcaattacttttataaaatataaggtaaaaagaaattaacattataggagcttcgacccttgctcccaaatatccaaacacaaccattacaccaaatagatatacaataattaattaaaatacttatataattcgtttatttatttttaatatgcaagtatgaactacactataccacaaggctataagcccttgagagcccaggctaaggagcaaagccacttgaacgaatgtgagaggagcgaaaggttatactcttcctcatgtttcattattcatattttatgttgtaggacataatattctaaatatctattatgaatcgttatcgtcttcttacttcactcttaactccaatcaaattcgaaaaatgagaaatcaattaaaagttggtggacctaaattaatgaattcaaaaaaaacaacttgccaaacaattactctatttttatttcataactatgttttttgctacttctcttcatacatagcaatttagtttaagaaatctctcatagaactaaacataagagtttgctagtgagatacgagtctagggcagccatcccaactgatccaatccaattatttattgggtattggattttgtcatccgatctaatccaatcgaattgagtcatccgatctgattcgatccaatgaatttattggaatggatcggttccaactattagatgctttaactgggtttctattggattggattgaatccatccacttcattttagctactatttaagttgatttcactaaaaagaaaaaatatatataaattataatttaaaacataataatcca

SEQ ID NO: 107455 - DNA, 1076 bp, Cannabis sativa
ggtgtaaggacccaatggaggcttgaagcggagacgttacaattatgacttccatgggttttgcagatagatagattaatcttgttatggcttctgtttcttctgttagctactctgtaattcatggaagccatactttaggtcatatcatcgccacgagaggtattcgacagggtgaccccctttcgacataccttttcattatttgtgccaaagggctatcctcacttattaagaagtttgaatctcaacggcttttacaaggatgcaaggtggctcatggcgcaccttctatcactcatatgctttttaccgacgatagctatttgttttgccaattaacttctagtgttgctggaagtgtctcaaatttgcgtttgaatttgaatctggtcaaaaggtgaacttttctaagtccactgtgttcttcaacctcaatacgagctcttcttcccgcgctcagattggtgaaattctccatatgcttgaagcctctaaaggaagcctctatctagggatcccaaacacaattgggagaaacaaaaatgtttttttaggattcctaaagaacaagctgattagaagaattaacagttgggatgaaaaacttctttctcaagccggcaaagaattttcttgaaaattgttgtcgaatcgcttcctacatatgctatgagtgtcttccttcttcctgctagtacatgtcatgaaattgaaaaactcatgacccatttttggtggaaaacttcttccagtaatggaataggtattatttggatgtctgttgcgatattttgcacacgcaagtgtacgtatcgtttcaagtagtaaactcaccaggagtgaggtcgatcccacagggagtgcagttaagtacgttaaaattaaaccattacttctatttggttgaatgaaaattaagaaagaattaaaaaataaggaactagtaagaagcaattattcaaataaattaacagttaataaaaactagggcttcgatttcaattgtttctattgattatggcctaatataattattttcctaatattaatttctatgcaatagcaagtttact

SEQ ID NO: 107456 - DNA, 761 bp, Cannabis sativa
ggccccttccgcattttgaaacacagatcaaaattaccaggcaatgctgctaaagataagacatttgaaattgaaaatacacttacagatatttccccactggatgatgcttcaggaactgaagttgcttctactagtgggagcagtgaaaagcttggaagcttaacaagttaccaagatttggatgtactttctgtattaaatttgcaggcggtaaattttggggatgaaaaccttaaacagtatgaagaaggaggaaatcggttacttggtggttgtgatgttagtgataattgttatgatgtatcactatcaccaaaacattccgctgaagaaaaggattccataataaagaacataagctcaattagaactaaacgctatcgtggccatttggttaaaccaatgaattccttggagagttgccttatggctcaattatacaatgaacatgctcaaatgaaagagtatgtgcttaattctgttccatcaccatcaacaccagctaggaggacattgtttgtgactgatggaagccgtgtcatgggcagtgcatacaatatgccccaaactggaaccaaagcatgtttagaaaagaatgaaaaagtttttggggttccaccactaccaaaagttgggtctatgtctcactcaaagaagacgaaatctaagacaggaaagggacagaatagaaagttgtgcagttccagtaaattttccaatggaaaaggcttccattctcaaggtggtatgatttcttc

SEQ ID NO: 107457 - DNA, 1169 bp, Cannabis sativa
ttcatatttagggtgtttaaaccacatacttgtgagtagatttaagatcctggtaaaataaatttccaacataaataatatatacagtatatttataattatactgtatatattatttaatatttatgaaaaatttaacaaaataatatatattttttatatttagtgttaataataaatagataataataatagggtcaaaaaagttaaagagagttttatttgcaccacataaaatgataagtacactcattattaaaaaaatataaacgtaaataatttttaaaaattacttttaatatttatttttaaaaaaaaaattcttgcattattttatgttaatttcaatacttattttgatttcattttcataattttttcatgtatttatttattttattttattctaaaaaaattcatataattttttattttaatttgttgtcataatatttaaaatataatttatttttatttgatagttatattttttaagaatataaattggaagaaaacagttaaaaaatcttagtataattaaagatataaatttttttataaaattaaaattattaaaatgagatgtcttcgaaaaattttagggtgtaaataaaatttctgaaagttaattaaaaaaaataactagcctaatgcatcatgttgcctatattttatctaaatttaacacaatatttagtgttaataaagtttactacaatttttgtaaagtatttaagtaagtgtaaaaattatagggtaattttacaatgcactcccttaaaagggatgtactgatacacccttgacttgtttcggcattcaaaaaaaaaattaatcattcatgtacgttatagctatttaagataacctacaaaattttgagaaattccgaataatttataatatagaaagtaatgttcaaacagtctattttacatgcgtataaataagagagtcacgcgtgcaatacactgtttgaacgtagtttttagcgtgttaaattttttcaaattttttaaaattttgcaggatatcttaaataactataatgtatatgaccatgagaaaaaatttgactaaaaaattatttcgggtgctaaaatagataagagtgcatcaatatatctattttaagatggtgtatcgtagaatttcctaaaattataaat

SEQ ID NO: 107458 - DNA, 3740 bp, Cannabis sativa
  modified_base (3564)..(3569): a, c, t, g, unknown or other
gtccccgatttgaaaatcaatatcccgacatttttgatcagcataactcttctacctgctctgagccgcgagcattcgtgctctaattttatccagtgcttctcttgttctctgaacaacttcaggccctaagaactttctttcacctacttcatcctagtgaataggtgatcaacattttcttccatataaaagttcatacggagccatcccgattgtcgcctgatagttgttgttgtacgagaactcgataaagggaaggtactttacccatgatccctcaaatctaagacacatgcccgtagcatgtcctctaaaatctaaatggtcctaacggaatgtccatccatctgaggatgaaaatctgtgctcaatttcaactgggtaccgatggctcgatgtagactctcctacaatcttgatgtgatcttcagatccttatcagagacaatggactttgggacaccatggagacgaacaatttctctaacatataacttagcatattgatcaatggagaagttcgtccgaacaggtaagaagtgcgctgactttgtaaacctgtcaactatgacccacacagagttgtattatcccgtggtcctaggcaatccaaccacgaagtccatggcaatgtcttcccatttccattccgtaagattcagtgattgcaacaaccctgcatgcctctggtgttcaactttcacttactgacaagttaagcacctcgcaacataatcagcaatatcattcttcatacctgaccacccgaacatggacttgagatcttggtacatcttcgttagtcctagatgaactgagtaaggagtcgtatgagactcattcaagatctcccttttcatatcatcatccataggcacaaaaatatgattcataaactgaagcatacttgtgtcatccattgtaaaatcactagtcttactagcccaaactctatctcggaatttcattaactctggatcttgcaattgcgcttctttaattcactccaaaagagtagtttgcagggtaatattagccaattgccctacaacgaactcaattttagctcaggtctttcatctgctaactactgggagatctgcctcagtgtatttatatgactttgtcctttttttactcaaagaagatatgttacgtgtctgtgtgttacatttcaaaggatcccggagcaagtatctaccactgatagagttttcatacaacaatagttatcaaagtattatagggatggctccttatgagatgttgtatggcaggaagtgttgatctccaattcactgggatgaaactggagaaagaaaatacttaagcccaaaatcagtacaacgaaccaataaggctatagaaaagatcaaggctagaatgcttgcctctcagagtaggaagaagagttatgcaaacccgaagcacagaaatgtagaatttcaggtaggagatcatgtattcctatgggtatctctgatgaagggatcaaacgtttcaaaaaaaaaaggacaagttatgcccttgatttacagggcctttcaagattctcgagaaggttaggctggtagcatatcgtctagccttgactccagtgctttcagcagtccacaacgtgtttcatgtctctatgttacgaaaatacgattctgatcctactcatgtgttgagttatgagaatctagagctttaactagatttatcgtacgaagaacaaccagttcaaatcttagacagaaaagataaagtccttcggaacaagaccatagctttggttaaggtactctggagaaacagtaaggtggagggcacctaggagttggagttcaacatgagggctcaataaccagagttgttcaggttagatttttgaggacgaaatccttttaatggggggataattgtaaggaccgcttaacttttagtatggaaattaacagataattagggcttaattatgaaattagatttctaaatatgatttatgaatttatggagatttatttgaattctaggtgtgttatttatgatgtatatgaaaattcatgtttttcatgttttatgcctggaaacattggaacgcagagtttgaacaatataatcatattttagtattttagtaatagcgagacaatataattagacattagcaagtttactttttagcttaggcaagggcaaaatggtctttttgtcctttttatctcttttgtctattagtaagattaattaagttgtgtgtgtgctgattattccattatttttgttagataataccaaaaataaatcattaatccaaaattgaaaagaataagagaaaacacataaccaccttcttttctctctcttgagctctctagcagcaagttgaagttagggttttcttcaacacaatttagagcatttctagcataattgttgagtatccaattcaaggtaaaattcctagcactgtcatctttattttccttaagttttaagttaacttttttgcatgattttagagttagggttctaggattttaagtggtgattggtttggttttctgaagttgaattgaagttagttaagttgatttgagtggagtttgtggctggttgtgaggtttgttcaaggtttgagcttaagagctcaaactttgctctcacatggtggattttgattctgagagtattggtttgttttattgcttgatttatgcttattgtggtatttataggtgttcaggaagttattgtacaatttggagttgatttgaggtgttaaggtagttttgggtgtttcctgcaatgaactagtcgaccggttcagtgggacctataggaaccggaattccagttggtccctaggaaaccccacagaactagtctttcgattagggaactggtctgccggttggggcagttttaagaaccctagtttttcccatttttacaatattaaggatattgccatgttatccatcgctggggaaacttttagtttcaattttaagtccccaaaaagtgatttaacatgtcactcatcagttttatgaagaatgtgatttaggggcctgtaaatcgtcaagcagcaattctactcaggttggatggcacacctgaattcgaaagtgaggtaagattcgtataatgatattcatatgtgtataaatgtttagcgtacatgtttattaagcctattagattacattgatatcggtatcagtatacgtagagttatattggataccgatagatgtatgttggtcatatactgattgacgctataacatcggtgtagctggggtatgactagcgtaccaagtataggttgatattatggtcgatagtattatcatacaaaattggtagacttaataccgtgttagacatggggataggattatggttaggtgtatgggcgcctgattataatctgggttataaatatgttattgattatgcttttcttacggagtctgtcgactcacataaattgtttccatgtgtaggtaagggcaatgctaaggttgaacaaccgtgagagcgagcgaatgaagattgtacatgtcgggnnnnnnaggcctggagcgtatgatctttgggacagctggtcatattttgtatagttgctaggtgacaacttttgtatctaatacttgaaactattgtaaatgttttgtatacaggatcctggttatatatatgttatttattttggtatttatgagtatttaaataaagttttaatt

SEQ ID NO: 107459 - DNA, 1369 bp, Cannabis sativa
ctatttagtacctcccaattaaattagaatataatataatttattttatttggtcccaagtgtattcttgaatagagattctactgtattcttaacatgtgatccttcgtccacattcccataaagctaaaactaacaccaaaaaatatgtatgaagacaattcattgattattatgggccaagctatttcaaaggagcaaaaatacttttatggcgaggcatcttatttaagataacactattattggctttgaaaatctatgttgtatggaaaggggcggtggtttggcaattacaagaagctcactctcaagcttgatgtgtccaaagctcttaatcgcgtggagtgtagtttcattgaagttatgatgctaagccttgagtacaagagtgcttggattgataaagttatgtattgtgtgcaaaatgtctcattgatcttgatcaatggtgagcaatgtgggtggtttgctcctttgttagaatacaagaagaataattgggcagttagtttgttaatgtgtaataaaatttcagttagtagttgtaagctttttttcttttttgctagctatatcagttatgttcttgtgttcagttgtatcaatcttttctataaataaagttagagtcaatcactaagtgattgagcattctatttattccactttcatttctctttgactccatctttgtctctagttttcttctcacaagaactctgcaaatccaaagttttgacatggtatcagagccatgtctaaccaaagattcaaccgattagagtaagaacgagcacaacattaacaaaatagttgagctcactagcaaccgaatgataagccaaatttcctttcccaacaacaatcttctacttctaaatctttgattgaatcgaacaaattacacaatttagatatcactagtgttggttgttgttcgtgcatacaatcttaatgggtatgttctcagattacacccagctccactgatccttcttgcaggtaatgtccctagtccaggccatcaatagtggatgagattcgatcaattcttgatgcattgacttatgaactctatttttaataatatgattggacatgttatccattatcgcacctctactgagatctagaatacctttgctcaactttttactacaagattgagagtaagacttctacagctcaaagaacaactctaataaaccaagaaaggatctcatttgaattaatatacttacattatcctaaaattcttcccctaaacttatacttaacataattagttatatatgacactttttgtgttttccccataataccctccccaattacatctactcactccaaccctttttctcatcaa

SEQ ID NO: 107460 - DNA, 967 bp, Cannabis sativa
aatcaaatcaatctatattgaattgaaattacttaaaataatccaatttagtttttttttttttgatgaaggagggggtgttagacaccccaattcattaattaaaaaaaccaagcaaaatgtctacaggatagaaaatacgaaaaacatcaggaaattgaaattacggcagaaaataaactacagaaactaagacagctactatcatcaaagccagacagtcagaacaaagagttttcatcaccatcttagcctgcgtgcttgttccattcgacataatcactcagcacctcggcagtcaggtcactgcagagaatgatcccagtaacactattctcccgcgcccatttggcaatgttgtgagccataaagttgcatcttctcggcacatgtcctacttcccaattctggaatcccttgcagagctgttgaaagcgacttctaagattcaccaatttgaaattgcaatccctatcagtcgcattggagaatgccttgactgtttcaatgttgtcgctctggaatacgacgtgcgcaaccttcttgtctatcatcaatttagcagccatgcaaacggcaacaacttctccaattaaagggtctgttagatggtttctctcagttttgattgtaacgatccttccttggtcatcgcgaaccactgttgctactaccattccttcatcatcacaagaaacgtcacaattgcagcaaagccacgacgccggaggcggactccaagcacagaaatcctccactgcattggagactacatgaagttgttccctgatttttctatttatgttggatagcacctgccatatcgagttctttgattgaccatggacaacagagtttctttctttccacatagcttccattacacaaagtgcaataaccataatctctaagaaggtgatgtttggtggtctattggtatcctctaagaaccaattcttccactgct

SEQ ID NO: 107461 - DNA, 1243 bp, Cannabis sativa
gggggtcctcatttgatttttattatatacatatattatattatataattattattaattattacatatatatttatttttcttcttttaactcagtcaaattgaagttttacaatattttttttttctcttttagacatatttttacagactcacttttattttttacacttttttcaattacatttttacagagtcccttatataacataagaataacatgtaaacgataacttataaatacaaagaaacaatatgaaaataacatgcaaacattataatattaatgttttgaaaataacgtaagaaaacaacaatctgtatttttgtggggttcgcccttttcgagtttattcctcaagcttatcatttgacgatcaaacttttaattttttaatcacttacgagttggggttccctaacccctgcaaaaaattctatatttttaagaacttttatctcttttcatgaagacggataaaatatgagatggcttttacattcttaaggctcatccagagaataaaggtctaattcccttcaatttcaaaagaacatcaaagactgcaggatgcgatatttcttctctgctgacttttgagcttttaaccttccatacctttacaccgagtggcctaggtttgttaagtaaactccttcttttcttgccttttcttttcatttgtctctggtaggaaccttatcgtttgtatttcctatttagttcctttcttaggatgagtctcacttaactcttcaaggaccacaaggctgtgttccggactcttagcaaagatgagcgcaatgtgggtgaccaactcactacagctaactgccaaaagactagccttttgacatgataatcaaagataaagtatacttacaccttagataagtgttatgtcctttccaaggcattggcaaagtatgctagtatcgtatgtatggagtgtgtatcgaattagaccgatattgagattggataagatatcataaacttaccattatatctttttaagtcaatatcagtggttaatcttagatcaatagatcttaatccaaaaatggttaggttcgatctcaattgtattattttgttttattagaattattcgtgaaagctaaccaatggttcgggcaaatacttacatcatgagaacatgattgtataattgagtgggagcactaatcatagatatggtatctatagcttctataagtatttagaattgaaacaatgatt

SEQ ID NO: 107462 - DNA, 3371 bp, Cannabis sativa
ctggcgcagacagataactccaccattggttctttggagaataaaattgaatttaattctacaaattcaacaaaaactgacaaaacggatggagcctctgaagaattatctgattcgtctaaaaatccagtgtctaatgctttggaacaggtagtaagacctgaacaaacactacaagtagaggatggtaccacttcaacaacgaagcagaatgccgatgctactgagaatggaaaattagacaacaaaattgattctgatgcagaagaggacagttcagactctactggtgggacagaggaggcagttcaacatgatccaatagattcttctgatacccaaatagcccaagaaatgaatgaggttcgaatggatctcagtacattaccagacatggattcccaaagggttgacagtgaagagattgctgcagaatgatgattatgattacaaggcttttggctcttttcatgtccatccaaggtctctcacacttatgttattttttattcctatgtccaaagcatgataaatttagcattttttcttttattattttttattatatagattaactgcgtgaagctgtgtcgccttagaatcaacactgcagatgattgtaggcatctgtataacttttaatctcaagtttttaccatgtactgcctttctttcttatttgctttttctttttttccttttgtctgtgatgatttgtttatattagtaactgttcctaatactaacagtacagtgctgaaagctaatggtgagattgaaattcgtttgcctgctcattgatcaaatagtactcacaatttttcacttcttctttattgacattttcctgttatgtaagacctcagtgttttatcatcgaatacagattttgggtatctaaaatttgaaatcatacataataaaaatgagaataagtatgaaatgaaataaaatttaaaatgtatgaaaaaaatattaaatttgtttttattttgtattagaattttttccattccatcaaaatagtagaaaaattattatattggaatgacattctaataatttaaatgcaattatataaaataatagaataaagattaattcattttcataccattttgtttcattagttccaaccaaaagcgcatgggggtactacaatagaaaataatcaatttgctattcttttgtttagttatattttaaactatttgaatgaattttctactattttagtagaatgagactatctaatgtaagatgaaaaaaaaaaattaataacttttttttttttatcaatttttttttttttttgtatattaaattttatttggttttattcttatttccatttctttgtttcaattctttcaaactcaacgtatcattaagcataaaaatattacaacctctcttatatcaataaatcacaagtggattcagctaatgatttataattttaaaatataaaacaattgaacaatgttcaaatatagtattttttttttctatagcaaatgtcatttagttaatgatgaagaaaagtgtaaaatagaagtatcttagaagctcaacatttgattcgggaaggagtgcgttggtgtgtgggtaatggtcaagacatcaatattctcgacgaaccttggttgcctatcaaggagaacccgtatgtttcttccctacatcttggattatttaatgctagagtttctattttattatgtattgatggttctcgttgggataaggaaatcattcttgatttgtttgaggaaacagatcaaagaatcatctttaatatccctattcaaattttcaatagcaacgaccactatgtatggtctttaaaaatttctggcttgtactcagttaagagtgcatactctcttctccaaaaaaaattgtggccgctggtatgacaatgatgatgttattttttggaaaaaaatgtggggattaaagctccctccaaaagtaaaaaatctattttggtgtgcagctaggggttgtcttcacactaagctccaacttcgaactaagcatgtggatgtaagttcgctttgtcccttctgtctttagtatgagaagtctattttgcatactctgatcacatgcaaagtggtgaaagcttgctggaacagagttggtattggcaccaacgtggctaggaatatggattttctcgactggtgtgtgcattcttttgagaccctggatgttgatcatcaatacactttagcaatggtatgttgggcgatttgggatgcaagaaataatcttgtctagaatggaaaaattttcaaagaggatgatgtagttgctaataacctccgtgctgctcttggagtcatgcaaggtcataccaacaccttgcatcacgatcaggaggaactctgtgctgcggtaaatctcgcgtttgaagagcaaaggcgcatgttcgctgaatggaaggacaaagagatggaaacgttaagggctcagcaagcagccattgaccaccgaaccagacaggctaccgtgctgatatgaaaaacctatcaggctaccagtcaacagaaagaaagaacggaccaatagattttatgagtgacttccttgatcgtgcagatggttttatcaagcttgaagaagacattcagcgagcagaggttgagcaaaaacctagccaaccaaaagttccttctgttggaacatccgaccagctcccccagtaccctagaagttcaaactcgagtggtaaacggtccaataacaacaataggcaaggaaatggaaaaaaaaaaggaaagttcgctggcaaaaccgaacaagctcccagggagaatactaccaagtttactgctttctccgtcctgacagcaggtatagaaactgtttacatggctactcagtcattagctccgtacaagaagcccgcacccataaaaaaagacgtgagcaagagagatatgaccaagttttgtcgttttcatggagattatggccatgacaccaactaatgcaaaaatttaaagggggaaattgaatttctgataagataaaataatccgcacatgcaaaagtatgtcaaggctgatcaaaatcaaaggggcaataacgaccaagatttactaccaccaccagtagatggacatctctaagtcattattgcaagtccgcgcatagctggagattcaggcaaagcccgagaaaggtatgcccgaacagtatagcatgagcaaaaagaggtagttctggccgtcgaagaaagaaaaccaaaaataccacgagcaggggagcccaccataacatttagtgatgaagatgatgtcaagattagtttctcgcacaacgacccgttggttgtggaagtccagatagccaacaagatg

SEQ ID NO: 107463 - DNA, 1508 bp, Cannabis sativa
ttattattattattatataaaaacaaaatagaaaaattctatatagtacacctctttaattaaaaggattttttggcatattctttatctgtttcggtatctatgagagtttttttaattcaaatttatattatgattttgtatgtgtattttttaagaccacctctaaatttttctaaaattcagaatagtttacaatgctggaaagagaaatcaaacatttaattctaatgcgtgaaacagtcactcatgatcaaaatgtttgactttattttttagtattgtaaattattcaaaaatttcttaaaatttacaagtgattcttaataatttcaacgaatacaaaaatagactaaaagactctcctaaataccgaaacaaataagaatatcaaaatattctttttagagaattaatgtattatagaataatccttaaaaggatagctacataaagtgggatgtttctaattttgtgtaacttatttgtttattatttaggtaccattgtttgagaatatggagagagaaatacttgagttgatttgtgcgcatcttaaggtagtaatctacacagaaagcagttatatgatccgagaaggagacccacttgataggatgattttcatcacacatggcacagcttgggcctacacaaacaataatagtgatagtgttagtacaagacgccttaagaaatgtgattattttggagaagagctgttggagtggtcaaggactcacaccaacattactgattttcccattgggaccaccaatgtcaagtcccacactaaggttgaagccttctctcttatggccaatgacttgttgaatatagttaagaacaactataggttcttcaggcggaatattccgaccaatcaacaatgctgcgagatttcggtgcagttggagaatgatgatcatgatcatgttcagtcacaccaaacttccaagtatcaacgcttacacaaatagttgttttttaacttgagttgagttcttaatacatgcttctttatttcaaagaattctataggcaaaataaccatgaaaatggtattcatattaaaattttagagcaataagagcactcctaacaacttttttactctattcttcaaaatacatcattaaaactttactttctttatttcacatcaaacttttacattataccatacaacaacttctttattttttctctatatcatttaagtaataattttttaatatatatatctataatacacataacaaaataagaataaaatactatttatatattattaaaatatttttgaaggatgaatagtgcttctctacatgtagagaagcactattgcattctttatattgttctttaaaatacatcacttgttggaccattatttttacactttttcacttcttctcttcttcattttaaagaaaagctagttttaaaggagttgttaggagtgctcggagcactcccaacagtgtctttattttattctttaaaat

SEQ ID NO: 107464 - DNA, 1189 bp, Cannabis sativa
caaaatttttttctaattctaatttattttaccctacccattcatgggtaatacccattaagagtatctatatatgcattatgtatagggcctagttatggtcatgcgcatgaaccgatcttgggattgacatactataagatctaatggttgatttcatgttccattaaattaataatactttatattattaatttataaaattaccgttaaaaataataccttatactattaatttataaaattacggttaaaagtaattgaaatcggttattatcaaattttattgtactttaaattttattttgtcagcctttattatagttcgcgcagttgaagtgactgggcatcttcatctacttcactcgcacagtctcttcccatttctatcatttctctcaacttcatctacacggaagggaacaacgaaacgagccaaaccaaattgattctctctgcttcatctataccaatggtgaagagagtgatcgtcgtagacgaggaggtctaacacattctttaaagaattttgatttgctcaagctattttgcatacttttgatttattttcaattctatcaaattggatatttctactagggtttttttcttttgtgtaggattttttatatgtggatcataatagggaagtttatcatcaaaactttgatcattttagacctattttaactcaaaattgattaggtcatgattttcatcatttcgcagggggtgactgtcctatgatattgttctatgattttattttagattttgggtttggctttattatcttatattgagtagatttttagccaatcgatatggagtcgtaataaatgagaaattaaaccaaaattacaataaattacaataaagaacaccagaatttaaagagtttcggccccagatgtcagtaatatcctacttcccttgtattttattaattggagtttcaaagtcaagaacaagcttttgaatgcaagcaataaaaatagcagagtttctgctgtcctagttgtgaatttttggattcctttcccaggtaatgggtgaccccttatataacggaaggtcggtggttctcctttcaggagatgcgaccattgcgtaaatatattaaccgtctccttaacttttggaggtggttgaagtctgattcatgtggcaatatctcgctatttttatg

SEQ ID NO: 107465 - DNA, 636 bp, Cannabis sativa
taacttttgcaaaatacaagatccaaaatggtatttacccttaaataaataaataattagagaacaaataagagaaaaaatacaatcttttaactatcttgggtacaagccttgtcatattattatttttgttaagcactatttgatttaaatataacatttgttctctcaaaaaaaaaaaaaacataacatttgtgtacaatctcttaacaaaatgaatgtaagaaagtgtttttgtgtttgtttgcttgtgtgtttagtgaaaaaaaaaataaccatagtagagtagtggttaagctttccttaaatcaaaaaccctttttttttcattggttgagacgtcttcttaaagttagaaaaatataaaaaaggaccacaccaacatgcatacgactttaggagaaaggtctaatttcaaattgtacccacaaaccttttcaatttggtttcaccaaaaaaaagttcataaatgtctttggaaattatataaacatatatcaaattcaaataactatcactttttacctttagaaggtctcttatgcaaattcagactcaaatgcaactaaccccaatgcccaataataattcaatccaagttcacatatcatatcatatataagatattttatccaa

SEQ ID NO: 107466 - DNA, 2020 bp, Cannabis sativa
ttgtcaatttaagaccattcaacataccagcttgttcttccgattgcaaaagtcttgaaagcccctctgaacaaatgagaaataagtagggggagagtgggtcgccttgacgtaaatcccgagaaggatgcacttgtcctattacttcaccatttagagaaaaggaaaaggagctgctagttatacacttcataatcaatgatgtccatgcatagtcaaaacccatcttaagcatgatagcctcaaggtattgccattcaaccctatcaaacgcctcactcatgtctaacttgagtgcggaatatccaattcttccttgagtcttgtgacgaatatgatgaatgagttcgaaagcaatcaagatgttatccataattaatctgttggagagaaaagctgattgtgtttcagagataacaaatgggagcaccttcttgaatctgatgatgattgtcttggaaataagtttatagataacattacacaaacttatcggttgataatccgtcattgaacttgggttaggcacttttggaatcagtgtaataatagacttgttgagatccctcatgtctagaccttcgttaagaacaccaagcaccagattagttactgaagtgcctacaatattccaataattttggtagaacatggcagacattccatcacaaccgggactcttatcaggactcgttgatttaagagcatcatacacttcttggctcgtaaacggttgaattaaagtttggttcatgtcatttgagatggtaattgggacagcactgagaacttcttgcagagacgcatgatctacaccatcggaagtaaacaaattatcataataagcacatatggtgttggtcatatcagcctttgatgtaatagtaatgccctgagaattgataagtgatctgatcatgtttttggacttcctggaggtggcgtgagcatggaaaaatttagtgttctggtcaccactttgtagccaatctactcttgatctttgatgccaatatttctcttcttgtgctagtaattcatccaaaatagattctgaattttgcagctccatcatatcccgattagtggttgctgcattatttagcagcgacacctatttttgcacctctgaaattcgttttttttaccaaacttggatacatgccaccgttgtagtgcttatgtgcaagagtgcaaattgtgcatgaaaagatcaactccaccactggaatttgtagaccaggactcacggattatagcagcagcctcaggttcatccagccataattttttaaatcagaatcttgttttttttgctggtttttcctgaacagaagtgatgtacaacacattgacagcaatagcccgatggtctgaagaaaaataatccaaatgtgaggttgtcatgggttggagaatggtattttataagtcgtttgtgaaacaccaatccaagcgctccttgattgcattgacattatgtctacctttgatccaagtataaggatccccctcaaaaggtagctgagaaagggaacaagaatccaacacctcacggaagtcatccatttgtctctcattcctcaatcctcccccaagtttattttgattagaaagaatttcgttaaagtcaccgattaccatccatggaagttgaggggcaacatctttgagtcgttttagaagagtccatgttaaatgcctattgtggacagcaggagcaccataaaaagctgaaaagtgccatttgggaccatttgcaatagccatataaccatcaaagacatttgtattaaagtattgcaaagttacatctacatcatctttccaaagtaacataagaccaccacttaaacctactctagggacttcaagtccattattgaaatgtaaaagattgcgaaaatgggaaatagaattacttggtaatttagtttccataatgaaaagtacattgggggtttactctttgacaagcaaacaaagtttacggatagcagtcgggtttcccaagccacga

SEQ ID NO: 107467 - DNA, 1006 bp, Cannabis sativa
gacatgacaagagaatttgtagctgccttacaaccaaatggaggccctcattattggaaaattaagcatgtaacatctgtgaccatcttatacaaatatggagggtgggctacttttaagaagtacaggttgggtgaaccaggcttgttggaacttcttcaatgatccatttatggaaaatgaaaggtattgaaatttcccactttatttgtttatggatgaatcaaattctcttataaaaatatagattaatagatcatggtagtgtacttctcaagcttgattcccaaagatttaggtgccacagcggaatctactttgtgtatttggttgaccactgttataaatcttctctcgtcatcctttggaggcatgttttctacctggttcatgcaataataaatctttcatggatgtatctgacaattattgatggactagcattaacacctttccatgcattgtgtgtggagtacttgcttaatattatttatatcgtgcacttttaggatctaaaaatctttttcattatttttaaatatatagaaagatggaaataaaaaatgactacaataacttaattgtgttgggcatagtgcttttcttctagtatcattgaattttatttagaggtgtatatgatacttgagtttcaaggtaaaggtacgtgtgatcaaagaagtctgtctttatttcaaaaaagttaaaagttggagccatgaattctcttggctttggttcctcaataatttaatcaataaagggtgagctgttcaacttcacccctttgatttccattgctagaagatgatcaggcttttaggtgtgggacccagcaaaaaccttttttcatcatttgacttttcaatttgtatggcattttcactttttgactttttttgaagattgttggccagttctacaaaacaatcctctttgtaatttcccactattttcactgacatattcctttcctacgtgacattgttattgtaacaccctaact

SEQ ID NO: 107468 - DNA, 3082 bp, Cannabis sativa
  modified_base (26)..(35): a, c, t, g, unknown or other
  modified_base (2840)..(2849): a, c, t, g, unknown or other
ataaaatggattacattgaaatggannnnnnnnnngggcataaaacccaacatttttcattaaaattaaaaaattatcacctacggaatcagttattatagaataaccaacttcgtaggtttttttttattaaaattgaaaaattatcacctacggagtcggttattacaaaataatcgactccgtaggtgttatattaaaatttcttccagccacactctatggcatcagttgattatttatcagctgcaaaaagcacctttaaaagcttgtgcattttgtagtagtgagaggttagtagctttcttgatagcttttattttcttgtgaataatgttgttgtgtgaagtattttataaaaaaaatagaaaatatatatatcaaaaaatttaaagtatgctctaaggttgtagttttatttagtcatccttatcagaaataatttttttttattaaaaatgaaaattacatctaatatcccgaaaattaatatagtctttaattggtcatattttattaaatatgtagttatttgtgtaatgaagtaagattacgatcttacttagggtaattagtgaggatttattacatgattatataaagcgtaatttattaattacggagattatattgagatatgtgggtatcgaggataccatttttgaaataaaaaaaatattttttaggttcgatgactgtggaaacttgacgatgtggtcagaaatgtcacgaaattagtggatggattattttgaggatatttcggactagtttagaattttagaatgtcaatatgatggattagtaaaattactataatgcccctagggtttgtttattttatctaagggtctaaaatggggtagtttggtctttttgggtggagtgggtattattttatcttattttagtttattttattttattatgaatggtggctgaaatttaattaaggttatattatatataaatatatattataattaaggttagaaatgaaaacacttaagtcacatatcaccctctatccttcttcctcctacccgaacccctaagaagcttcaaccaagggatttcttttgcttaattctcagaaattggattgtatttgcaaggggtagaagtttcttaggcatcaaggtatgatcttgcttgttttcctttgaattactttagttaaggttgagttttggttaaatcttttgggctttcatggctggttgggatagcttggaccttgagcttattcttaagtttaatttaaaaatgtttagattttaattgatgtattgtgtggctggtttggtttgaaataaataattgagttttagaatcaagttttggttcaaacttggtgaagttatgaattggatgaattgtgattaattgatgcttgagatgagttaaatttgtggtattatactgttctagaatgtttagacaggtatagattggttttggttcgaatttggggaagagaacgcaaaattcttagtctgccagaaccagtcgaccggttggttctggtgtaccagaactggtcgatcggttgccttgtaaggggaattcccaattttttctcccggttctattttggctcggggtgttgcgtggtacctgttttaggttgcttatgagttgtttgacctattttggagttgttgggagttaagttgtgtttggttttgaattcaagttttgtttcagaattctagattaaggtatttattaagtctcaattgtcgtgacataggaccgggatcgcccaacttattttttactcgggtctgcccgcacgcttgagttctgaactaaggtaagaaaagtggtaaacaccgtatgtggctaaatcttagcggttgagtggttatagtcttaattattatcaagattctgattaaatatttattaagcctcgggtatgacctaggattggaaacgattattaccattacgagtaattactgctgaaatcgcggataggtttcttacttatcgtttgcttcatcaggcaacggtagtgacatatttagctcgtggttaatgagtggtaaaggggtactttataaagtaccatgattgtgtttataatattgtgtaaatgggtaagcaagttaatttgagattgaattgttgaatattactgattattattttattcatttcttgttgagtctctgtgactcacgggtgctttatggtgtaggtaaagggaaggcaaaagttgagcagccatgagttcgaggtcgtagcagcaatgtacatatcagccgcagtggcacggcccagtgagcaggatgcactattttgaatgcattttgggaatgcaaagtttatgttgtaaaagtactattaaaccagtttgtaaatattttgaaaacagggggaccccgtagttaatattacttatcttttattataaataagttttatatatctatttttaattatcaaaatttaattacctacacttttggtataattatatagtatataaaataagaattttatagaaacacacacgtggtgtccctgttggatatagcgttacattacatatatgaattttaacgcccgtacttctaataaaaatactaatttatttatgcattaaatgcgaaaaaaataatatcacattttttttatttaatacttaaaaatgtaaaagatataatatataaataaaatcattgcaacatctatttttcaacataaattaaataaaagagagtgtcctagattgtccgcgcacttatatagccctcaactagtacagacaagtatgcaaagttctggtgccgtttggtaacatttttattttctaattttttaatcacaannnnnnnnnnaaatttttgtttttaaaatttttgtttttgaaaaataaaaatgtgttctataactacttttgtttttcaattttaaaaagagaaaataaaagtgtgttctgtaaagttcatttttatttttattttttattttatttaagtcgggtctaggtctggggtcggattcgggttcggctcagaggttgggtttagcgtcaaggccgtgggagagaaatttgggtccaggtctggtc

SEQ ID NO: 107469 - DNA, 795 bp, Cannabis sativa
aaggtgttatcaaagatttaatttcgactttccaggggttggtgctgcaaatgtagatcagtatgttgctaatattgctacttccgatacggtttcagatcctgcgtggtatcccgattcaggagctactgctcactgcactgccaatgaaaccaatttcacccagaaagaaccatattttggtcctgagcaaattcacatgggggatggggttggccttgatattcaacacattggtaagaaactttttaccactccttattcctccaatactcttgctcttaataatcttctgcatgttccacatcttaccaaaaatcttataagtgtagctcaattcactaatgataaccatgcatttttttgaattttatcctgatcattgtgttttcaaggatctggactccaagcaaattctaatggaagggcatcttagtcatggactctatgtcattcctccaaatcagcttcagtctaccagttctcactctttagcacctgcctttacattttctgtaaataatgctcaaatgagccattgtaataatcccccaaccaacttttctttggcataatcggttggctcatccctctgctagagtggttaagcaaatcatgtctttgtgtaatgtttcaggcaataataaaacatatgttgattcctgtgatgcttgttgcaaaggaaaaatacataagtttccttttcccatttctcaaactgaatacacaaagcctctccaacttattcatagtgatctgtggggaccttcccctattccctctactaatggatat

SEQ ID NO: 107470 - DNA, 1664 bp, Cannabis sativa
agttgaatgaacttgaacaacgaatagcgaggcatccatctcgctataggaaggcatactcatggtgccttcactaatcagctccaaacatctttcgatgagattcgctactccgtcgaagctgacgttgactgctgaagttcatcttgtcaccaagaacggcgattatcagatggagcgttatatcttcagtcacaggaacgacgagatttacattatcaacctctaaaagacatgggaaaagcttcagctcgctgccagggttattgttgctatgttccaatcaagatgtcctagaacgatacgctttacaacgtatttaatacacgtatgcattgatccggtaaaagcggaccaatcacagctatgtgattttcaaataataactgcatttattttacgtggaacataatcaaatcccacaattttaggggattattgttgtaggatatcagtctgatttgtaattaactgccctcctatataattataaataggagcaagatacactgaaaaaaggggcgaaaaaatctttaagagaaaaaaccctagaattgtatcagagatatctaataagatagaatcgtggactatgcataattttaactgcaaaaccacgtaataaagctttgtgttctttattttttctttactgctattattttctgtgcaaatccatcacgatttaagttttaatatagttaacgaaaatttgcattaacaataatattttctaaaatttttgaaaaattacataaatataactgaaaatcataaaaaaaaaaaacatacataatttagaaattatcttattaactttaaaattaaaatgtagaaaaatagagtacgaattgtattaaaaaatgagagcctgcataagcacaacttgaaattgagtgcaacacaaatctaaacatatagcacgatacaatccatattttaaaaaacaaagaataatatatgagttgggctaatctaacacacatttatttagaacattacttgccctagtggagatttcttgccctaccctttatagggaatatgcgggtacggaggcaggcataagtattcaagtaattaataaggatagggaccggaaaataatcctgacctataacacccccaattttcatcccctaataatgtcaaaccaaactacatttcattttacaaataataaaggacgaccacaataaattttcttgtcaattcacgtagcaaaaccttttgtgtgtccacattattcggtgtccctattgtaaaagtcacattctttaaaccttttgtggacctattgatcagctatgtttttgtggacctgttaatctatattattttgtcaaagttgttttcggtaagttcattggatgtttagaaagaattaccatttaaatcataaattaagctcaatccctttgcgatgcacccttctcaccattcattctccgaatctctcatttgtgatatcttctacaacctacactatcatcatcacattcacatcttttttcatcataatagttatagtatttatttttaatcattatattattactaacattaatgtaaaaattaattaaaaataataataaattacttataaattaataataacctaattttattttatttattaatatattttattttcttataaaata

SEQ ID NO: 107471 - DNA, 1985 bp, Cannabis sativa
tgaatccattacaccctctgtttttatggtgctcaatattttacaatcgatttactttgggttatttcagatttatttttgaactattcaaatgttttgttcatgagtagtgagttttactctcactcatatgagtatattagattgacttatctttggtttacaaagaagaataaggtatggcttgtatttgatttgagcaaaaatatgtctgtatgtttttgatttatacaattgagattgccaaccgtgttagattatgggttgattcttaaagatttgaaaaactaattacaaattcaaatgtggtagacatatataaagtttgggattgagatgagatgtgattaatttttgagcttgtattttaaaaaacttaaatatgaagtttacaattctttctgttttgcattgcttcataatttattttgaacttggctgctgttagtattgacaaagaggctgttagtaggaatgtcaatcgggttgggcccgacccgccacaaacttggccaagcttgacatcactttggcccggaccgatttggcccgactccttcctttggcctagcgggtcatgcccgatctgagataattgggacgggttaggcccgatctgtattttttttttaagaaaaaaaaatcaatttatttattttttaaaaaaatagttgaattaattaggtaaaagaatttaaataaaaatagaagacatgtttgaaaatgtgttaaattttccataaattgattttgaattgtggaggatgttgtttttaaattttaagtaggttttagataaataatttgattcatttggtagtaaaattcattaggtaaagaaatttctaataaaaatagaagacatattttaatttctgttaagttattgcattttcaatatatatttttataaaatttgtgtgagacttgtggactttttttatgaacattttatggatggtttatttattgtttgaaatgtggagttttcaatttaaattagagtaatttattatgtataatggacattttattttattttataatggacatagttgttacgaattggtgtctatggcaataccatgcttttaaagattataccaagttgggagccaatctcttcagattataccaagtttgaaggatctgaagagcccactagaaaagaaaggattctccaatatgagctatgagtatattatgtttttttttttttttttttgaaaaaatgagtatattatgttagtcccacattatgtatacattttgttgttcacctaataaattagttatataaccacaatacagtttattattttccaaccttttctaatttgatcattacaaacaacttaatattttcatagaaattaaaaaccctcaaattgagatttatatatataaatatagaatatttcttaatgaatattacccataaagcaaataaattgattttgagtgattaaagaatattaagttttacaaacgatgattcattgaatcagagatggaagataacccgtatgaatattttgaggagtaattcttctagaacataatcacttgctttttcttcttagtctttaatatctaagttttccattgttattatttctcttagattagtcatcttaagtatgaacttgtgttcaacaattagattataaaaatatttatatgtatagtgtatagatgaattttttttttttattattattattactcttttacttttcattcacgtatatataaataaaatttcaattatatctctatataagaagaaaaagataaataattttttaaaacgagtattcaccgctcaataaaatttagtttttctattagtcttgtcttttgacatggttttttagtcttttccttttagttttttttttttggttcagagtcttgtcttttggcataggttgtgtaactcaaaattatcatagtgctaaggtagaagcattcaaaaaggagaa

SEQ ID NO: 107472 - DNA, 711 bp, Cannabis sativa
cacagtacgtttaaaatcacgtcaacacgcctatgctagttagggtgttacactttgacttctcctgatgcacgaatggcataggaaaaaccacaggtgaagaaaatctagaagatgttgatccaatccctttcaattacaatttaaagtatatagttcacatccacataaattaatatcatgggtaacccattaatcatcttatctaaacatttcatatagaataattctatcactaatatttttatttaaatccctcattttttaattttcaaaaacaaataatgttatgacgacccctattacaattgtcatcctacagccacttttggtggagaagacattccaatgacaccataacataaatgtaaaagtttttataaattgtagttaaattgttctttttattaaaaaaaaatctaaatagtcttttaaaaataactgcatcattagtcacaagaccacttattaaattcattaaatactattatcttttttttatttattttatcataaaaacacatctattttctttgttaatttcaccaaatcaccctctttctatacattttaaaaatagagaattatgtttatgatttcaatacaattgtttttttatttatttataatacacacatcaaaatattatattttagattacatcattcaatataagtataatataggtttttttattttttacacttcaaa

SEQ ID NO: 107473 - DNA, 838 bp, Cannabis sativa
ccattaaaccgctcatgttagggttataaccctaatccttgtttctaattactcacatatatcattttcaatataagtgccactgcacataactctacgtgctaactactatcttactccgggtgctcctgaccaagtgccggtaatccttgtcacaattctgggattcacaagtatagggttaatccctaaatccacttcacataatataaaattggcattcaaaatacagataaacatatagagctcgcaacgagctttctaacgatataaagaatgtcctaaacagagtcctaagttaaaagttatgaacaaaacaagttcaacatgcaatctgtccacgcaagcgggccgcggcgcccatcagagcaggccgcgacgactgggtgaaaaacccagaaactccattttaacagctcaaaaaatgcacaaaaactcacccaaactcacccgaaacatgcatatatctcaaaatcattccccacataatataactaacataacagggagttaaaacacaaatttcatgcatcaaaatccaacaatatagaccctctaaattaagatttaacaacacaaaactaggctccaaacattaagcaagattcactgaaatcccaaattcaagagcttaaacacaagaacaaaaaactcaactataaattcagagctgcacaaattaattagagaaccaatctaaactcaaaattcctctcaaaacataacacaaagcatcttacattaatctttaacacaatcaagcatagagtatcaaaaattacactaatatcaacatacatgcatctcaagaacattcaaagctcaaagacctatttat

SEQ ID NO: 107474 - DNA, 709 bp, Cannabis sativa
gatgatgacgtgtcacgtcattatctatttgatatatactttaacgttatttttgtaaaaactttgctaatatagtatattcctaaaaaaatcccaaaaaaactatctcatccttgatcaagtatcaacagcttaccctatctttgcaaatataggaaaagtaaactaaccgggtcatatgtatcctaaaatctaatcataaattctttatccaaccctgtcctcagaaaaattaatattaatattaatattaatgtactcagaaatatatcttaaattttagatagcaaatattgtgatttttttcatttaagaacatatatgtgtataaataaattaattcgaataataaataaataaataatatatggtgttggaatgtgatatatatttgctgaaacgaaattagtatatgacggtagcatttaatataagtttattttttaattttttgaaaatttaatatatgctgtaaaaaaaagataataattttatatatgactaatgggagatttttttttttttgaactcgactcatgggagattaaaaaagatatattttgagttaaaaaaaaagatagtgatgatatatatatattttttaaatgctactttttttttttctcagcaatactttaatatctttatatattaaaagtttctatctaacgacatttcttggtttaacattcttggtttaacagaatat

SEQ ID NO: 107475 - DNA, 2467 bp, Cannabis sativa
cagtatgctgaattgtacattaaggaaatagtgagactccatggtgccccaaagtcaattatttcagattgtgatcccaaatttacttccaagttttgggattcatgggagccaagttgatattcagtacagcttttcacccttagacagatggttagtctgagagaacgatttagatattggaagacatgttgtgagcatgtgtaatagattttgaaggatcttgagcaagttcctacccttgattgagttttcatagaataatagttatcggagttccattagtatggcaccttacgagatgctgtatggtaggaaatgtcgattgcctatccactaggatgaggctagaaagagatgttatcttagacctgaatcggtccaaaggactagtgaagccattgaaaagattcaatcttgtatgcttgcttcacaaagtagacagaaaagttacagtgatccatagcatagggatattgaatttcaagtgggagacactgtatttcttcgaatatcacctataaaaggggttgcctagatttgaaaagaaaagaaagttgagccctagatacatcggtccttttgagatactggagaggataggtcaggtggcctatctattaactttaccacccgcgttattcgtggtgcataatgtctttcatatctctatgttgagaaagtatgtgtcaaatctgacacatgttttgagttacgatgatattgagctccagaaaaacatatcttatgaagaatagcctatccagatcttagaccaaaaggagaatgtactccgaaataaaacgacccctctagttaaagtcttgtggaggaatagtaaagttgagaaagcgacttgggaattagagtcacagattcgggagttgtatctcaagttattcaagtaaattttaaggataaaattcttatatgaaaggggatgattgtaatatctcaataaggttaatagttaataattagggtttataattataatatgggttaatcaggtaataagtggaattatgatcctactaatctagttcaatataaattttaaatttgctataaatagataaataagcataatttataaattacggagatttatatagcataggtgaatgtaatatgacttactggtgtaataaaaatatttttagttttggcgaccttggaaactcgatcgagggcccaaaatatcataataggcttaatggatagaattaatgagaatattgtgataagttgataatgtaggtatttgaataattaggagtatgtagaatttgatgtagcgtcctagaagtagaaatttcttagtagctaagaaatgataagataattattaataataaaatttttattaatattattattataatattaacttttaattaatatattagtattattaaagtttttactgtcgttataaaatctatttttagtgttttattttagtcaaatttttattattttcacagtttttaataattaattaatatattagtattaaactagttttataaaatcacacacgtgatgtttctatggattaggacgttacaccaaaggtatcaaatgctatttttttttcatgtttaaccctttcaaagattaaaggtccacaaccaaaggtccacgggcttccctctataacgcattcaatatccaccttatggtagaattgaaaaatataatggttcagactaagctctttaacgtaaacacccctacccagtttccaaagacaaaccatcttgttttgcatcgcttgaaaatcaatattgcatttcgtaacgaacattccaacaaggcaccatctatcatctatctctgataaatcttgatcctcatcatcatacaccagtcttcccattgaaatatcatctgtcataatatttctgtcaccttcttccatattgagagagctcgacaacccaccgaatcgaacaacaagcacactcacacatggacaagaaataggaacaactcaaatcatgtcaaaagacaagacttatataatgttaaactttgctaaaaaaattaaattaattaaataaatattaattatatatatttttttggcattctaattatatcaataaacatcaatcaaaatagacatatttatggtaaaaatttatatttctatggcacaaaattataagtttatgatatgtatatggcatgttttgttttttgaattacttaatgtaattttacactccttttatgtaagggcatttttcaattttaaccaaaaaaaaagtaacaatattacaaaaatacttccagctagccaaataaacaaacatacaacccaaataaaaaaattacacaaataccactcacacacaccttcaacccaggatccatgcttcttgggcaactatcgtgcaactacgccgcaacccaacgcaacagaaacgaaaattcaatcagaaagagaaccaccattaat

SEQ ID NO: 107476 - DNA, 1099 bp, Cannabis sativa
aacataaataactgctaatttccaaattaactaagcgggctttacaacgtcctccttttttgcaaaggagatctgcaaagtattagattgttgcttcaaggattgaaactcttttcaagatcttcaagtctctggccaaataatagcaaatctgctatttactgtgcaggaatgtctcaaccagagatccaaaaagcgacacagatttcaggatttactcgaagctcaattccttttaaaaacctggggataccaatctgctcaaagagaatctcacagaatgagtggaataccctagttgacaaaatgacaactcgcatcaaaacctggagctctagacatatttcttttgcaggtagggctgttctcatcaactcagtattactcactgtacacacatactggagtcagattctagtattgccaaagagggtagttgctgagattgaaagaatttgtaggagctttctatggaaaggctccaatactatgattggagctggagctgtagcttgggagaaaatttgtctttctaaagctgaaggtggaatgggatttttaaatgtcagcagccttgatgaagaatatatggacactagctgtaaagaaagataatttatgggtcaaatggatccatagtgtctatttgaagaatggagattgttggaaccacaaggcttccatgtatagtagttggtattggaggaagcttgtggaaataaaagatgagatgagaagaaattggattcaagtcaggttcatgctttggagtataaaatttcaaagggatagaagaagcttcagcaacctcaagactgaattcactggtgtaatcaagtttggtctagactcaaccatcctaagcatacttttattctttggatggctgtgttggacaaacttaagacaagagaaagactaaaaagaatgcatataacagaggtagatgattgttgcttttgcagcaatcaaagagagagtaaagaccatcttttctttcaatgaagcagaacaggcagcatgctccaacaagtgaaagaatggatcggttggaaggcccctgcatctgacctgactgctttgatccgaagcattagca

SEQ ID NO: 107477 - DNA, 1209 bp, Cannabis sativa
atgagcaagtgaaaaaaaaaagaagaaaaaaatcagtagttaattagtagttactattttcgcgggtaagaaagaacaaaataataagaataaaatcattcaaattttttaacgaatttggagactttttacgttaagtacaaaaactaagtcaaaaataacatttaatttttttcgttttggattttaccgtccctacgcctgcatcagaagaatgagtcctataaaattaactagctatccgggcattggaggagacattatgctttcaaaattacttcaaaacttttgttttaagggcatttattcattccattttaatgtatatatatatatatatatatatataaagcatttattcatttaatgaaattggattcagcaatactttttaccaattcaattagacactaattactaatggtatttagaagtaattgtgtagttattaagtattataaatattaaggtagtataattacattatattttgaaatagtatatttggatatgaggtggaaccttacaattatctcaatagttatagttgcaattacatgtggtcaaataaacatgcttaatgtaattacccttaattacatagtgtcttattcttactacaaaatgatagtgtatcaatttaatacaatatggaaggcttatatagaatagcaaatgagcccttaacgacaaaaaaacgcatcataggatgattttgttctaggaatcaatataataataacatatatttcaaaaaatatattaaagcggcataagtactaatatattattaatttattgaaatatataattttataaattacaattttacaaatatatttttatatatgtgttcatccaatccaacagattacattttttggatccaatccaatccgcacaatagctcaaatccaatccaattcaagtcatttgtatcgtactctggtagctgttgtagaagaattctattaaaggcaagaacttactccatgaaccctcaaagtctatgacacaggctcacaataagtcttttaatatcagaatggttctttctgattgcccatcagtctaaggatgaaaagttgtagtgaacttcagtcttatacccatagctctctaaaaacttatccagaattcagatgtaaattttggatctctatctgaaacaatggatttaggagctccatggagacgaactatttcctt

SEQ ID NO: 107478 - DNA, 847 bp, Cannabis sativa
ttttttttttttttgagtgtatctctgagtggggttgtttaattatatcttttaagtttttgttatctgtatttctggctgtatgtttttaacatataatgcaaaatagtaatactgcactacatagtgagtttatgcactacaaataaaaaacaagattaattttattagttgaaagtaattttttcttgtttaatagtcaatgtattatttgactttcaacaataaaattagttattttattaaaaaaaaaaatcccaccggagttgcatacattcacatcatgatttataaatttcatattttcatgcaacaatatatatcctcattaagaaaaccaataataagaaaaagctgtaattagttaatgtactgacaaatgaataatatcttctgatcaaaaaaacaaaaaagacaaatgaataatatgttatatcattaccacttaatatctttttcagaaaacaaatagattcccatgcatttccggaactttcaccaattttcaatgcatgattactgaatccaaatcatcaaattcgtacaaaatttaactgtgccagtatataagatccaatgattatttactttgtgttcgatcacgtgtaggccgacctcaataaagtgatataactatatcgatatattaaacaaatgagaaatgtatgaatgctaattaatattttttgtaggtgctaatatcgatattagtcaaactaatacgtattgggtcttataaatataataattattaagaattattgctacccaatcgtaacgtaacatgttaagaatatattagatactactagtacctaataacaataatctaaacaactacgtataa

SEQ ID NO: 107479 - DNA, 776 bp, Cannabis sativa
ttttcttattattttcgtgttgttactataaaaaattgtaaaagtgtaaaaaaaaaatctttaaacgtaaaattgaaaatgaaattatctttaaaaaaaattgtgttgtatgtaattatctttttttattaatatcgtatttttgtcaaagaaaaaattatctgattatcatattatttttatttaaaatcttttgtcaaatttaaattcaataacagatttttttttaatttttcaaaataataataataattaaaactaattttaaattaataaataatttaaaagatatctgatatttgttgacgaggctaacgcggctggaaagttctattttaaatactttaattattatagcaaataatataatctcatttaaattataaaagatataaaaatttgaattcaaataacatatatatatatatatataacaaattatgagtacttcattaattggaagagagaagtatagagtgtgagagagcaagcaaattaatatttttgagatgggttgcgtttggagtcaaagcaaagaagatgagaagaaaaaagagagaaacaagaataagagtactaaagatggaaatatgattatcctccaaaatacttggacatctcattattctccttttaggcctaccaatgccaaacatgtacacaaatcacgtaattataattcctctacaaaaaatagtactactcacagtactaccaaaactaccaaaacaagtaataaagcttccaatgactattttgcggctgatatgacagct

SEQ ID NO: 107480 - DNA, 1819 bp, Cannabis sativa
gagcaaagatgctttggtagtttgccttcaagcctattgaaacagacctctaacgtttcgagtttcgaatacttgcccaaatctggaggcaaaacacctgacaatttgttgtcataaagttcgaaatttatcatgcctggcaatctaccaaggccctctggaatatttccagataattgattcataaacaaagccaaatccgacaattggtttagcttggccaagtcttctggtattcttccagttaagttgttctctgaaacatcaactatagacaatttaaaagattcaatcacctgaggaatctccccagaaagattgttcgtgtaaagataaactgtgtctaagttctttaacttgaacaacccatcaggtatttcgccactcaagttatttttcgataaatccaaactttccaatgctgtcatatctccaatacttccaggtatgtctccaaccatatttgagttagtaatccaaaaaaatttcaattttttcaattgagtataactggaaggcagccttgatggcgaaagatttttattgtcggataaccaaagcatttcaagattagacaagttacctaattcttgtggtaaagagccattgaattggttgtgctctagtctgagtcttctgagctcttgaagctgtccaatgactgctggtatgtcgccggagaagtaattaccgccaatagaaagattacggagctgaaccattctgtttatgtcgccaggaatggttcccacgaagtagttgtcagtgaggtccaattcttcaagctttgaacagttgaacagagcttttggaaactccccaggaatgtggttgcccgcaagatcaatgacactgaggtttttgagatcacttataaaagaaggaattggagttgtgatgtttgcatcattaagattcagagcggtgacagagtcagaggtgcaggtgataccaggccaagagcagtgagaagaagagtttgttgatgatggaatccattgactcatataaggaaggtctccccactgctgttttagcttcagaagcactgattgttcctgcttctgcagtgactgggagagtactctgccatggctaaggaaaagaaggaagataatgctgcataatgggattgacttcactttattcattttgaagagattcatcagattgagagtttgtcaatctgaataattgataagtacaagtttaagtaatttgaaggagggtttttgcagttttttctaagactgtatagtcatcactatggtgactatcaatgttagaaaacagagtaagtcagttgaaaccaaagaccaagtttgacgctatgttttaaatttggggtttgtgtgatgaatgatgatcattatatatagcaattggattagtcaagtcttgactcttgagtcagcaaagtaactgccacagtaattcaacttgaatgtttagcgataaagtttaatataaaacccaaattgtttaacattaaccttgactgagaagatgctatataaagataaatgtaaatagtgacataactacttaaagttttaggtttgtaatcggcataaattttatgatttttttagtagcataagtacccaatgtttataaaacaagacacatataagacccaaattttagattatttggtctgaaagaaaaatatgtagtatcagttatttccaaatcctttttgaataaatttaaaatggagtctgtactgacgaaaatagagaaaaattacaattttacaaatatttagtacttatgccactaaaaaaattattaaatttatacagcttacaaactcaaa

SEQ ID NO: 107481 - DNA, 813 bp, Cannabis sativa
  modified_base (663)..(666): a, c, t, g, unknown or other
ttgaaaaaaatgtcatagtttttttagggtttagggttttggtttaataataattttttttttaattttttatgtatataaaatcaaaattcccaatattatcttctttgatgcaataatattccacaaccccacatctctaaacccaagaccctttttagtttttagtttatttcaccaacacaccagctcaggaaactctcataatctgaattgcctttccacaaaaaaccacaaaaaacttgattgattcttttaacaaccatttggccccattatgtattaatatatagtaagcaaaatagagttataattaggaaaaatcttcctgcaaaataaggaaaaattgtttgaactccaagttctactataagttatccttcggttgttttagtcaatgaacttaattattaatgatcttcatgctcaaataattaaaaggcaaggaattgttgatgtatattttgtatgtgattataaataaatcgattgtttattaatttgatgtacaaaaataacaatacatatatccaaagtgaaaaacaggagtattattctctaacagaatccttgcttgaaaaaaaataactaaattatgatagaatagaattggatttaatttttttaagagtaatttgtggcataaatacttaagttttatgnnnngtagcagataaatacctaagtcgtatttttggcggtaaaaatacctttcgtcactagtgtagaacttctgtaggtatctgatcgttaactgacaggtcgacatctacgtgtcactcgttaattggtccatgtcattaatttttttat

SEQ ID NO: 107482 - DNA, 1249 bp, Cannabis sativa
tgttcgcccactgctattaattaacaacttttttatatcatttattaaattaaattatataacacttatattaatttagtgtaaaacgcgggtatccacaaagatccaacagtgatcatcaaaccaaggctaactttttacttgcctaatgtcctttaatttacttgttttctttgagttattaaggtttgtgttaaacaaaggagaggtggaataaaaggcaaaaatcttagaattctaaaaacatttattattataaatggtcagtgcttttagcacagatcagtattagacacacttttgtctataaaaattccctaaagagatatatttgggatagggataaacattattggagcaataattatgttatataatacatcaaatctgtctattgctgaactgggaggactttgggtatggcagaaacatcaatattacttggcatttttaagtaagttggagtgaaagcagatttctcatcagtggaaatagtgtcaataaggctgagcagaaccttctcaaactcctcaccatcactccattcatggattttggccttgatgagaagtgggttattggaaatcaagtcccaaacagggaaattcttccttggcatcataaaatcactctctttcagcttcaggcttgggcaatagtcaccagctccatcacccagataaattattcttttgtttccctcactggcttgtattctttctataatcaaaccctgcaaattccaaaaataatatttgattaattaattctgatttggaaatatatatatatatatatatattatgtggggtcagagattttagtgtcgtacataggacaagtggtcaaaattaaagatttattggctgcttcctaaactaattataacaaaacagaggaatatattctatatatgccaacatctgtggacccaatggactaaattttctctttcttttggattttatggaagccatgcttatgaatcataaaatcagaaaataattaatagacaagaactattataaataccttgcacatgttaggagggcaggtgccggtagtgcagccatgtgaggagtttttgaaatcatgataaggttgaatcctaagtcttccttgttcatcaacaaagctgggatttgtgttaatctctgaaaagtactccctcagcccaagatgtttcaacattgtttcaatgaagaacatgtttgcatcactaacaatcctcaattcacatctgaaatac

SEQ ID NO: 107483 - DNA, 925 bp, Cannabis sativa
  modified_base (769)..(771): a, c, t, g, unknown or other
atgaaaaataattccaagtttaaagaccgcttggttagtagctttgtcttaaaaaaggccttatggccggacagataaaaaagagatagaaaaagaaaatttcaaacggctggagtcccaagctctttgtacgggtcttctgggtcagttggagctgaaggatcatttgtctgagcggagggcacgtcaacattctggccaaaggtggaagtggtcgcctcaggttccccgtaggccacttgaaaagcgcaatactcgagaaacatgtctttggaattgcccaagtaatcaacgtttgcctagggattagccttccagaagtcatagaagatctcgagaccaactatctctaaagcattcacttgccctccaagcctcgccacttcaactctctactgctctgcctcggatttatacttcttgacctcagcttcaagatcctcctccttagacttcttctctgcttccaacctgcagaagtcagctcgaagaacctccctttcttcctaaaggcggatcacttcttttgacaaggaagcaatggcagtttcaagttggtaagaagcctgtagatctttagtcagctcggccaccttcttctaaaaagcaagaattttcttgttaacctctcccaattccatctggacagccccaagctaattcattgaataagcccaattctaattgggcctaaataaaattatttatgtgaaattttattttagcaacctagtccacttatttagtaaaacttaaatgggcttcccannngcatctaagcccaaaagcaaacatttagataaatttttgcatctccatctctgtctacaacatctcctccactctcaacctttaaatcaaaaaggtattatttttaatttttttttaaaaaaagtcaattagttataaattaaaccattagtta

SEQ ID NO: 107484 - DNA, 1679 bp, Cannabis sativa
ccctggttgagaccattcgtagttctgtctcaatgctatctatatttagtttaattgttcaagaatgtcagcttatgttttcttccttagataatatttttatttgtcaagttaaacggtttgctaataaagtcgcgcactatatagcatgtggtacttgttactggtttgactgtcttttcactaagagtaatgttccttatgcttttcagtctattgtattagcgaaattatctctctaataaattttaattttcattcacaaataaaaaaaaaaaaaaaaagtctccgccacaaccgtagtaacaccaataccagtaagtaccatctcgtgcccagcaccaacgaccaaaataacacaacacactatcaaatatcattaatcttacttattttaaatatttttatagttacagaaaaaaaaaatgtaattaagattagggtgcacccagttatcaaaaaaagattagggtgtacaaattgcactacaaatgatactgttcagcttttttttttaaaaaaaaaacttcattctgtgtttctctcattttgttgggccggcctaaaaatttattttcaaaattgccaatttctttcaaatatagataaatctatgggtttagtatactgaaaattaaagacactggagtggagtctactattaactttttcctgatcaatggtgggtactaacaacttgtaagaaagaaaaaattgtacatcgtaaaagtctttaaatacaggataaggatagtgacaagaattatggatagaaagttcattaaaaatattgatgtgatacattaaaattttatctcaaaattaattagagaagtagagtagtttatatttttatatgtggcttaataaggacaatattattcaaaagactatgttatcaatggattagtttggttcaaaattttatttattttttaaccaaaccagtaatattagtttttttttaaaaaaaataaaattcaaccgaaccaaactaattaaatgctcaaacaaaaccaaactaatccacttaaacgggttgatttgtaattagtaaatgttcttattctttttttttttactttaaagtattatacgtaaacaacaatgaaactagatattggtaaagtcaatattaaggcaactataaatattatgcctaagattgttcttacatattaatatttaattaaaaaaaattaaaaatcttcttatatatgtataaaaacagtttgatttggtttgaactacaagtaaaaattttaaaattgtgaccgaaccacaaagttataaacagttcgaatcgaccaaattattgacactgaatttacttgtttagatctcaaatcatttagttcgaattgattggaatttggaattacaaattgaaaattatatgaacaaccgtagatgaaagagacttttattattagatcaataacataaaatgatgaaataaaggaaaagagaatgagagagagaggagatataagaaaatacaatcttgagatttgcttaaagcacaccaaaatagtttatgaaagtgaatgtgtacttccagtgcgagtttgcttagttgtgttttttgttaggctatttttagcctatgttttggatccaatttatgtgcatctttagctgtgttgggacggaattacgcttgttttctatgttttcag

SEQ ID NO: 107485 - DNA, 987 bp, Cannabis sativa
aatattttaaattattttttttatataaaatatttacatatttttttttattttaattcaaagttaaatgaaaaaatttaaaaatttgattaaaaatttctataatattttaagtattttaaatttaaattaaaatttctttatataaaatatatacttaatttttatttttaatatatataataataatacaaaattaataaagaatataaattaatattctgttaattaaaaatatattcggttaaaattgacgtaaaaatttaaaaaatatgttaaactaaaaattctattacataaccatatatatatatatatattattttctctaaccattattacctcatataatttttcaaatttcaaaataaggtgaagagacctaaaaacaaaccattcacctaaatatattcctattccttatatacttactattaaaaaagtggtacgtaagtcattttcaagaatctagagcttcttgcctaaaatatgtgtcaatccaatctgtttagtctcaaaatattcttaataaccataaattatgactatttcaactacctaaaaacatggccaaaatttataaggacagaaaatcaaaacaacaaaaaatagtcaatttctagtttgttttagatatacagataaaaaaaacacacaattacaaaagaaaaacaaaaaacagaaacccaaaagacaaacttgaaatttcaggggaattctttgtcatagatttgatagaacacccctgaaacttcaataacagtccaaatcaaaacgacctgatcctaactgtcgttaattcaaatccttcaaatactcaaaaataaaagacccatcaattctgaaaatataacctttttcttcttcttcaacttctttttaccaccaccattattgatcaaaacttatcaataatggggtgtcaaaattcgaagttgaatgcagatgtgttggccataccaccaaaactgcgacccattttatgga

SEQ ID NO: 107486 - DNA, 2341 bp, Cannabis sativa
attggtgcatcatcaaggtggaaggtggagtcttgaaaatttcaaagaactccaccttggtgaaaggggaattgaagaatggtttgtattctttaattggaaaaactgttacgggaaatgcaagtcctgctataacagttcaaggaattgatcaaactaggctatggcatttgaaactagggcatgtgagtgaaaggggtcttcaagagcttgagaaacaaggattattaaagagaaaacttgaaggaaaactaggtttctgtgaagattgtgtctatgggaaatgttgcaaagcaaaattcacaactggtttacacaccaacaaagaacctttgagttacatccattcagacttgtgggggccatgaaagatcaaaactttaggaggtgccagctattttctaagcatcattgatgatttttcaaggaaagtttgggttttcttactcaaatccaaggatcaagctttcaacacctttgtcacttggagaaagcttgttgaaaaccaaactagaaaaacaatcaagaaactcaggactaacaatggtcttgagttttgctctaaccaatttagtgatttctgcaggaaagagagcattgacagacacaaaacagttcccaagaacccacaatagaatggattggctgaaagaatgaacagaactcttactgaaagggttagatagatgttgcatagtgttggccttgagagaccattctgaggagaagcagtcaagacagcaagctatctcattaatagatgtccctctgctgcaattggtttcaaaaccccacacgaaaaatggatagggcatccacctagctatgatcacctcagggtgtttggatgcactacatatgcccacattaagcaagataaactctaaccaagggctctaaaatgtctattccttggatatcctgaaggagtgaaacgttacaagctatggtgcttagaaccaggatacaagaaatgcctattaagtagagatgttattttcagagaagatgaaatggctatgaagtctaaggatgagacaaaaccagaagaaaactctagtgacaaaccagttgaggtggagcctgacactgcagatcaaacaaaataaggcactgattagactcaagaagatgagccaactggtgcagatgcaggtattgaagctgatgattatcatctcactagagatagaggaagaagagtgcacaaggcacctttcaggtttggttttgctgacttcacaacgtttgctcttgcttatgcagaagagttagacaactctgaaccagaaacatttcaagaggaaattacttgcaaagacagcaagaaatggaacaaggccattgatgaagaaatgctgtcactcaagaaaaatagaacatggattgtggttaacaaacctaagggccaaaagcttgttgggtgcaaatggctatttagacacaaagaggatgaaattggtacaagtgaagtcaggtacaaagcaaggcttgttgccaaaggctttacacaaaatgaaggcactgatttcactgaaatttttgcacctgttgttaaacaaacatctattagggtaatgatggcaaaggtagcaaagtatgatcttgaaattgaccaaatggatgttaggacatccttcctacatggcacacttgatgagaagatctacatgactcaacctgaaggatttgacaatggaaatcctaatcaagtatgtctcctactcaaatctctctatggtttaaaacaagcacctaggcaatggaacctaaggtttgatgagtttatgaaaaacattgggtttagtcaaagcaagtatgatccatgtgtctactttaatcagcatatatatctattattatatgttgatgacatgcttttgattggcaaaagtagacctgagatagacaaactcaataatgagtttgaaatgaaggacctagaattagccaaaaagattctagggattgacattaagagaaagagacctcacaccatctttctgtctcaaaagggatatcttgaaaaggtgttaaataagtttggaatgcaaaatgcaaaaccaatatctactcccttagctcaccattttagactctctaaagatcaatctcccaaaactgagaaagagagatctgaaatggacaacataccatatgccaatgtggtaggaagtttaatgtatgccatggtttgctcaaggcttgacattgggtatgccatgagcatggtgagtaggtacttatccgatcctggacagcaacactggtgtgccctcaaatggatactcagatacataaaaggcactctagacttgggaatcaagtttggaaatgagtc

SEQ ID NO: 107487 - DNA, 834 bp, Cannabis sativa
attcacgacgtcagtagaaccatttcgccatttggccggctggaacgccgcatggatgacctggatcgtgtcaaattttttgaatgaatgaaaccccctgaatcccaacacgaacataccatcccagagatgaaaagtgtgctctgttccattatcactgtcatcatcgccctcagcaaaaatccatctattgaaatcaacaaagatgcctaggccatcaacatcacgattggatttgactacaattttcttgataaaatcttgatctcccaacgccagcctactatgccaagccccttcctctacgccataaatctctgtgcgtcttcccacgctagacacaaaatcgacagtcatattgctcagacgtgaaagggttcgcaactgaattccaacaattctcgtcttattcttaatgtactcatcaacacccgtgaacaagtcaaatgtagacttgggttcgattttgcctcgtgtaccaaactctggtgagtaatcgatcttgtattggatttgtggtgtgcccttggaaagggatggcaacggcggtatgatgacttctatggttggattgctatgaaaagtgtggaatattctctgaagtgtcaccaaatcttttgttgctaggaccgcgacctcattaagcttagggtcattgtatccgccataaaaatcgtagatagattgtatttccttgatttggtcgatcagttggcatactttggagaattttcccaccaagccaagatctctaaatcccatgcccactaatttattccgatttgaggcaatggggttaaaaccgttgtgaacaccaacaacatgttcataccc

SEQ ID NO: 107488 - DNA, 1233 bp, Cannabis sativa
caaaacaagaaaaaattgttaaatcttcatcttagattataaattacatataagtaataattttaaaattataataaaaatacttatcctatgtatttcttttaaacggataaaagaattataaaaaaaaactcaaaaaaagatagaacgtgctttgcacgtagttgtcgtctagttttaaataaatataatatacacgactacgaaaaaagatttaaattctgaaacaaatagaagatgcaacgatataagagtgcattgtagaagcacacttaaatatatttgtaaatttatactcattttcaaaaaaaaaaagttattccctttaatattctaaaaaatatatattttcaatattaaagcgaaaaaattaaaataaaataaaaaatatataaaattttatttgtaataaaaaaatataaacatacattattttcaaaaatataatataataacaaaaaaaaatgatattaatacaaaataatgaaaaaaaaaatattatgagggttttagaaagtaatttaagcccttttaaaaaaaaattgtagcaatgaataactttattgaaaaaagtaatcataatctcatacaaattttgtcttatgaaattccaattaaagaaggaatctcattaaaccatactagttctctatccaccagaagagcatgtcaaggtaatccattgtgcaacctcattggctgtccaacgaacatggatcaaggatactttaaggaaactcgacatcaaactagctaaattctctaataaaaaaccaagttcattgaagaaagaatagcgtttagaaaatacatttacaatcgctaaacaatcagataaaatacatttacaatcgctaaacaatcagattaaacaaaatataaagaaagactcacggtaagaatccaatccaatgctacaagcaaagtcaaacactctgcttaaatagctgaaatatgacctacaaaaagttaccaaaaataaaataacatttactcccaaagaacaaagtattttttaaatgacttttagctcattatttaattgattttataattttaaccatagttaataggaagataactaagaaacatgggtgtagttagccaaagacttataagctctctctctctcatcttcactcactcaaagaagacaagtctctcaattcattatctctagtccctgttatctatcacaaagtcaccatctccattatcctcttgtatctttca

SEQ ID NO: 107489 - DNA, 1149 bp, Cannabis sativa
aatgtcatctttgtaaacttttaactaattatgaataatttatagtattaaaaactgagttcatgattttttttttatttaacacgcgtatttagataacatcaaatctaattatggtattgtaaaagttttaaaaaattaattaaaagagaatattataacggtaacaaataccgttataaaatatatattctgatatgtgatttcagacacaaaaatttaacaagagattataataaaaacgttgaaagtaacacatcttatattttattatgagatacatctcaattctcaactaccctcccaattttctcccatgcaaatttgagttgtactttggaaaaaaaatgcaaatttgagtattattaacttaatttaatttattgctgagaaaaaaaacttaatttaatttattatattaacagcttgcgtctaagtattcagtttaatctggttaatgatttctgttttctaggagggaataattttatctttgacaaaattttgttgtgttctaattagagacaaaaaggattttgtcaaaacaaaaatgacattaatatttaaatttgatgccctacaaaaaaaagaatattaaaaaaattgatgtaccttttaacctaaggttttgttgtatcattcttaaatattggtaggtattaggtaatttattttcgttaataaaaatcaaactttaacaacgaccgtaatatcattatcaaaataaaaccaaccaccgtaataagtaatgtatacttttcaccttctagttaatttcccattataaatttttatattagataaataaatacttagaccgaaaattgtgttatatttaatttgagtggcaatttagattatgacaccataagacgatacaaaatacaaattattgcaggtcatgaaaaataaatgtaggttgaaattgggttgaccccaatgacacaattattatttgggttagattaaggttaatgcatgtgacacaaaatcgatacgaattgactcgtttatacattattattaatttatagttaaattagaaaataagttgtgcttcgcgacgattgtttaaatttactattctcaaccttaataaaaaaaaataaaattttaataataatcaagccataaaattatatcaatctc

SEQ ID NO: 107490 - DNA, 1062 bp, Cannabis sativa
ttagtattgggtggtttcaatgagtagatttgaaataccacattttatttttatgatttaactaatagtgtgaaacataatatttgtaggttttcacaaggaagtggatacttttttttaaaaaaaaatgggagcaaactataacactgtgactttcaacactacattcgaaaatatgagtgtgggatattaccaaacgttcattcaatctctacgaagagaattgtttagcggaactacaagctatgacataccgttattgcgtacaaaatcaacagcaatcaaagacaaacaatttgtgtatgtgaaacttttcaatcaaagtttcacaatcacatttgcaatatcaactctcaactcgtatgtgattggctatcaagtagacgcagaaaggcgttgttacttctttaaagaagctcctgaatcgaaaacttcactttttagagaaagtactcgaagagtcgatgttgatctcaaaacaaattatgatattttaggaaatagagagaatgttaatttgggatttaagtcgttaaataagtctctcgaaaaatttagaaattttgatagcgagaatcctactgaagagcttcgtcataatcttatacttgttatccaaatgattgccgaggctgcgagatccaaatatattcaacaaaaattggaggtgaaaggctttgaagctggatttttccctaaagctgatattattagctatgagaataaatgggaagatctttctaaagctatccaaaattctaaaaatggaacatttcctaaaattcaactacaaaaagaagattatagtatttattatgtgtctacagtggcagaagtgaaaaaggacttggccttcttgttgaatattgcaccataagcaaattatgaagctttattgtctaaatttccggaagcagttttgtctcatgtgattggcgttaagaatttagtaactcataatttgacaaagcatgcttttcggttagacaatgatctatcataattcgagaagagtcctgccctgattacgaatatctgcattacaaagttatgagtgattct

SEQ ID NO: 107491 - DNA, 600 bp, Cannabis sativa
atatacattatacatatgtgcccaaataggattttaatccaacaggtgatacaaagaattgaagctatatgcagcaactatctatggaaaggccatgctttgtaccaagggcctagtcttgtggcctgggattttatatgttaacctaagtttgctggagggctgggtttaaggattgtttcagcatggaataaagctacaatggggaagtacatatatgctttagccaataaagaggatagcttatggttgagatagataaatagtatttacttgcataatgaggattggtggggttacaacctaccaagccaagctagctggtactggacttgtttggtgagactcaaagagcagtttaagactgctttgaatggcaatctgttgctgtagaagtactctgtggctcagagttaccatctgctaagtccagttcaggtgaaagtgcattggtgtaaacaaatatgggggagacttaacacaccgaaacatagttttgtatcttggctagctattcaacaaaggctcaaaacaagagatagattgttcaagatgggaattagtgttgaccaacaatgcttgctgtgtaaagtgcagact

SEQ ID NO: 107492 - DNA, 1468 bp, Cannabis sativa
tatataaatataatataaatagatataaattatatgatttaaattaactaaaaatgaaaagccactcttaatcttttcaaataaaaaaaaagatcaccataaatatgtgataatcactaagtgaatgattaataaaaaactaataatcataatattattatcatcatataattaatcatcaatatatatataagaaagaataagacagattatgaggcaacttataagagtatttttgttatataattgagcacattgcttatgcatagagtaaggaaaataattcgagcactctaattaagtttatagtgaaagttgtatttttaagtgaatcacctctaatcaagtaaaataggtatgaagtaaaaaaataataaacttataaataatatcaatagagataataagatatgcttaaaaaaaaaaaagagataaagaataatagttcatgtggtatttttacttattatgtatatgcaaagcaaacacattttagtgtaattatttaatttaaactaaattatattatttcaatagaaaaatatacggaacttctctagtagaggaggataacatgaaaaagtattcaataaacctatatatattatgtaattgcaacataaaaaatttgtacatagatcaaatatctaaaattaatgaacaaaactcatccatttacacaaatcatatataataatataaactcattttaattttaacatttactattattatcttcatagtcgttagctcatctctctaattagttaagaggggctccatcaaagacatgctaactaccaaaaaaaaaaaaattaatcaaaaaaaaaaaattcctatctctatatttttttttttttgtaagaaattagttagatggaaatatgtatatagatgaaaaaattaatatgtattaaaagaagttaaatagttaaagtaaacttaaaagtctcagataaactctaaattaaatttacatctatataagaatacaaatagtattaatagggtatatttatatatatttattggtattataagaatgtaagtagtcttagatatagaatgataatgaagaacctcaaataatatttaataacatgacttttaatttttttttatgatacttaaacatcgctaattaatagtgatgataaaaattaatgaaaatattaagggcttgttcggtaatgtttttaaaagtatatttctgtttttttaattaaaaaaatgaaaatacattctaaaattgtattcggtaagtaattttgtttttttatttttttaattcataatcaaaatttattagaattttaaaaatagatttttgttgattttaaaatttttaaaaacacttttttttttctctctctggcttgtcttcctcctctcctcactgtgcgatgatcatccatggcttagcaagtaaagcaaaactccctctatctctatctatctctctctctct

SEQ ID NO: 107493 - DNA, 883 bp, Cannabis sativa
aaacataaatgttaaaggaaaagtacataacataaataactagttaaattactcgctagttgtaagaaataattagtaactataaattttatttgttaatggtgtacgtatggccaactcgagttcaagatcagattcagacccagaagcagagtgtcctaggccgatgccgacacgaggagctactcagatgaatgaaatatccaagctgatggatcaaggcaaaagagtggcactcgaggtgaatgacaaaggatagtattgtggtaaaagctactcaagctagtatcgacttcaagagttagataccgtcaaacgatagagttgtcctataaaaatttgaatgaagtcaaccctacactgaaaaataaagtttggacagatttaaaggtaagtagtagttatttgtgagaattatgatttttttttgattaattcagatgttaactctaatcatgtttgttttccttcaaactagatgggttgtctgatccttgttgggaagttaatgaaagacttcaagaatagaatgacgaaagacattataatgctcgcaattgaagaaggatgtgcaacaactaacacaagtccctaaaagtatctggaaatcgaccttaatgattggctaaaatttattgaaagtcaactaactcctgaatttcaggtacgctaattatatttgtactaagataaactcttaaatacaagtacatgtatccaatctatttttttagcattgtaggaattgagtaaggtgcgaagggaacgtttggcaaaaatccaatccagacatcgaagtggtcggagtggaatggtgaacgtacgggaagatgtggtaagtaatcaatgaattctaatgttgtgctttaaaatgtaatttgta

SEQ ID NO: 107494 - DNA, 1233 bp, Cannabis sativa
  modified_base (509)..(513): a, c, t, g, unknown or other
gtaattcattcagtattttgctccacatgatagccttaggatgaacaatgtgtgatttatagatgaaaaagaactaaatctgacatttgttatgattcttggctcattgagttatgaagaacatgaagaaaaagaacatgtttgagttcttgacaaatcacgtgttttgatccattcacatgctggccggccaaggaggctttgtttgatgcctagccggacatgagtggctttcatcaggtctggtcggccatggggactgtgtccctaggatgaccgatctatgcctagaactagggtttctagctggcctctaagctaggtcttggggtctggctggcctctaggacttggaaccctggccagccaaggccaaggctctttctccctctttggaccgtagttagagtcgtaaggcggcctttgaggcatatacaactatgaccttatgcatggtttctattggaaactctgcataaggctagataatgagtccattatagttaatnnnnnaacttaggacttactgtatgtcttggtaattgcacctaagacaatacttggtcgttggtcgaccttgtacccttcagtttttttttcttggaagatgtcgttgacttgaatatatttgtagctttgtcaggttgctcacctctccttatttcttccatgcaggtagggatcgatgttgaattggggaggtggcaactgtgtaggtcttctgctctccttgtactaatggcaaggataaagcagactttgcatagggctcctctgtacaatccacatgtggccatggtagccacaaggggtcgaatcatagttgaggaaaagactactcagcctttgtcgaggctgagccagatgtggactcagaaattgggagctctgatgcggaatccaagatagaggaggctgctctagtgagggggagaaatataggacatgatctatcctccctaaccgtcctttgggccattatgatgtctgaggcaatccactaaatggtcttggcgcgcagtaataggactggatcatgtcctagaacagtctcctgtgccagagatattggattcgaagccacctaagacaaggtgggtttcgctagcttccgctctttctagtgaggcttttgacaaggtcattactagtggtcaatacttctagagctttagcaaaaagaaattatacaatcaaaaaattttgctaaaagaaataaattaagatagcaca

SEQ ID NO: 107495 - DNA, 763 bp, Cannabis sativa
  modified_base (630)..(631): a, c, t, g, unknown or other
tgcttaattgaactaactgcccctatttcaattaatgctggctgacccagcagtatgttgtaaggtgatggcaggtcgacaaccagaaagtcttgcattattgtggtgaataaaggtgcttcactcgatgttaatgggagctcgaatattccttgactggtgacactgttacctgtgaatccacacagattcaccatgcaacgtcttaatttagctttttcaagccctattttcttcattgtatccttataaagggtgttcactaaacttccgttgtccaccaacatcctttttatcctcttattggcaagctggatggtgattaccaatgggtcaacgtgagcatacctcacatctttttcatcttcctctgagaatataataggaggttcttcagtctttgctttcttagaaggttccgaagcaaaggcagactgctcgttcttcacttccttcacatacctcttttgggcgttatttctctctcccgcaatatgtggccctcccaagataaccaagatatcctctccttcaagaggaggaggttataatccttggatgcctaggttattgggcggattgggatggttttgtccattcccttgtcttttcacatattgcttgaagtgnnctcgcgcgatgagaccttctatctcatcttttaattgatgacactcgtctgtcgtatacccaatgtctttgtggtacttgaaaatttggtagcatctctcttatgtctcgcgtgcctcatgggctcaggttt

SEQ ID NO: 107496 - DNA, 808 bp, Cannabis sativa
ttttgattttgatatccctcttccttggccaatgtgacgaccagattttggtataccaaacaacattgttagtgcatcctcgtcaatattatttgtagtttgagaatttggattttcacgtataatgtcatctagttgtccctacacatcaatttgtaaggttaaataacaagagtaaagtagaaacataaaaaaaaaattacgaacaataagtactcaccaatttttcagaagctattgagttgattggctaaccattctttttagtatggactttttgaaatgtatggaccctagttatttttataccttcattttgtttaatctgcatgttgcataaaatatcatagaacaagttaactaatgcaattacatacatttaagtaacgcaataaaaatattataatagttaatgaaataccatatcatcaattgttcgagtatatcctcttctacttaaagcctatttagaagagaacaaagtaaaacaaactatatctaaaaaaaattaaaaggctagttatagtggactaaaaaaatatttccttgtatgagaatattttcaatttactagcaaaaagaatagtggtgacataacttagagaacactaaaaaaagtataagacttggcgactttaaaatgccaagtataaaattcacctgaaactttatatgtatatacaaaatatacaatttttatgttactaaataaagagaaaaataaatatataaataaataaagagacaaatatatatgtaccatgtgttctttactcgtttcctgtttaacaaaagccctcctccactc

SEQ ID NO: 107497 - DNA, 1543 bp, Cannabis sativa
tctgtttctttattgatgttgaataaaatagattacattgaaatggaattttatttagggcataaaacccaacatgttataccttaattttgaaaaaaaaaatagcaattgcaaagatagcatttcacctaggaaccttggtggtgaaaccaccatgactaatcacctcaacgtacatttaggtggtgacacaatgtcaactcaccttccctaaggtcgaggtactcttcatcagggcatcatcttagccctagtgaagatgcacatcatcataagggcatcatcttggcatcctcaaacatcctcactttggctccaaagaggttcataacctcggctccaagccttgcaaaaggccaaagtatcatcttctcaaactaagattgaggtcatcacctcagactgataccgagatcataatcttgtaccaaggtcgagatcataacctcaaaccaaggtcgagatcatcacctcaaaataaggtcgacatcatcaccttggaccaaggccgagattatcacctcagaccaaggttgaaaacaccaccacctcggctcaaacaccatcaccttgtaccaatgctcaccacctcattctaaagctcatcacctcgtaccaaagttcattgcctcgtactaaagctcatcaccttgtaccaaagctcatcacctcataccatctcggccctagctgagatcaccacttcaagtcataatctcagcccaagccgagatcacaacataaagtcatcatcttggccctagaggagatgctccttacctcagcacgtgcttctcatgactcattagcatcaccatctcaacatgttctcgtcattaacatgcatgtgctcctcctgaaaaaaataagctagcacatgtagattaaagatatcttcagcagttatcatttttcagatatttgttttgaaatatgatttttttcgtcattttctattttacacttaaccttactatagttaggggaaggtgtgtgttaggttaagatattttaaactctaagagagacctagatgaaaacctatataaagggagtgaattcacttgtaaaagcaccctaattttgatcctcacgaaatcattctaacaaactcttactctctcattctaaaaactcattttaggattgaaatcttggagaatataactttggagaactctccttaagcattgagactaataacaatccaagtggactagcctattacatgtgaaagggggtgaactactataacattctcttggtcatctttgttaaattcatttttgataaactggtttgctttaattgaccaacggttgtgttcatttgataaaaaatcgtgtcaacagtgtactactgataactctatgaaaatagagttatttatatctttttgggcattaaattagctttgttctcaagttttttagtttatttacgtgacttttatttggttttatttagttttgcataaatattaattttagtatctttatattaaattttaattaattttgttatattttatcaatttgattta

SEQ ID NO: 107498 - DNA, 1453 bp, Cannabis sativa
  modified_base (805)..(818): a, c, t, g, unknown or other
gaaaccgttaaaacagttagagaagtgaggataaactctaactgtaacctgtaaggttacaatcaactaattaacctttaacagaacacttagggaaaattaaggaaataataatactcttaataaatgtcttaataaaattattttaatattatttgagtttctatagaaaaaaaaaaaacctcaggtgagataatttttttctttattacagtgttttatttttttttttttatgaaagaaaagaaaaaaaaaacaaataaaaaaaagagaaacacaatttaaagttttcatatggtattcctccttatttttcccatattttaaagtttgtttaaaaagaatgccatatttaatgtaattaaatttttatgctatatatatatatatatcataacttatattttttttcccaaaaatataaccctttctaaatagaacttcaccattgtaaaaactaatattaatcctaatatcgtgaaccatgattttattttattgggtagtaatcctaataatttgagattacctaaaaattgagattaagaaattaactaatactaattgggtagcgacaaaattttaggctatttttaaaagaaaaagtgatatttttgaaaattactacaaagaaagtgtatttttacaataatatttttaagttgtgagcctaaatcaatcttagttaaggcccgaccctgattacttattaatgtttacttaaaagggattatttcacaaatacacaaaataataaataaattacaaaaatacgattttgcggaattttaaacatttttacgannnnnnnnnnnnnntttacagaaaatacggtcttttttatgttgtactctaattaatttattgttgattttttattatatgtatgttattttttgttgttgttttaatgttatttatatattactagccgcaacctcccgtgcaatgcacgtgaaacacatgtaaatatgcaatcaaacttatggtatatatataatgaaaaatgttaaaaagtattattggtgcctagtatcatcatcggtgtcatatattaagtattaagtactatatagcttaaaaaaataatttttaataaatattactaactaatcataagatgcaatctaaaaagtgttgagcaccactggtgcctaataacaatactctaaccgataaaaaaaatcttaattttgacaatttagttaataatgtcatattattagtaggcaatatatttatataactattaggcgtctccacctcctttgtctctatagtcatagtcacacaccatcaataaattatgtattcatatataactggtatataattatatatatagcttatattgttataaatagtattaattatgtggatgtccaaatcttttatttattaccattaatgtaatcaacattccctttttcttagtttccctttctcttagttt

SEQ ID NO: 107499 - DNA, 813 bp, Cannabis sativa
aaaaaaaaaagcttccactaaaaattagattcaaaattaaaaaaattgagcaactaattagattgaataagactttaaggttaaatatgatgacgatttccaataatcttttattagattaaattggtcaagtacaaaaatattattgtatgaccaactcaattacataaactaaacaatattcgaatatggggaacattcaactttgttagagaaactaaataattgataagtatatacataaataaatattccacatttataattataaggacagatcacataagagaaataaaaccttagtgggtgtcatgtcataaaacaacaccaacagctaaccaaaaaaaaaaacagccagataataaatggaccctcattttatttaaattatatacaaaaataaattcatacagttacttattccaccaatcaaatatcttttatttcatttaaaaaaatatttgaaaattttacaatacaactcttgaaatgcacccatgtacctcaatttatttcggtatttaaaataaatttttggttaaattttttttatgtataattatttaagatattttataaaattttaaaaaaattaaaaatatttgacatgctaaaaataaagtttaaatatgttactattttattattattttttttaaagatcgtaactattttattttatatgtatgtgaaatagattgtttgaatattttttttatattgttaattatattaaatttttcaaaattttattaaatattttaaataaaaaaaattgaatataaaaagaaatacgaatattttatattttaa

SEQ ID NO: 107500 - DNA, 1675 bp, Cannabis sativa
  modified_base (1289)..(1294): a, c, t, g, unknown or other
  modified_base (1398)..(1398): a, c, t, g, unknown or other
aaatatatggtctattttatcatttaacaaaacagagagtccaattaataacttttataaaatacatagtctaaaatagtatttaccgtttatcttttacactaaaaaattcttttttttatatttttttttttacaaatttgaaatgtagctgaatctcaccattaaatattaattagattattactgtattgatttagaagttttacttttatatatgcgcaagtatataaagtagtcatccaattaaatagttaatatttaatggtaatatttaactaacatctcaaatttatatataaaaaataattaaaagaattttgtaaaaaaataaaataaaaaattaagtgtaaaaaaattaaaaaaattcgcgttaattactccaataccatatagctgctttatttttgggaaatttgtcgtttttttccgttaatatagcacaacaccaacatcacacttagtttgttccgatatggctttccataatatctttgtcgtttcgtacgcacgataatatatagttgaagggggagagtctctcaaatgttgaattgttaataataagagtaaaatatgcactaatattatatatatatataatatgtttttttttgacaaagaataatatgttacattaaattaaatatgaatatgttatgttattatgtataatattttagtttatagattaagtattattgttattttaataataataaaaagaaaacacaagactccgtgaaataaatattttaagttggtttttattttttagaatagaaaagaactcttgaaatgtttgaaaaaaaaatcttataatttttaagattgtaaagtcatattttagcaatttagatgccaaaatattttttattttatggtgagatttgtttgtattcataaccgattttctcacctttattattcggttttattgctcttttctatgttaggaaagattgtatttttagctagacttttattgtatggaaacttcttgtaagagaataaattctcttatggaaagttggtttttaaaggaaactttgactattattattttccttaataaattcgattatgtcttgatacaatcagattatacaaactgtttatcgcaggtatcaagacccaatacaagatcgaattcgtttataacaagtttccttttctggtctgatttgctgcgtcagaatccgtttctgatgctgcaaatcaagtttttcttaggaaagttttgtacatctgtaaattcgactttgtggctgtctctagggtttctatgnnnnnnaaatagaacctagagagcaaccattcggatcaactcttctagttttcattttttacatttttcttatttgtgagaagatagttctttttgtgagaacctagttnttcatctaggttctagtgtttttttatatctgtccttacttagaacgatttgactgaacaagagagtggtcttcgggagaagacttgttcaagtcttacttcgggaggaagtaagcacgcacacttcaaagacgaagggagttcgctgtttggaggtgtttcagaagtcagattcataaagtgcattacaaaggattgcggcaataatttagagggattcttaacttgtttaagtaaattgtctttgtaattgttgatactttattaattgatttca

SEQ ID NO: 107501 - DNA, 1277 bp, Cannabis sativa
taggtaaaagaaaaatgtaacgatgatgattacaataaaaatataaccattgaatagtcaccctaaatatatatatatatatatttcaaaagttataattaattaaagataagaactgtgaatataaattacaacttaaaatttgttataacaccattccataccaactttttatctacctttaagtatttctaccaactttgtgtgccaaacaattaacttctctaagaacataagaagtaattacatttgaaaaaaaataataaagatgatctaatttctttgatcacatcatatagggttgagaagtcatctttaggaggcaaaaccctatccacaacaacctaaaagtctagcttaatatgagaaataggcaaaccaatcactcgacaccaagtaagagaatattataaagccattgcctctgctaaagttggatttattactccaattaaaggcttacaacaacctgccaccattcttccttcaacatttctaacaactacatcataacttgtaattgatttcttgatatcttgggcaacatttgtatttagcttcaaacccccattagaggaggtttccaaacatcaattctatttacttgttgcctttggtgataccctacatttctttgtctttgattctctttatagtcctgtaaatgtgatgataaccaactaaaaatattctcaaaaacacattagatttcccaaaatgatgattatttctttgattccaaactgcccagaaaaacccacataattagagccattcaattcttcttcgaaacaagaaagtataaatgtttaatatctagacattggcgactcaataaaaagtgataaattggtgagtgttttcacaatttcctagccttagaataatcgagtaacgaatgggaaaccgtttccagatgcctattacactaggaacagattgcattaggaataatttttctagaatataaatttatagcaacaagaagaatatgatgatacgttttttaaataaaatgtttaatcttaaaagaaagctttgagtgccaaaggaaagtctacaatttttctcaagaattgaggatttaaagaggaaggagaagaaatagaagaaaatggtaaatgataagccaaattcaaactgaactgagttgtaatagtaaggccccaaatttgagtgtctagactatgaaacttagtcaaaggaataactaaagtggttgacacatcatcaccctctaataagaaaattgaaaaagtaatctttttattattcta

SEQ ID NO: 107502 - DNA, 562 bp, Cannabis sativa
aaggatcgcagaagctgcttcgcaggcgagaagattgtctcctccggtaccgatcggcaacaccgttctgttggccatggatcgtgaatccctttgatgtccgacagagccactcgtttcttttgaagctccagcggtggttcaacctctttcttctctggctccggtcgacgacgcatctcccgtgaacttgacgacggtagtcgaccacgctgctcttccaccgttgtacggcgtcgcgtctcacccatccaactaagaacctccgaccaacataatccgggtaagacaaagaagataacggtgttagtgtcatccagtggagcgccgatcatcttctgcagctccggtgagcggttgtgcgacttcgacgatgtatctcgaagagccattctatggtgtttgactggaagtgttcgcaagatgcttctcaaatttaaaacctctgatgcttcacccttatcggcttcgtctcgctgttcatcctccttgatggttgtcactaccgctgctaattgtggaagcagcatctttgaacaaccttgtgccgacaccatcgagt

SEQ ID NO: 107503 - DNA, 2002 bp, Cannabis sativa
  modified_base (1067)..(1076): a, c, t, g, unknown or other
taactccctcatctaacgactgtcatacatcacgtaatacattccgtgaaagtacaatcacgggacaaaatcgtgtcccataaaataatatggggtaagttataggtaaaaaaaaaaattcatagggtagggtcatggaataagtgtaccgtacccataccctacttgttatcatccctgccatctatgtataatgtgacatcatcaatttaacagtcaatttgaacaaaactatacgtgttaatctatcatattttgcctttttttttttatagaaaaataaaaagatggctcaacatgctctgattcattatgtgcattccaatcgaggagcactaccaaagtatttcaaagaaggattatcctatcgtaagtctgcttttatcctaaatcaacttaagttaaatagagcttttatcactctgtttgactcaaatatgaagtatattactctaactgatatattttaagagtatttttaacaatacttatagattaaggagcacaatagtacaatgtcataagtaaaggaaggtaaaaactaattattattatttttttatcacaaatttcaggatttttatatattttttttgttgggatataagtatcagaattttcattgatcacaaaatcttagatggccttctccttcttagtaaacttcttacggcctgtcaaaagtataattctagccttaagaattatttttttttttcttcaaaatagccttaagattttgcaaggtgatcaccactaaaagtgttctgctcatacaaacaattgtttctattattccatattccatacacactagctgccatagctattaatattactattactatttttttatgggctttgatatacttgtaggattaatttaggaataattacataaaatatatttttttttgtaaaaaatttacaaaattttatatttttatgcttaaatatttttttttttacatttttacagtattatataaaaataacacgaaaataataaaaaaaactacataaaagtaacaagaaaataacattcaaacaacaacaaaaaataacannnnnnnnnnaaaaaattaacaacaaattaacaaaagtatatcataaaaatacatcagaagtattttttgtaaataaaatcataaaaaaaatatttaaaatttcgtacaaatgtattatttttgtaattttttaattttttattttttattttttttttttttatttttgtgtatttgtgaaataattccattaatttattactattactaactattacaattttatttatattattctatctttcaaacaaaaatactcttgaattcttcttttcttttaaaatataataatgataaaaaaaaaaactcttagatttaaagaaaaaaaaaagttaaaaagtctaatgatcagtactaaaatttaattttctctattatacaccaaaattttagaatagttattgagagctcttacaaatatataaaaaagtaaaaaatttatttattttgggaaaaaaagtagaagttaattacgtaagggtaaagacggttttatggcacttaaactcgatatgaacaaagcgtatgaccgaattgaatgggacttccttgaagctatacttcgaaaactgggttttgttaagagctggattcaactcattttgaagtgtgttaagtccgcaaggtattgtttaattcatggtaattatgaagtcgacctaattattcctacaaggggtatccgtcagggagattcactttcaccgtacctatttattctatgtgctgaaggcttcacaattttgctccgtaagtatgaacaacgtggttggcttcatggttgcaaggtggcgaatagtgctccaagagtctctcacatgctctttgcaaacgatacttacttatactgcgaagctacagaaactgaggctcttcgaatttaggaagttttacacaagttcgaattagcctcgagtcaaaaggttaatctttct

SEQ ID NO: 107504 - DNA, 871 bp, Cannabis sativa
  modified_base (751)..(777): a, c, t, g, unknown or other
ggtaaaatatttccaacatttaccccattagtgtgctttttgtagaaaccctaggcgagtcatgggcatgtccatacccaccccttagcctataaataaccttatatttccatcgaaggggggatcataacctaaatagtcaaagatctgctaatattattctaagcttccctcttaaagagaaacatagaaaatagtgttagggtttcttgcttaaacattgtaaaaacatcaaacacgccctttgaggctaatagaatgactcatggactagggttaattaatatctaaaccacgtaaaaatctccatctcaattatttctgtattttattatttcttaagctcttaaatatctagtttctgaaaaatttggataaatattttagtgctttcattgagagctaaatagaatggacggatcagagatcccacgtgcctggaacacagaccatttgtatcgttactaccaataggtgaggggtatccaaatcttgacattcctctgagttatatgtaattctatgtaatttctctttcttaatgtaagcatccaggcacaatgaaatgaaaatagaagaaatttacacaagaattcacatttttgtctctgaccacaagctatgttttaaacaggtgaccaagaatttggagacgtcaaaaatactcaactcacttgggggtaatatatcttgctatgtgtcctcaaaaatatacagtgcccacttgttgtttttgttggaaatattttannnnnnnnnnnnnnnnnnnnnnnnnnngttgaattaacatcctaaatattagggctgttcatccgatccaattcgtacttttttggtcaaacaacatccgatccacactaagtgcggattt

SEQ ID NO: 107505 - DNA, 1436 bp, Cannabis sativa
taaaccaagaattgacgttaaataggcacttttaatatataaagatataaatatatattgcatatttaaagtatctaattaaccctttatgttttgataattggggagagattactagaatatatgtctataagtaccacatgtgctttctttgttttttaattttattttgttgaaataagaattgagagagtttttttttagttgtagctttttattcaagagttcaatatcatatattaattagaaaccatttgaaaaataattgatgtacattcatcatttacatgtaactaaaataatactatttaaattcatattgtttaagagtcattagcttataatacgtaaattataagagttcctgctgtttgagaattttaaacaatatcgaatttactaacacatttgaatatgtagtataattgtaatgatctcataattaaatatgataaagtaataattaattaatattgttatctgtattttttaacaaggaacacgtggcatgaaaagagaaatacaacctcaagcggtcactaattaagtttccctaattagaacgggttacggagaaggcttgcgaatacgggaatagatcgagctcaaaagccacgtggagatttgtcctgcagcaccttgccatctaagattcgaaagccttactatccctccaaaatttgaagatgattaagcttaggtatgtccaaacgacacccagaaggctactcgaagttcctgtcactaacattgatcgcccaaaagaagttgaacgtctaccatgaaaaaagacctgaatcgccccagcatttgttatatttttgtctgacacaagattagatcttgtctcctgcatcagactatggtagtgcattcccccacctttgagcacacctttctgcctgacgatttgtctaggcgtcttctttttaaggtgaaaccttttggcaatacgtgtcctataccaatcgtggtcccatattgcccaactgcttctatgcacgagcaaaaaccttcttgggggccaaactgtcagattagtacatatattttatctcaatagtgagcttattgcaagaaaatcctaggtggatcatagacatgtccatacccgcactttagcttataaataccccttgatttccatacaaagggggattgaaaacaaaatagctaaggctctgccaaattgctttcttcttcttcaagagaaaccaagcgggcagagttataagggtttattgcaaacactattgtaaaaacattataaaagcctcttaaggtcataaattgactcatgtactaagcctcattaatgcctaaacctccactgctacaaaattgggctttagaggcggtttttaagggctttcagcgtcggtattggcgaaattcgctaccgacgctgttccgagtgacgctaaagggttaaaaac

SEQ ID NO: 107506 - DNA, 1424 bp, Cannabis sativa
  modified_base (58)..(67): a, c, t, g, unknown or other
  modified_base (1062)..(1072): a, c, t, g, unknown or other
aagataattaagaaaccctaatcccctaaacgagattactaataaaattagcgcagannnnnnnnnntaaatacaaatggaatgaaaataaacttgtcataattttaacttcacaaaccaaaagttacatatatcgggatcccaaaaatattttacaatatactattacaagtccgtttccactagccgacctaagcggtaaaatagaattacaaaagtcatcattggtagacaccaaccctcttggtctagtgtggcccaaacatgtacatgcaccgtccagctcccataatcatggcttatcagaaacatatttaccctttcctgcacagtagagcacctgtgagccaagtccagcaagatagtataaaatatcgataaacatatctatcacactatataaacatcaatgccattctcatatgcatgtttgacataaacttggatgttacgctcacatgcttatttatgtctatgtaacatagacctacgtgttgcgctcacacgtctaaatacaataaggccttacaacggtttatctaggttctagttaccaagtccaacccgattatgccttgaacacataaccctgaatctcaatatactcatacatttaacatggcatagcaattacacaacatataccactggggtaataaacctaggctattaaaccactcaattagggtaataaccctaatttgggttaataattactcacttataatatttgcagtatcagcgccaccatgcgttactctatgtgctaaatactgtcttacctgatgtcccgcaataattgagattcgaaaaccccaggtgctcctaaccaagtctggtaatcctagtcacaattccgtgatttacacaaatagggttaaccccttattccacatttataaagtatatgttgggattttatgccctaaataaaacctattacaatctaatctgatttgttatcaataagagaattagaagtgatttatgttaacgtgtagttttcaagctccattagtgaagatatatgactttgtaaattcaaaattaccagaaagttannnnnnnnnnnaaaattctacactgtattatctctgtttcaatctttaaagcatgagagatatgtcttctgtttatttagatgtacttaataagcagtaaggattttagtatccattgatgagtaatgcatatagtaaaggatgttgcataatgttttatgaacttggttccaaaaaatttgggttgagtcagatatactacacttgatctgaagatcaagacaacagatttattggaatgcacaggttgttatcaacagatttatgccctaaataaaacccttacaatctaatctgatttgttatcaataagagaattagaagtgatttatgttaacgtgtagttttcatgcttatggttta

SEQ ID NO: 107507 - DNA, 1219 bp, Cannabis sativa
tacccggagaaactacttgaaaaaaaccccaaaccgtaaattcgaaaaaaaaaagttaaaaaaatataatatatgaggtatttctctttatatttatatatattaaaaaaattatttgaaatttatttatatataataaaaatataaaaaaaaaataaataacaaatatatattttaattatatttatagttgttttttttttttttttgttgaatttgtaacatttgattattttgcatatttatttttatgatgttttgctcaattttattacttagcaatgttattgttttagggtgatatttagtttttatgtatttttctttatatttattaaaaattaagtgtgtaagaaacatttaagtaaaaaaatcactccaatctaattagtaattagactgaatcgaattagaaaaaaatattgaattagattggatcttccaaccttaagtatagtgccccatatgcatggaagaaacatataaatattaaacgtacctatttttaagagataggttatttgttctttttttttgatagtttatttgtgcccttggttttgaaatagaccccataatttttgtcatggtaagtcatgctcatactctttacgggtacttgtttgatacctattcaatgtgtaagaaaaaaacttatcgcgtgagatttgatatgcataatgcaaaagaaatttgagatccgaaaaaaataactctttgtgataaaatgattcaaaattaatgatatatatgcttgaagtgaatatttagggtatcatgctgcacatgaaacaagtataaaaatattaaacgatttataagaagatcatcgattgcttttcaaaaaaaaaaatattattaatttgcaaagaatgtcaaaggagagagagtagtagataataacatagaatctaatcaatttggttgcattaaacatggccgtgaaagacgagcattactattctttggaaattaataatcaattaacgagctttaacactattattattaattatttttattagactgattaattacttaagcttatctctctattttttttttaataaaaataaataatgtagaatggagtgcatgttcggaacatgatattaattatatcttataagtttatttaatttgaatatataggtttgtgatgcttattattattactagatgtagtcggatatgattttcgtcaaaaaaaaaaaaaaaa

SEQ ID NO: 107508 - DNA, 1221 bp, Cannabis sativa
  modified_base (574)..(574): a, c, t, g, unknown or other
attaattaaaatattttaattatggtcagtttaattaacaaatatttcagttacttgatttaatttctagaataattgttaaaatatttttacaataaatgtgacagagattttgatagaagttctcacatacataaatataagggctcggtcctcgagctcaatactcattctgtgaaaacagtaaatccatctaaagatagtagagagaaaatgaaaactcaattatccacactaatcaatttgcttttcttttacacatttaaagttcgtgtgtgattaaaactcaaagaattaatagatagagatatttcgatcctttaattgtaacatgtatatgtttgtgatagtcagtagtctcgtgatccgtaaagggaaatactgggtaagttgtgcaagcccacatcgcttgagaaaggtcaagtgtgatgattctgagacttttttttttatgaaatgattctaagactttgtaggtgttgaacgagatttttgacaaccaataattagagttgtatgaagtaattaatgaatattaaaagatgaaattttacatggttggggcattaatganccttagtccacgagtcactgtattaataagaatatttattacagagtgttttttcgaccgatccccttttctgtatatcatttggatatttataggctcataatggtggtaaaaggccactattattgtgtttgattgcactatgctttgcacaatttctcaaatttgatcttagggtatgattgcctactttgatgatagattttaagctatttatagtcgtttggtgggatttgacttatccttcatttatgacttgatggcccatttatagagttgtcgattgatgtattgggtctcgtgaaatcacaaaatgatgggctttaacccttaaacacgtttgttaaagtaaggtgtcgaatgcttttccccatgccaaattaaacgtgtgtacaatattttgatactcgagtgacatgttatggttcatcagttctcttgtacccttctttgggtagacttcacttacagagaggaaaagacaagagatactcgttgtccagcaagacccacctggatataactgttatatctttactcctctacaataatagacttcgggagtaattgatgtgatatttcttgttaggtgggtcctaccgccatctagctcactcctggtttgcaatgtattttgggagaaattc

SEQ ID NO: 107509 - DNA, 720 bp, Cannabis sativa
  modified_base (44)..(45): a, c, t, g, unknown or other
tcttctattgataacaaataagattatattgaaatgagttttanntagggcataaaatcccaacaacttcgcccaaggtcctgacggccaacagtacaaatactttctgtatgtgcatagaaacattttaaacttgagcaattggtccaactccctccacacatgtcactctaaggaagactattttgaaaagaatagtcagtatagtaatgcaagtaactgctcacatagaaaacacttaagaaatgactttatcctcatatgggataaattcccacaattgtcagcatggccacaaggccatgcaatgatcacaagccccaggtcgatcaatgtcgttgatcgacttggaagacaaacaagcctacatgacaacatcaataagaagtgaccagctgatacacacaccaccacaatgtgtacggccatatttgacacccttgtcgctctggctaggggcatcactactccaaagccaatagagtacgcattagataaagagtggtgttctcctctctcaaattgaatcaaggctttaaaaatcccctcaaagttaagaaatctagtgtggcatccatacactaccgaagaagaccttctctcccacatccataacttcaaagtacattttgacctggaaggaatttgagacaattctcgttgtcgagtctttctatccacactatcagaagtagcacaacagtggtatctcaagctttc

SEQ ID NO: 107510 - DNA, 997 bp, Cannabis sativa
tattattaatattaatattattataatattatttttattatataaaacttatcagtttattatttattatatatatatattatatgttatatgtttataattataagaatgaacgaaaataaaaccttcgtctttcgtcaaaattctctctctttctatatttattttcttcgatttttaattcaaaacctaacaatctaaactctgatagtagaaggacagtaaattctcctagagaaaacgcttaaggtaagatttaattacattttaagtttaaaacaattagtttcgtataggggttttgtaaattagaatagttataaaggttctgaccttatagaattattctcgggtagtcatggaactagttttgatattttcttactgaaattgaggtgattttggattagaaattgagtttggaactttttatagcttaagtctgaatattaatggcgtttgccgatcaagggctcaattttagttcctattgtgtaagtatggtagtatgtgtagtatatatgtgccttatgaagtttgaggtagtttggacaggttctggtagggtttcggtgagtgcgtaaacttaaaaaaatcatatttttacatcaaaaaatccggtcaaccggttctagccaattggtttaccatttcgggcagccttgggaactcaaaaattttatttttaccataacttttcactcgggtgtccgtattagacgttctatatattgttttgaagcttgcaacgagctctacaatatggtgtatgttttagagcaaaaatgtaagttttattttagtgtatttgaactacgaggtttggtaggaaaccttaggttgtcatttgcaactattaagtagtattttgggataaacacttattagcctattattgttatggcatagggcccgggatcatcgattgtactccaagtaggtcggccaacatacttgaaccagaacttgaggtaagaaaagtatattgtactgcata

SEQ ID NO: 107511 - DNA, 2488 bp, Cannabis sativa
agagagagagagagagataaagtgatattccttagttgagtttatcttcaattatctaactaaatgttaaatttaataatataaacctaacattaaaacactacttcagcctagataattctatataagacaaactaatatactacctaatgaatgattattttgcccctccattaaacactcaagttaaataaagcccagggtatttttgtcatctctaactactccgagtaaactaacaacttaactttctaaactagtccagtatattcccaatatatctcatcatttatttccgtaatatttctgaccaatccgtcgagttttcacggtcgtcgaacccaaaaacattttattttaaaaatagtatataaaatacccacataatccgctaaaatctctgtaattaataaattacgcttaattattcatataattacatatttaataaaatatgtctaatttatcataattataattttcatgatattacaactattccctctttacagaaattttgtcctcaaaatttacctaaataactcgggatactgcacccgcatctgcgactctaactcctaagtcgcttctttaaccttgttgttcctccacaacactttaactagcagaatagtcttgttccgcaacactttctccttcttatccaagatctgaactggttgctccttgtatgataagtccgtctgaagttcaatgtcctcgtaactcagaatatgtgttgtatgagacatatacttctgaagcattaagacatggaacatgttgtgaactccagataaagtagggggtaaggctagccgataggctacttgacctaccctttcaattatctcgaacggaccaataaacctggggcatagttttcctttctttccaaatctctgaatccccttcattggtgatattcaaaggaagacaaagtccctaacttggaactcaatatccctatgcttcggatcagcgtagcttttttgtctactttatgaggcaaacatacgagcttgaattttctcaatggcctcactaattatttggactgcgtcgggtctaaggtatcttcgttcaccggcttcatcccaatgaatgggcaaatgacattttcttccatatagcatttcatacggtgccataccaatagtactctgataactattgttatatgaaaattcaatcagaggaaggtacttgttccaggaaccttcaaagtccatcacacacgcctgtagcatatcctcaagtatctgaatggtcctttcagactgaccattagtctgaggatgaaaagttgtactgaactttaatttagtacccattgctcgctgtaaactctcctataacttggatataaactttggatctcaatctgagacgattgactttggagcaccatgaagtcgaattatctctttaacatatagatcaacatactgatccactgtatacgaagtccgcactggtaaaaagtgagctgattttgtatatcaatccataattacccagatggaatcatagagccctaccgttcttggtaatccacccacaaagtccatggttatatcctcacatttccacttaggaatcttcagaggttgaaataatcccactggtctctgatgctatgccttaacttgctgacaagttatgcattttgacacgtattccactatatcactttcatacttggccaccaatacaatgctttcacatcttgatatatcttagttgttcctagatgtaatgagtatggcgtggtatgagactcatatagaatcttctgtctaatactatcatcaattggtacacaaacccggtctttataccacaataacccatctgatgaaattgagaaattctttactgacccagcttcaaacttctctttatactcttgtaacactggatcactttgttgggttgtcttgattcttcctagcaaatcagactgtcacgtaatattggctagtttcccaactacaaactcaatctttgctctggtcatatccttcgccaactttgatgagattttcttcagttcatatacttgtcccagaccctttctacttagagcatccactaccatatttgtttttccaagatggtagaggatcttaccgtcacagtccttaactaattccaaccatctttgttgcctcatattcaaatccttctgagtgaaaaagtatgtgaggactatcgctgccagttcaatatcgtgtgtgggatactgatattcatactctttcagttgcctagacgcataagcaataactttaccaaactgcattaaacacaacctaacccttattttgaagtgtcacagtaaatcacaattttctcatcactgattggcaaggttagcactggtgcagtaattaacctctgctttaactcctagaagctactttcatatatgtcagtccaaacaaacttacaattcttttaggttgattctgttgggttttatgcc

SEQ ID NO: 107512 - DNA, 524 bp, Cannabis sativa
acgcataataagctcaacaagaccatggtcgaatcccattttcaacagaacacgttccacaaaatgccattccactctgtcaaatgttttactcatatcgagtttaagagcagcataacttactcttcctttggttttattttgcagacaatggagcaattcaaaagcgaccaatacattatcagtaattaatcggtccgagataaaggcgcattgaaattcaaaaattactaagtgtaaaaaaggctttattctgagaacaatagccttggaaatgagcttgtagatgatgttgcaaaggctgatgggtcgaaattgagtgacagaagtaggatgcttgacttttggaatgagggtaattagtgttttgttgatacatgaagagtctgagcggttatttagtacatccaagacagcagcggtgatatgggggccaatggtactccaatgattagtaaaaaacataatagacataccgtcaggccctggacttttgtcacttcccatgctatttaaagcagcta

SEQ ID NO: 107513 - DNA, 1016 bp, Cannabis sativa
aaaaaaatttaaatactattttaatgtggatattacaattttatacttaaaggttatgaaaataatcacaaacaaacttattacaataattagaagaaataaaaaaggacaaaatatataacaaatatattaaatgtgggagatgataaagtcataatatcttaaatatataaaaagtatctattatttataatcatcaaacggaaatgtgtatatcaaaatagagaacttctctaatagcaatgtcgactttaaatagaaggaagactcattattattcaagtaggcgactcaggaactaaatttagaatctagctagcgtgataggaaatttttcaaggtgcttttagcggtgagacaattaactgaaatgtcataagtccaaatccgaatagaaagagaacaaaattcatgttctcaagattttggacaattaatagtagattcaagaatgagtgcaccaaaattcatgaactagagcatctcatttcttataaagctcataagctgatcagattgaaaagaaaatagcaatactttaaatcatgtaaatctttatagaataataatcttatataaaattataaaattattttaatttttttaaaaggaagcatttattcaaaccactaaaaaaattacacaaaagaagcttcagccgtatctataagccaagaaggagaattttagactaacgctgagataagttatgcttaaaggtcatggaaacaatcaagtgaagaaacttattacaataactagtggggtctcacgtgtttcgcatgtgtggctcttaaaaatatttatgtgtaactattttaaaaaataattagcattttgtgtctaaaatttatgatactaccaaattatatcctttaaaatgtaaattatgatgataaaattttgttaacttttctatttacagaaatatagtatttttgttagcttttgttttttttatcatttcatagttaatgtgttgttgtaaattaattatttttctcataaacattgac

SEQ ID NO: 107514 - DNA, 1111 bp, Cannabis sativa
atattaattaaatcaattatctgttcattcaataaaaaatatcatttcaatatttgagaaaaacccaataagttggaatatataaagcatccatatatatatgccaaaagaaaagcatccagatatattcattctgttaaagaggacctgtttgtatataaattaatatatataacattcatgtatttatttatttatttatttattgtggagcataagcaaccacatgggaaagtgactaataaagtttactcttttaatttgcagttaaactatatttaaagattctgacttttgcccccacaattttttgttttcttttcgtacaataattactatttattttgtccaaatctgaatttatatattattataattaattttcataaaattgttgattgttgcatatattaaattaaaattaaaactaaaataaacaaaagctgtacactacacatcaataaaactaaaacacgatccgtagaattttctaaaataaatattttattatttatgaattattttaaactcaacaaagaaataaaacctacattttcttttttcccacttgattttattatactagctagctaccttgtacttaaagagtttaattatattattattacatgaatgaccacttacaataaagactaaagtggatgatcgatgactttcttccaaataattaataacactataattcagaataaatcattaagatattaaactcgttcaaaacgtataatgttaaaataaaaacaaacaaatatattacccattacacttggaaaagtcatatataatcataactactaaaggtaaataattattgaaaataaactatttgtaagtgatatatatatatgtattttttttttttgggtttttttatttttaaattttaaaatagttattttttttttttacattttttacgtaattaaacccacaaaataatttaaattgttactaaaatgtatataacaatctacataaaaattattggagcaacccaaacagtaaattaaaaaaaaaactaaaatataatatatgaaatacttccctaattcttaattattattatttgtaaatataattttatattact

SEQ ID NO: 107515 - DNA, 1580 bp, Cannabis sativa
tatactacttgtcgcttacaaattagactcatagtcattggctaaaagcgaggtcaacaatcattttcataacattgtaatgacacaatctcggtacttcacaaagcacccttaccacttgttaaccacgagcttcatatgtcactatcgttgcccgatacaacaaatgataagtaagaaacatatccgtgatttcaagagtaattactcgtaacggtaatgaccgtttccaacccttggtcataatcgaggcataacaaacacataaccaggtctcgatcataatcaaggctataacaaacacaatcgttaatcacttaaccatgagtgatgcgtatcacttttcatacctctatctagaaatcaggtatgcgggtcgacctgagtggaagcaaagctgggcgatcccggtcctatgtcacgacaaccaaaattcaataaatgccttaaatcaaaactctgggaataaaccctaatccaaaactggacaaagcctaatctccaacaacccaaaataggcaatactacacctaaataagttcaactagatactaggcaccccccgagccaaaacaaaattcaagtaaaaccttgggaaattccatcgacaaggcaactattcgactggtactgttgcaccagaaccaatcgatcgatcggttatggcagaccagaatcccatcccctaacttcgaaccaaactccctccaaacctgtccaacagctccagtagagataaataacatatacacaaaatttacaaagcaccagatcacctcaatgcatcaatttaaataacaatagtataattacatagaaattgtctcatcaaaccttcaattctctaacttaaaaccaatagccctatttctacccaaagccatcctatacctccttgttttcatatctaatatcattaccctgatatcttcatttgcaactgtaagtgtcgttaatttagacagattattttaatagaatgtcttgtcgtatctggcggttttagtctattacatctgcacacctgccttctgttaaaatctggttgtctctgttatgacttaacggttggagttagttgtggttaggtctgttgatctactgcatataaatagtctctgttgttctatgaactaatcatccataaaatcaatattttcagttagttgagtttcttcgtgagagttagtgtagtatcttgcttttcttgttgttgttcttacaggtctgattgtatagcttgaagatggagatctatggcagaaagatcagagcttgaagatacaaagttcagactgaagggagttcagtgtcatcctcgtcatcagatttgaagggatttcagattaaagaagtgacgaagacgaactcagttgctgcacaagggattgtgtacttgcgatcaagattcttgattgttgttggtaattcattactaattgttgtaaagattgtattaaattcctaagagtgaactggatattgtaatacaaatattttgagatttagtagatgagattaccctggtttggggaacccaagcactagtcggctgagatgtgttctcagtgcagatgaag

SEQ ID NO: 107516 - DNA, 1129 bp, Cannabis sativa
aattttgtatgagtttatgatattttggtttccattatttgaaatgggaattagaattataatttctcaattctggagatttaattaaactccaaaagtattatttgagctaaatatgcattatttaatttttatgatttttgctcggcgacgatagaaaatgtgatggatggtcattatagtgacatgggtaagtctaaaacttgtttcttagtggaataaatatttgtgataaatagaatatcgggtttgagcggggttgtggcttttgaccattttacccctaggctttttattgtttaacttatggaataaagagcattttggtaatttcactaaggggattaggtggctatttgtgggtgtggcagctagccatattggttgtttttagccttttttttagttaatgagtttaattaattaaagggtaaaacaaaagaaaaggaaagaagaaaatcacattttctagcttcctcttccttccttgtttgaaccaacccaaaccaggagcaagttggtgttttcttggtgtaagtttggagaaattttcaactggttttaattagagtaaacctaaggtaagagccctagcttcttcttgataattttttatgttgtttttgttgttcaagcatattataatggcgattttcctattatttgatttagggttagtgcttggtcattttttagtgattgtggaattgttctaggtttgaatttactggttttgggagcttaattctttggttgagcaagtttgagttctaagctcaacaatggcatattgagtttttgtgctttttagccactgtttttggtttaatttaattattggatgttattctaggtattttataaagtttggcttgatttgggcacgttttgagcaagatttgaactatgtggggaaacttggtgcaaaccggtttgacaggtcgtttaaaaccggttaaccaaattcagggcatgtttctcgtatcgttcgattcgtcagttcgtgttattttggttggttaattctttgatacttagggtattattgttgtattagttaccatttatagaacccttatttagggttttaggtttcccagattatggttttggcgtgttgtttacccgt

SEQ ID NO: 107517 - DNA, 602 bp, Cannabis sativa
  modified_base (37)..(39): a, c, t, g, unknown or other
taataagtaaatctgattttattgaaatgggttttannnagggcacaaaacccaacaaggtttttaaaggcttttcccaattttgtaaaaccagctccttgaaattagggtagtcagccagaaaattgtagtagcggaaatcccaatttgtatatcagccttagtcgagacaacacaaaagcagtgatccgagatagtttcccaaccataataagcagtagtattttcaaaaatgtcatgccaatcctcattagcaaagacatgatcgattttagagtaaattttactagtcccatcctggttgttggtccaagtataaatcgaacatgtactctttaaagcttcaacatgggcctgagcaaaccaagcttgcgagtcagccaaatcatttagacaagtaggattagctcctgttctatcatcaaggttaaaaagcgcattaaagtctccaaggataagccatggcttcacagaatggattatttgtatgacttcattctaatatagttaatgtgattatatcacactttattatctcacttcattctaatatagttaatgtgattattaatacgatggattattttagattgttattccac

SEQ ID NO: 107518 - DNA, 1348 bp, Cannabis sativa
agtacatgttaatgagttacgaaataggttactttctttccattcaacatccttggccattcacttcgatttcttgtgttgccgaaagattgcatttcccgctattgttttttctttttcagtttaactcattcgtgtgtttgcttttgtcatacaggaagtctatgaacaacagaaggaattagttttacttgcagagagaattgttcttgcaactttaggttttgattttaatgttcagcatccatataagccccttgttgaggcaataaagaaattcaaagtagctcaacacgcccttgctcaagttgcgtggaattttgtcaatgatgggtatattatgcctaacctaagtttatttttactgcccactgctcgtcttcgtcctgaaattgaatatggtatgcagacttaggacatctctatgcttacaatttaaaccacaccatgtcgctgctggcgccatttttcttgctgccaagttcctcaaagtaaagctcccatcagatggtgagaaggtttggtggcaagagttcgatgtcactccacgccaattggaaggtatctttccaaccttctataataattaaattactcttttactctttcatacatgagtcttataaaggtgatgatatgtctaagaaatatgataattacttagggtggtaattacacaatttgagtgtaattagaggtaattatacaaaaattctgtagttggtggtaattgaggagttcctaattactctccagttcttatgacccaattaaaattgagtgtaattacactcagtaatcactaactatttcgtcaaaacaaaacattaagggtgtgtttagaagtaattgtgtaattattaggtagtgtagttactagagtggtaattacatagtctagtaatcacactatattttaaaatacaaggtgtgtttgaatatgaggtggtaattatatatgaattcttaatattttgttcagcaaaataattagtaattacactagaaaataatatcttttagtaattatatagtataatatggtaaatttttagtaattatatagtgtaattacactttaattctcatggagtcatgagaattggagagtgtaattggaaccccttaattacttccaattatatggtcagacaaatatgtaaaattgtgttattaccttcaagtacacacaaatccaattacatcgtgacttttcaaatgcgcactaagaaatcgcgacttgtatctaaaatatagtgtaattatatagtgacttccaaacatgctttaagagaattagtgaagacaggaaactagatcatttgagagtgttctttgttaccaattc

SEQ ID NO: 107519 - DNA, 879 bp, Cannabis sativa
tagcatatgggacacgaaaccctaggttggtaaagggtatgccaccccatgtgcgcctataaatggtcttatttttctttaagaaaagagagaacaattttacttaaagacactctgcaaaaattccaagaaagctctctctcaagtggagcagaagaagtagagtaatctttactgtaaccaccttgaaatctaaaaaataatttcccaaagaggccaatacaatggactcgtggactaaggatcattaacgcctgaaccacgtaaaaatctgtctatttattgtttattatttcttatttctttaagctctaaatatatttggtttctgaaaaacttgataaacatttttgtgctttcattgagagctgaagaaattctggtaacgttcattgtccttcgaccatggtaaaaacacgaaagaataccggtaaagaaactccattggatacagttattgaggaagtcacctcttatgcaatcgacacacaggtggaaatggtggagaaggcatagctgctactgagaaccaagagaggaacactaagaaggtcgtagagggccacggtgttggcaaaaatacagaggattatgaagcggacgatgatgattactaatatagagacatatattataaagatggtcgctactatcggcatgatcctagtgtggtgcgagtaactgagcagttggaagcaacacaggcagccctcaaagaggaacaaaggcttactgctcagatgaaagaaacaatggagcaacttcatagcaagtttgatggttggttgggaggcatgtagaactatctgtagaagcagtggttgaggggcaaggccataagtaaactgacgctcgctttaaatgttgggttttatgccc

SEQ ID NO: 107520 - DNA, 500 bp, Cannabis sativa
taattaatttctgttctttttcttcttcttcactttctttctctgtaataaagaaagtggttttttgggagtgaagagaggccaagtgtgagagatctctctcgttgcctaatcgataatggcgaaccacagatttggtggtggccgaacctttaccttctccttcagagcattctcctctgctattgcagctgccgtcttcttctttttctgcttttctttcttcttcgcttctcactcagactcctccgatcccatcaccttcgtaagtattcaaatcatctttctttttctttttctatggatcctgaattttaacacaagtagaatttgttcatttctatttatgaatttacagtgtaagatttaattatttctcttcgtgctaacaaaaccacggcggtttttttgttattattactgaaatatgtatattcatgtgatatgtgaaattactagttttgattgtttttttaaaatttattttcattttcagtatc

SEQ ID NO: 107521 - DNA, 1301 bp, Cannabis sativa
ttttttttttttttttaagaacttgtataattaagattttgcattttctcctagaattgtcgaattaatgttgtattaataataagactttctctttccgattttttactgtatcaatttgtgaaccattttgggttagtagaacatttttagtgtcgtttatcttgtagataaacagaaatggtatcactttcctttttttctttagtaaatactattttggatattttgtaaaagttacattggactttctgttttgttaaatgataaaatagatgtattttttaaaatggtaaaaataggactttgagctagattttcgataatttttttttttaatataactaacttaaaagacaatttctaacacgaatagatacataaaatgtaaatagttttattataaatacatttagattgaattattattaaattttattttaataaaaaattaattcagaatcctatttgtactattttataaaatacaaagtttattttgtaagttaacaaactaaaaggtccaattaataacttttgaaaaatatatgatctaaaataatatttgtcctccttaaaattagtgttatttggtaatttatttggaatgagagatgcgcatatatgaatttttggttttttgttagataaaatggtgatatatttttcttttttttttttgaagtaatatttatttattttaattccagagcctgagccttcatgttggtagtaaagaatctactattaaagaaagatatattttgttttatattgaagtttttaactgaaaacgaactaaccaaatgacaagaggaaacgacagataaaaaaatgccaatgggttccctaggtatcgtcgtttgtctgtcctttattgaatctgtttttggtatggaatcacaatcacccaccaagcttagacatgaatctataatctttcgtccaacgattttctcgttgaccaaacataccatttgaagctcttgttccaaatcccaattctacttgtctcaaaaggttcacactcgtatggaggctgcgaattccggtgacgaggagatcccgctcgttgtcaacgacgatctgtccattaagagcaatcactctcagaactataccagagatgtttatattctcagcttcgccttcttgttgatcttcctcgcctatggtgctgctcagaacttgcagagtactctcaacactgtgagttttgctcttccctttttccttctctccccccctctctctctctatatatatatgttgtatatgttccttctctctctctctctctc

SEQ ID NO: 107522 - DNA, 682 bp, Cannabis sativa
  modified_base (596)..(599): a, c, t, g, unknown or other
tgtctttttcaatccattaaaaagaaaatttataataaactttttggtcggaagtctaagctcttctcttttgggagttgtagggttcttctaaaattcattattcaagcaattcttacgtatgctatgagtttacttcgaattcttgttggtcttattaatgaaattcatagcatgtgtgcacgattttggtggggtgatgatgataagtgaaaaactcattagtctacatgggcccgactttattgtcacaaagcgaatggtagaatgtgatttacacatatttttattcaatcaggcgctcattgctaatgtaaagaccgcatatgattaatattttggattattaaataactagggtttatgtaggagatttttgttattattaataaaaatacaaattatgggaatttaattgagttcatatatgtttttatgcaattttatgttaattacctaattttgcgatctctgtggttgtgttcggaagccgtggaaaacgacgttgggcctttagagagagtcgtattttatgtgtttagaatatttatcgggtgattatggtgagcgatttaatattagtgagctatcggggnnnnatattactagaatacccttggttgtaagtaagttgtagaattttggttagggcaatttgggtattttcctaagtggattattt

SEQ ID NO: 107523 - DNA, 692 bp, Cannabis sativa
gattccttgtcagcctgagggggacctctgaactcgctctcaaaatctacatccatttctgtagagacaatgataaaagatcagtgaagcagtagtggtaaaaaaaaataataattataatccaggtcagaccaccattcgcgaaggatgatgcttaccctcaaaaatctcttgtgaggatcgcccataacgatcaactgtatctccttggttttgattaatcggaagatcttaagtcttggaatccttcatttccaatttaaattgaagtttgatgtttttgggaacgtacggagaggaaaagcggttggtatattctgatgttacgagttttgagggataagtttttgagcttggatgaaacatcttagcaagagagtgacaatccaatttctggatgaaactcatcaaaaactaggagttaatggaatacggcaagcctgaactatcattttatacttagaacccagtaacggtaaggccaaacgttgggaaatccaacaattgggaatgagctagaaggtgaaaaggaagttcatgaatactaataaagaccctcgaaactgtggagcggttatcattgagggcatgcgtagtcttgaaaaaaggggttatgatgaatataccctttgtaagcatttaaaaagtactttttattataaagaacgttttaaggggcaattattataccc

SEQ ID NO: 107524 - DNA, 897 bp, Cannabis sativa
cctaagacccccactctcggttcttgcaaaactaggaagactcttctcaaggagagatcctcaacgtcaaatgtactgctttgaagtttagaattaaagtgtctagcaattttgtcctggtacattttgagttgaacttgtgactattctcagagttcctcaatcaaatctagcaatcccggagtagagagtgattttgagttggtcataagtgtctcgtctatgagatgggactaaagctattcatttgggccaagctttttggcacgacacgaaactaacacgagcatgggtgacacaagcacgtcacgacatgaaagaatataggcttgggcccaatatgatatgaataaatatgggcccaagcatgacacaaataatatgagcttaagcacggcacgacacggaaagcacgaatgcacaaaatgaaaactcaaatttcttagcacggaagcacgacataaaataaaaattcaaatccataaaataattttttatttagtaattcatctactctttcatataaaaatatgacatgaacaaaatttttcttattgagattatgttaaacattttttttgctgaaagagattatgttgaatattatgtacacctttatgtggaaatttagtaatagaccacaataatattgatattaatttgattattaaacatgtaattgtagctttttttttgtgattttgaagctaattttaactgaaataatctatttgtgctttaaaatatagaaactaatttgaaaattaaaaaaaaaattacaattttccataggcccgtctaggcccatttgataaatatgttggatatattttaccaggacctagatttactaacaagtatgtttcattaacatccaaatatgaattctaaaacaat

SEQ ID NO: 107525 - DNA, 730 bp, Cannabis sativa
cacaacttttttctgtgaagaaccatattttttttcctccgtgatctaatgtcgagtgttattattccaccttaaaaaataatcaactaattcaataaaataattaattaatgcattaaaattatttagataaaaacatcatttacctattgtgaagctgatgatggggaagatactggaatttgataactttagcatctctatctgaagtatcagataaataaataaattctcttctccctaaaactatcttttttccacttgttatatttagaaagcacattaataccatatggcagttataacttaatagttcacattatcatcaacatggaggaaaggctgactgaaaaataaggacacaaatgactggtttttggtcattccgatgtgcttggaaacaaatgacgggtgtttaatgaaagccgagatctgggaataacaaaacttgtttacaaatttaaactaaaacacagaatcgagaggtaccaagaacaagatttcctctaatatttcaattggcaaatcataaaagcttgccgtgaatagcatcaaccataaatagactttcatatattaataaaacgttgcttaattaggacatatgatatgatgacattcagcttgttgtactactactttttagaccaattcttaatctgtattgagttgtaaaactgtcctaaaatcacacagagaactagaccaaatttcaaactaagaaaaaaac

SEQ ID NO: 107526 - DNA, 725 bp, Cannabis sativa
taataaataaacactactcacgagttaagtgaggttggtacttggtatatgcttttctaattgctattaccaccttaatttatcacaattttacataaagtaccatatatttttttaagttttttatgcatttttgacctttaacttatgaaaattcagttttaatgatatccagttcaaccatgattgtaagtgaaccaaaaaaaaaaacgaaaaaagagtacattatttaacaattgatgaatgataaattcataattatcaatttacattaactccaaaacagaggtccaccctattctagggtgaaacttctcaataatgcaacaataaataataaagctattcgttgggaggagtgttatgtaatataatgtcattgttatgttggacttgggaagggtaatttggggatttgataagttatgtgatgtaatgtaatgtaaggctgagattgagttttggatgttggagaagggagttagtaagtacttaataagtggtggggtcaaatcaggttataaatttgatgatttctgcaattgtgttctgagaagtgaagtggcatgtgtgttagttcagcatatattcgtcatctatctactatgtctcaactaactgccatcccattaatacgtaatatatatatatatatatttccttttttgcaaattattatgtaattttaatccccacaaaattttaaggggatttttacttttttt

SEQ ID NO: 107527 - DNA, 1762 bp, Cannabis sativa
ccacaagccatagattttgatgttctcataaaacccttgatactaggaaaagaagtttgcttaagtccattgaatagactgagcatggtttcccatcttatccttgtattctgaaaaaggttgctccatgtgaatggataagccatatttctctatgctttgagtcttagtcccttattaggactatccattacttatttaaactaacaatgaatcgtcatcactagtttcatcaagtcataatagggtgggttcctagaaaccctcccactacaataaggtaccatgattatttgtctaggaacttcagtggtatagacatcttcggttacatcaatacaacagaggttgtgggaatatcttatatggtataagataatggaacacttttggatttgaatcaaaatagtatctccacttctttgctactttggttttaagattacatttatatagtaaacgtctagaaaagtagtatttgttaaaagaaacagtttctagtcttgatgaccatagtatagtccatccctagccactttagaataaccaacaaaaatacaaacctcagttagcagttatagcttttcttaaggacatgatcagggcatccctagatttgataatggtctacactaagtacttgaccattatatcaatccaagattgtcttaggacctagtcttagatgggatgatgacattttaaaatatcattatttgctgtctctaaggcatatcactaaaaggccttttgtagcgactagtaactaatcataaacctaatcgtttccatcaattttgcgattttgatatgctaaggagctaagtttaattacaatttgatgttcatttatataatctttgaactgcatatcaaatatttctccacccctatcagtttgtaagatctttaatgactttcttaactgtttttgctagaagttcatgaaattttcaaacatttcaaatttctggcataagttaaatatttgtagtattcgtctaagaatcttacgaattacacataaccacccctggtttgtatgtccctagtcaaaatgacatctgtatacaccatccaagtggttatttggcacaaatatctctttgtagagaataatcttgttaaaaccactatgaccaagataaagttccttcgataacaatagtcattactatactttgacgtatatgatttctaagtctagttacaacaaaaagttactatagtattagtggatattcggtctcagaatatcaaactcatgttcatacatcaacacttactttgatccattaaaatggaatcaaaacttgtaaaagttaaattcaatgtttatgtaatctagaaactaaaatggaattctattaaaattttaaaataatttctaaattttaattgagtatatattctaacttggaccaccattataataatattacaactctaagttcagcttgcaaaatgcttgataacgattttagaactataacccaagtttatcttcaatcgatgtttagtagaactttaagaaggagattcaattcttgaaaattgaggatagtcatcatttcatgagttgaatatctagaatatatcattcacgttactcattttcttagaagcaaatagagcaatatcataagcaaatgattataattattcttgtccaatgatgtatgattactagcagtttcctaaagaaaaagctatataggaattataaagaataattttaattaaaataagaatctaacaaagc

SEQ ID NO: 107528 - DNA, 1835 bp, Cannabis sativa
ctctctctctctctctctcgcatgggtgccgaatctcacgaaagatggagctctccatctccatctcgtttttccttttatttattaggtttggtggctgaagcaatgaaacgcagagacctcggcatcgtgaacggtgggagattagtctctctatatgtgcttgttttcttcattttcttctttttcttttgtattttttaggtggatgatgtgtgacgctattatggaaataactgctactaggatgacgacattgttggcaaaaatgtcagtaatggggacgacgctagttctagtgtaatgaccgcttaattttattttgagaattagccgataattaaggtttattttaaaaactagacttttaattattattttgataattatagaaatatatttgaattttaggtgtattaattatgatatatgtgaattttatgttttttatatttttatgtccggtaacaatggaatgcgatgtttggcctgtagagtcacttagacaaggtttagtaacttggttttagcagggcattatagatagacatttagaatgtcgggtatttatggagttatggcttaagactattttacccctaaataggttgtttatttaatggctaagctaagggtattttgatcatttccttagttaattatgaattttagttagtggagtttttagtatatccctaattgattttaagctgaatattatttagattaattatctttttcttaagaaaatcaatagaaatcataaaaatcaagcaaacatctttctctctctttggtgtgttcggctaaaactcaaacccaaaggaactaagtttactccatattttcagaccagattgggaggtgatctcaacctagaatctaagagtattggtaacctagccaaggttacctcttttcccttgttttcttcaataaaagtaagagttcatgcatgaattttagggttttagtttctattttgttgaggaatgagtttttagtttctgcagtttttatgttgttgtttgagtagttttgggtaggttttgatggttgtagttgtgttttaacttgagttgaattctcaagctctaagtggatcctttaatggtagtttttaaattttttagcttgatgatggatttttcagattgtttatgcttgttatggtctaagtaggtgatctagagcttttggtaagatttggagttgaattctttgagtaatgaggtttcttgtgtttttgcagtaaaaaatgggcaagctttttttatacctttttggcagttagagacccgaaaaaatggcttgttgtttttaagaaatggcttaccgtttcttgtggtgtttttctaaaaacctcatttttcagcgttttcttgatatctaggctttagtcatgctatttatcaatggaaacttttagttttgaatctaagtcctcaaaaagtgattaagcgtatcacttattagttttgcgtatgctgcgacttaggggcctgtaaatcgtcgagcaacagttccactcacattgactgacacacctaaatttagaatcgaggtaagattagtataatagtatcatatgtgattacatgtttagtgtgcatgtatatgaatgtatgttagctaacatatcagtaatagttattatacatagagttacactgaataccgatggatatatgtttggcataaatactaattaacgttattgcattggtacaactagagtagcaattataggatgctattatggtcaatagtactgtcgtacaaacgttctagactcagtacatgtgggatgtgggatagggttataattgggtgta

SEQ ID NO: 107529 - DNA, 2102 bp, Cannabis sativa
  modified_base (1982)..(2001): a, c, t, g, unknown or other
ttaagaagattcaaataatttataatttatagggctgaaattaaagttgatacaattctaattagttttttagactaatgatatatatacccaattttgacaccaaaattctatacactaactaggtgactttttccaattaattcaattgattatagataagtttcactaattaataggggtcaaaagaattatcatgcggtagagacctcatatttttcttgtttgaggaaattataaattttatgggttttcatatattttgtgcaaatagttttttttttcttgctaggtaaaaaagaattattttatggacaaattaaaaaaaaataaaaaaaatatgaaaaatcatgcaaggataactagatatctttatgttaactaaagtgtaattagttcttataaaatggtaactaagtaccttatgttattttttttttttttcatatttcttaacttttttaaaaaaaaaatccaaaaaaaaacttttttttaagaaaaaattatacttttacaaatttatactttaaaaactataaaaataaaaattcgttggggaatccatttcatgactaaattttgataataatcacttagttagtactttaattataatttggtataaaatgatacattctttttaatgagaatatatacttatttaatatacccatgtatcatgtcattacatttttctctttttcaattttaaaatttctaagttgactacactttagtgaagagaagattcttcttgccaatcatgtatcgcaactccctaaagaagagaattaagtagtgtttgtttatttgttaatggaaaattataatcaaattacaacttaattaatttttcattattttttaaacgaacgcgtagcgtactaatttctatcgttctaacttgtggcatcttattcaatttcataattatttattgttatatattttttagtagtgttattggactgagtggtgctactactttctgaacgtgttgtcttatgattgattagcgatatttttaaaaagttattatattaaaatatatgaaactcggtacttaattacgctaataacgatattgacacgtaagagtgtgttagacactacctgtgtcttttagcatttctctgtatatatttttgagaaatgctaaaagacattagcggtgcctagcactctcctatgtgtcaatattccaacatgtatagagttgctagacatcactagtgttcaataatactttatattttttgaaaaatactaagggatacttatggtgcctaatacttttataaaatgttatattactattagtgtaatttaatattaaatttcatttattttaatttaataaaaattataaaaactacttactaataaagtattatgtagacaccttagtactccatattaatgttcatatatatttttgtaataatttaccatctattttggagtttaaacctttattttgataaaaaaaaaaattaatttaagatcctatttgtataattttgaaaaatacaggatctattttgttattttacaaaacaaagcatctaattggtaacttttgtaaaatacagggtccaaaatagtatttaccttattttttatgcttatttttttactgtattatttcaaaattttatgaaaattaataaaaaatttaaataactataatattcactaacatataaaaaaaaaatcaattataatttttatcatgaaacacaaatagatgctctcaccatataaagttataaactccctatgtagagaatatttcacttattaatttaatatggtttgatgaaatattccctttatcttcttatatatattaaacattttaattttcatccacttacttgacaaattatttattttttaacggagtacatatgtttttgaaaaaaagaaggaaaaaaagagaatatatgttgttttagtatcttattattattattattatnnnnnnnnnnnnnnnnnnnnttattattattattatttaatagaaactattttcttttctttttttaattgaaaagaatatgtcttctaatagtgttttttttgggtgtaatggtagggcc

SEQ ID NO: 107530 - DNA, 1557 bp, Cannabis sativa
aacaaaaaaaaaaaagatagatttaaaaagaagtaagctggacagttattatatggggtgtatttcttttaagagaaacccaatttaataaataaaaaagggtgtgtttataaaaaataatatttaaataaataaacggatgcccaaagagtctcctctgctttaaattcctttcatagagacttatcttattttactgatctcattgatgatgttcgctatcttttatcctctttctctggagttactgttactcatgctcgtaggcaagctaatcaagctgcccatggcttggcaaagtacgctctagagttggatgaagatatatcttggataagagaaatagcttatcctattttctctgttattgtaaatgaatcttaatttataataatatggaaaatttctcaaaaaaaaaaaaaatatattggagtgtaaatataagtttcttatgctaatatttggttgatttaccaaaaataccctcgatatttgaacttttccctctcactctaactctgattctctctttctctccattttctctttgtaaccttgaacgacgaaaaaccctgagaccaccgtgtgacccccgagactaccacccttctcgacctagtctcgtgtcgacccagacccctctcgacccaaatcccattcgacccagaccacatttgactcaaaccccagttggcacagaacaattgacccacacgccctcgacccataccgttaagaccattgaaggacaaaattcaagagacactaaacgtcgaagcaccaccaaattcctgcaaacttgggttgaccctcaaagattagattttgtagttttttttttcaaaaaaaattatttggttaagaatatttttagtggattaagtttgattaatcattgtttatagcctaatacaccgtgttttttggatttgtgtgagagatgctggtagttatggtattttccagctaaatttaattatcgataggttgttgatattttatcaatagattctcaatagtttctttttttatcgttatttttgtcaactttggcaattattgattattatcgacacattattaatgatttatcgacaaattgctttgcttggtctaactatcaaaatttgataagtatttagtatttattgataggacatcaattcagaaggaatttgagcataatttagtaaatccacaaaaaatttaattacccttaatttaatggaaaattatctcatatactattttttttaacttttttttttctgaaatttacggtttgagtttctaaagtagttgcaatgctagttgcaataggggtttctgcacgattttttattgcaatttaggttgcagcgcaggatttctaggtaggatttcgtaaaaatacaaaaaaaaaaaactattttaaggtgtaaaaataaaaaaacccttaatttaattaaattgcttatttatactcataaatttaaatttaaactacaattttggttttggcgggaagaagaagaagaagccaccatgagtgtccccaatgataagtctcccacatct

SEQ ID NO: 107531 - DNA, 1017 bp, Cannabis sativa
ttaaatttgtttgctacttactagttcatagtttggagtttggagggttttaccgccaaaatttgagcttagagggttgaatgcaagtaaaaggacagttgtgagggtttagccgcaaaaaactcaatgaatataaattgcatttttgttcatattgtggtgaccaccactagttgatgattcccaaatagagtttgttgcacttgaatcatctcaactatttttctactactttatagggttgtacataaatttttataaaccgcccaatttgaacaacccgcccaagttaaacagagataacccgatgaaaaatgcaaactgaaaaacctgacaaaaatataacccgcctaatctttatattaagcgggttgaaaataatatcaacctacccaatcaacccgaacaacccgattaagagagtttatatatatatatatgtttttattatatataatctatatatattatataatttatgtaaatatttataaaaaatagaaagttcaaactactatatttttctatggcgtatgatttgaattttaaattcaatcattatatttatctcattatcacaataactaaaatataacaattgaatgtaaaaaaaaaacattagtgatcggtttggacgggttaacccgaccaaaccggccaattcattgggcggattgaaaccttttttttttcttaattgggcgggttgcacttagatttttgtaactcgatctttatattaggttaaataaaatgtaacgtaaaccgattaaaccgaccgacttacacccctacttcctacctgaacttaaccttatgccaatatgaattgtttagtgggtggtttggaacaacatattaagttgtattatattgaattagattatatatcatatttttatataatactatgtgttaactcagatttttattaaccaaattcgagcctcacgatgataactcaacacagaaaaaataaaaattatagaaaaataaaatatgaacacaaggtttttt

SEQ ID NO: 107532 - DNA, 1321 bp, Cannabis sativa
tatttcttcttgtaagaaagaaattagcagtttgaaaaaggcttgtgatccttagtctttggatcagtactagaaggcagaggaaaaactatatgaaattttaacgaaaaaggaagttttttagaggtagtgctctagacaattgtggcttgaagtaggtgaccagaatagcaagtttttccatgctaaagctacttctaagtagaaaagtaatattctttataagctgcaaggtgattcaggttcttgggttgattgtgataatggtttatctaatgtaattctcaattattttaccgagcttttctcttcttttaagtcaaactagtttgatgtggtggatggtatttagccttaagtttcttttaatcacaatgtggaattgctttgtgatgttactgatgaggaagtttgcaaagtcctcttccaaatgcacccagataagtccccaagtcctgatggtatgacttcaggtttttttcaaaaatattggtcagtggtgggaggtgatgtcattgctcaagttaaggattttttccattcgtgtttgcgacttattaatttgagtaagactaatattgttctaattcctaaaaagaagaatccaacaacaatgggagatttgagacccatttcattatgcaatgtgctctacaagatcatatctaaagtacttgccagtcccttgaaagtctttcttcctcatattatttctgacacttagagtgcttttatcttaggaatattgatatccaacaatattatggtttcttttgaggttatgcattacctcaaaaaaaaaaaaaaaaaaacgaaagggtaaagagggttacatggctttaaagttggaccttagtaaagagggttacatgacgcttaagatgggatttgactcttgtatagtggatctttttactaatcacagtttcttctgtccaatatatggttgctaatgagggtcgtgagatgggccttattgtcccgactcgtggtcttcgccagggaaatcctttgtctccttaccttttccttctttttgctaagggcttctctgtactaataagaaaatttgagcgacaaggtgacttaaagggttgtaaagtagcaaatggagccctaattatttcccatattctctttatagatgatagttatttatactatggagctaatgatagggaggctgccaatgtgttacagttattgagtacttttgaattggcctttggacagaaagctaagtatgctaagtattctattttcttcagcacaaacattcctttggctactcgaatccgaatttgtggagttcttggaatgg

SEQ ID NO: 107533 - DNA, 813 bp, Cannabis sativa
ttttaattgtatacaagcagtcctatagtaagagtatataccttacatcataataaccacaagatctaaattaatggtaaaaaaaaagttccctaagtagaaaacttttgataggtcataccatagtattaccctatatatataatatatatatatcatcattaaaaaatgattactatttgtagggaggactcatataaaggtgaggtggggcagttgtcctttgaaaaaaaaattaagaaaaaaaatatatatatgaattttaattagttacaatatatatttataaacataacataagctttaatataatgactaaactatttcatgcacccagtggaagtcatgagttcaaattctaacaaattatgtttaattttctatttaaagtttactttttgagtctctactaataaaatttgtatttagtgttttaattattattgatcataatatttttattgttaattattttttattttacactagatttaatataagaaaatataaatttatattaatttttaatatgttatataatgtagtaaaaaaaaagacattcttccacttaaaaaaagtatcgtctccctcaatttaaatctcggatcaggcgtatgattgaatattattttaggagagtgactgtcccgcttcgcttatatgtggatacgtctttatttattttatatataacaaattatttttatacataaataatgtggaactaactctaataataagtgggaataattttttttttttttttgaaagaaagtatgccattaaattataagtgggaataattttgatatt

SEQ ID NO: 107534 - DNA, 1355 bp, Cannabis sativa
  modified_base (1289)..(1314): a, c, t, g, unknown or other
cacgttttttgagaaaattctttgataagcaaagattgtactataattgaaagcactgtaacgtaccttagcattagggcgttacactttttttttacttgaccgagtttttgtcttattacattttttgataagatttttaatgaaccaattattattatagatattcataaaaaaattatcataaaatattgttaatgaatatctaaatcatctaaatttattatcactataaatatgttattgtattttcttttatttatttatttagttccattcgtttaatatattttgtaaaaataggaaattcccctataaaaataaggcactaaaattcttccattcactctatctcatctattctagttatttctcatttttctctacattatattattttataacatgtattcttaaattctttattttccattatttatttatttattttaaatgtacgtgcaacccacgggatttaaatatacataaaaaaaaaaattgatgcaaattaaatattttgatataataataattaaagaatatagagacataaagtgtcatgtgatcaattaggttcattgaatttgtttataactttttttaaaataacacttaacactttcttcttgtgacatacgaactttctttccatatcacccgatcaactttctttgattgaagcaaatttttccttttcataataataataataaccttaaacaatttttgtcatgttcttctatttttatattatctactccaaattataaaatgagactgattgaagttttggtccaattataatttttcatacataaaaatagtcagtacatagtctcctttcgagacctgattgcgtactataaattgcttgtactcatatgagcgagccacatttttagtgggactttttttttcttttgttaaaagagtattaatatatacaattatagataaaaattaaattatgtcaaattaagatgaaaaatgaaaaaaaaaattatagagaaaagaataaaattatagaataaaaataaaagtatgtgagataatatgaaaatataaaatttataccaataaaaataaaaatatataaagatataaatgaaaaaatataaattttattggccaaaaataaaatatttaaatatttatatataaaaaattaatttatagaaaattgggagggaaatgatcacacaagccagccccttctcatatgtaatagagaaatgttatagagtaccagtagtgcctagcattttcgtatgtgtcaatatcgctattgnnnnnnnnnnnnnnnnnnnnnnnnnnaatttaatataataacttttaggaagtattgctagccaatc

SEQ ID NO: 107535 - DNA, 1368 bp, Cannabis sativa
atggaaagattcagcactgattcagaacctgacaactccaatcttcattctcagatgagaaaatctccaagcttcaatattgatcttcaaaatgaagaatcagaatctgatcgtaccccattgatgtatcatgacaaggcttcaattcaaagcttaccatgccaagataatgttagtcttgttgaccctgtaaggctgaatggacatgatcaagtcatgacacaatatcatccaatgccattgccattgccaatggaagagacagttgttaagttggaaaggagtgactctgaaaagtcaaaaattgcattcttgggattcctgaaagaagaagaagaagctcatatagttgttacttcacagcaacatagtactaatggctctgctaatcagacagtaacaaaggatttgtggaagtcatcttctaaagaagaaacttcatcaacttcaccaaaagctaaaatgaagcgcagggtcaaatcctcactcttcggaaattgtatgtgctgtgctactgtcatcaactaaatgccttttgaattttatttttatttttcatttttttgatatgagcatatattggaatttctaagtcttaagaaaaagaaaaaaaaaagtcggagtttcgatgagagatagagtgagtaaaactccaaaattgtgacttctctttgtttggattattttcccttttctatttttcatttgtttattaattgagagatgatttgtaatggttggaggaaatttgtactaaattattacatttataggtagctttgctacttttgtttgtaatatttcttcattttattgttcatatactataaatgatatctgccatggagattctttctaagaaagcatactttatcattttatttcattgttatctaaaatcattcatattgttattgttagtgtatccagattaagaatagtatttaaattaaatttattgaaatgataatcgtataaaaataattgtcttatttatttattttaaatagtgtaagcagagataattattaagtgtagtggctatttttcttaaaataagtataaagttgaattagtttcaaaaataaaagactttggtattctcatgagttaagaaaattgtttagttaagacctgaaatataatttaaggtccattagcggtggagtaagtcggaactagcccgttaggctggaattgaaccatttaaattgacttgagttatatttaacagtcagtttaattaagcttaaattggtgatgttgttcttaagtatgtgtacgttatggtacatatgcaaggtttcttggagcttataatgatcatgtgagtggaataaaaagactaagtttgattctaaagtggtt

SEQ ID NO: 107536 - DNA, 1659 bp, Cannabis sativa
  modified_base (1621)..(1634): a, c, t, g, unknown or other
cctggtaaaacatattccaacatagacacacttagatccatcttgaaatattatttccaatgcaagatgaactaggtcatttggacaaaaattgatagagttatcctcgttttactgaaggggagtttgtgctgttttgttccagttatgagcattgacatggcaaaatggaaactctcggccatgcatgttctcgggcccttgaggtgtttcgtgacttagtttttgatgatgattcatattttagtggtcctgggatcccaaaaccacattttgacacccgaaaccctaacgggagacctgttagggccggaaagtggtagtagttggccatggcttatgggaagccatgggtagtgtttcttgcttatttcagtcatatggatgctggagaaccactttggtcacattaatttgtggccaatttcttaagagagcactgccataatttttgctaaaaaagtggtagtggccacataaggggctaaggagccttgtgtgacttttctcacttgtatttgatacatggtttttggaaatacaattttgccaaagaaactccccattccttctactggcagaccactgccaccatttatgcccaaaatggggaagtgatcggccaagtagtttccacacaacttagtggcttttctcacttggttttgacatgttattgatgaaaatatacttttggcaaaaaattcatccccattccttatagtcgaccactccaacattttgtgccataaggagtgcagtggtcggctaatcttgcgttttgctaagaaacattttctttcacttgtcttgcactccttggtgttgagggaacacattttaacaagttccctttagtgctttatacgtggcaaccactgccatcttcttgtggcagtgttctccaaaaaactagagaacactgccatctctatttggaagtgagcgcataggctctattgtatgggggtcttataatattcttactttatgtacaagtctaagccttttcatgcccaaatgagtcaattccttgttggtttccttgttagattgatttctctatggtaaaaatgctcgcgcgggccgatggaccatagtttgggcacacttgaatgtgtgagtcctagcaccaaatggttggttaatgttttcgagtcccttagaggtgccatggggccctcaagaaggatgtcttaaatcatttgacaactaggaataaaattgttatcccattttttgcattatgacgtggcagcacatgctggtgacacgtggacctagttccccatatcttgctgaagagatgttccgaacagagcacaggatacacctgcacggatattgccttcctagccgagcagtggacaatccgagcagtacatcaacacttagcaatttcagaacttgcatcatgacgtataaaggcagtccctataaatctgggatcgtatcacaaagatatggcaagctgtccaaatcccacaatctgtgtattctaaatatgtaatatatgttcttaccaactatagacattgtaagcaaaagggaaaccttccctcaagtattttgccctataaatagtgatctattctcactggtaaaggggtcgaaagaattnnnnnnnnnnnnnntaagagagcatactcagagatttca

SEQ ID NO: 107537 - DNA, 1253 bp, Cannabis sativa
ttgtcatttaacaaaacacagggtctaatctgtaacttttgcaaaacacaggacccaatatttattatttaaattagatagacactttcatgtgattcatgtacatggtatgatacagttatatatgttataaagtgaaatagctcaaagaaaaatagtagattcatgtaatttagtgtaactgccaaatcaagctgacgaaaagataaatattttaagaaaaattatttcatatattgtttttttaatttttttttttctaaatttactgtttgggtttctaaagtggttgtcttatatggtattagtttccatacaattgttcactaaattttaaaaagggagaaagtagtgaggcctacaaaaattagggagaaaataaaggaaatgttctccacctattttaataggggatgtttttcctttgagtagttatatttgcaccccataaaattataaatacaccttattattaaaaaaaatataaacttaaatattttttaaaaattactcttaatattttttaaaaaaattttcttcacattatttgatgttaatttcaatacttattttgatttcattttcataattttttctaactcatgtatattttttttttctaagaaaatttcatataattttttattttttttttcataatatttaaaatatactttatttttgtttgataggtatattttttaagaatataaattggaagaaaaaagttaaaaaaaacttagtacaattaaagtataaattttatattaaattaaaactattaaaatggggtgcctttaaaaaattttggggtgtaaataaaatttccctttctgtgagttctcaaaatgctactctctgttttgcaaaagttataaattggactctgttttgttaaatgacaaaatgaaccttatacttttcaaaatggtaaaattaggaccctgagttcaattttcaataattttattttttaatataatcaacttttttaacacgaacagatgctaaaaatgtaaccaattttatcataacatctctaaatcagattattcttaagttttattttgataaaaatcagttcatggtcctatttgtacaattttagaaaatataaggtccattttgtcatttaacaaaatagatggttgaatttgtaacttttacaaaatacatggtctaaaatagtatttaatatttttttagtgttaaaatgcaaaatcatattacggaatttacaaaaaaaaaaaaaa

SEQ ID NO: 107538 - DNA, 1213 bp, Cannabis sativa
ccattggaggaggaggatgagcccgctgtccagtatgaacaacctttggttgaggatgccgaaattgatacaaggtggagtttggttggccggttcttaacagaggctccgattgactttatggcaatgcagaatctaatggctgttctttggaaaccagggatgggtatgtatgtgaaggatttgggagagaataagtttatttttcaattctatcatgagatagatattcagagggttgttgatagaagcccttggacattcaaaaacgcaccactgatctttgagagattaaaaccaggagacgttccaagagccgtgcgattgaatcatttggaaatctgggtgcaattacatgatgttcagtcgggttttaaaacggaaaaaatggtgacggatgctggaaactacatcggcagctttgtgaaatctgatgagaaaaattttaatggtgtatggcgtgattatttgcgggtgcgggtccgaatcgatatcgagaaaccattgaagaggcgaatgaagctgcaacaaatcggtggcgactggttttggatcaattttaggtacgagtttgtgcctaccttttgctttatatgtggtataattggtcatacagagaattattgctctcgtttgttcattcaacctgcttccaccattgttaaaccatacggtacttttatgaaagctgtaccaagaaaaactcagtatgctatgggggcaaagtggttaagatcgggttcttcaagtcctggtgggcatggaggttcggtggcggctggagtcggtagcgttgggagggagtcgttccagggaaatcacggatttcctggaatatctatccctggtttttcggctacagaggtgggtggagatatgattgatgataatgggagaaatttggggaagcaatcgggtgaattggctgggagtaaggagggagatatttatggtaatattgtggctagacaggtggaatccatttcaaatttggatgaggagggtttgcttttcatggataataaaagaaagagattgggtaaggaagtggacattgggccgagtgggcctaaagaaggtttggatatggacatagggcttgattcaaatactcactcaaaaaacgttataatggcgagctcaacggaccgggctcgccaatcattatgagtattttaagttggaattgccatgggcttgggaacccagggac

SEQ ID NO: 107539 - DNA, 649 bp, Cannabis sativa
atttattaattttatatacatttgtaataagttcaaatgtataaaaatgaacaaggactaaataaataaatcctgctcaatttataaatttaatctaagaataaactcttttttactataccctcttcatttcaatttactggtaagagattcgattaatatgtatacctttggcctgagagaagcaagagaagatatcagaagccagtttatgggatttctggagagaatcgggaccgccccagtggttgttcactgccatctgaagcccattccatcgcaaaagcaccgccgcaataccatcccggaggtgactattttcctgccccacctttgccacgtcatcaccctgccccgacttttgaaggctattaccatcaccttccatctctctctctcttgttagagaagaaaacaatgagagagcgagagaaagagccgggaagttttgggtggccacacaaagatataaaagagattagtagggcttggcaaattaatcaaccaaaaacagaaagctttattaaggtatatattttatgggtggctgagttggccatatgtataattggttcaaccaatagctctacacttggaagtaaccatataagctcatataaatattgcagttttaatttccacttgagtg

SEQ ID NO: 107540 - DNA, 845 bp, Cannabis sativa
gtgtattaaaaatatattataactttacacaatcaatgaatacaagtcaataccaaacattgtattgtattaatactaatacaatacaacacaatctaacacaatacaatatattacaatgcagcgtaccaaacgagctcttaaatagctatataaacttgaatatgcactctaaaataatagatgttagcagtggtaaaaccacattaatatttacagtgatcctaataaaaaaatagtagcaaaagtataattttttaattacagttgtactcttatgtaccaacttaaatttattaagtgtcaactcaaaaatacacgatgacataatattagatcacatattaaataattattatttattttatcttttaattaaaaatatacaaatttaaataaaaaattaaatcaatttttctttaattaattaaaaaaaagttttttaaagagaaaaatataaaagtttttttatttatttaatgcatggtccaatatatattatcatgtgtttccgaagtggtatttaatgggtttagttggtttttaatgatacggctgcaataaaatcgtaaaataaaatactttacaaccactttttttttattaaaattatatgtataacaactataaatgctaaaagagtttcgctgcaaatatctcttcaaattatttaaatttgctttcaattaaattatttaaaagagtttcactgccttctctctctggaactttctagtgggttgcatcccgttacagtgttctggttcacttccagtgtaatctctcccttgtggtgattctaaacctcatctcagtttctctcgattacttgttttgtaatcttg

SEQ ID NO: 107541 - DNA, 1430 bp, Cannabis sativa
  modified_base (610)..(614): a, c, t, g, unknown or other
ttcacttgtgatgcacttattgaaactattggatgtgtggttagaatatggtgaggatatgttcattcttagacaagttgagcatatgagacttaaaaattcttaaaagtatttttaaaattttactccatataagagagaaaatgacttttaaaacaaaagttgttaagttttggtcaagcttattgtatgtttttgagtatttttcttaattttgatgtaatcctttatttatattttatatatttgattataatcctctatattttctcttagaaaatttgcaacagatacaatattatcagggatattggcagctaaactacctgaactttacggtttgtaaccataaccacaaaaatcgatattttggcagcataactacctaaatcctggttcgttttgctctgtaaccctccatccaaaaatcacagttaagtgtcacggtggactgtccacgtgtacactcttatacacgtggcaagattttagtggtccgcgtaatattaatttaaaaaataattataaatatttaaaacaattaaaaaataagaaaaaaatttgaaaatattttttttacttttttccttttcttttttttttaaaaaannnnntaatttaaaaattaaaaaaattataaaataaataaattatttaaaaatatttctattttttttattttctttttatttttatttttattttttcttttatttcttttcctttttctttttctttctttctttcttcttttcttcttaatgaaccaaataaaaaaaaccctaattgctcatctcttccatcagtcgcctccccccttcttctcgcagaccctctcctctcttctttctcgcgtgatgaggaggaatgagacgaagagttgggaacgaatcgaaaagaattggcttcaattgtcaaattctaagagttttcaaagctcttaatcttgctctggacctgtactacgagcctcttctagttggagaagaagtcgttagaaagtgacaatttcgaaggaagaggaagggagaaagaggaagctggtgataaagaaggttttagagatttgagcgcatggggacacgcggttgtagtgtgcgacgtcggaagaggtagagtggccgccgccatgtggcagttactggttttttgtccggtttcgaccacgacaattggtggctctgatggcgcacaaggaggtctggggtgtcgtcggcgttagggttggctggggtttgctagggtttttttagtgaagaagaagaagaaaagaaaaaagaaagaaaataaaaagaaaaaaagaaaataaaaaaataatttttttttataatttatttatgtttataacttttaaattatttaaaaaaaaagaaaaaaaagtaaaaaaaaaaatattttaaattttatttttctgattttttaatttttta

SEQ ID NO: 107542 - DNA, 656 bp, Cannabis sativa
ctactatcattcagcatgagcaacaaaagaaacttcacatcctcccgaacctcatcgctgccacttcatctcagaccttaaatcctcctcgcaataagataatgcaacctttttgtactcactgccagaaaccaggacacttgaagaagaaatgctatgttctctatggtttttctcccagttattttgacaagcgcaaatgtgactcttcacagtgctccacttcagatcgggtttctctcgtcaaaggtccgactaataatcaagcttccgctttccattctatctcagacaaacttgcttcgctgcaagaaatgattctcagcttactcaacagattcaacatgctcaacaggctcaatcaatcattgatgtcaacattcaattagcatctcacctcaatggtacatatgtatctttctcaaataatctctagattgtttatagtggggctacccaccatgtttgctttgacaaaatatgttttacttcttttgatactatacctagtgctttgcacattacattacctactggtataaaaatccctgttaataaatcttgtgttgtccacattaatgctgacttttgtttaactaatgtgctttttgtacctgatttttaatttaacctcttatcggtcacctctattattc

SEQ ID NO: 107543 - DNA, 777 bp, Cannabis sativa
  modified_base (708)..(751): a, c, t, g, unknown or other
agaaattctaaaaacactttcaataagaaaaaggttaaagagacttactcactaggtgaatcctgaggcgagacctggatgatggtaaaagcgactgctggttttctcctgcatggtgggaagatagaggaagaacacgagaaaagcaatgagttttcttgaagcttatcttgatttttctctccagaatttgtctggaagttaaagtgaaagtgaaagtgagaagggatttgaaggaaaggaatgtcctttatataggactcatttaattcaatttcgcccaaaaatttaattaaatcagaaattgattccctataaaatcatcatgcggaagtagaaagagtaaaaagggcaattatgggggagtgtagctgtcaacacgatctcccataaaatgtgttttaaaactgccataatgagaactgacacttaatggtgagttgaaaaggctaaagtgtgattattcacttctgctcggtacagtccccaaagtacgaaccaggtgaagctcacatgcttgccaacacccgtataggtatcaaatgtccccatctggacagatgtttatacgggggcttaaaaggcaaatgttatcccaaagtttgcacatctgacttggcacttacacgtggcataatttcgctaattattaatcatgacaaggatcttttaggtagaagttgtttgaactttctaaaacgatgaaannnnnnnnnnnnnnnnnnnnnnnnnnnnnnnnnnnnnnnnnnnnaataatatgactccttccgtttagat

SEQ ID NO: 107544 - DNA, 1247 bp, Cannabis sativa
atatatataggtgttaagcaatggaatttacaagagtgtggagcacagagtgatagtgaattcggagaaagacagagtgtcattggcattcttttacaacccaaagagtgacataataatagaaccaatcaaacaacttgttgatgatgaaactcgacctccactttactctcctatgacatttgatgagtatagactcttcattaggactaaaggtatctctggaaaatcacaagttgaatctttaaaatcaccataaaatcatcttcatcatatatgaagaattgtcttattcattatatattattatgactttaatatataattattagctttgtacttgtactatgtgtgtgtgattcaaaaaatatgtatggtatttctctattatctatatctgtaaaataaatggcacgtacgttacttttgttgattatgtggaaaatttgttatacgtaatagtactagctatatattattaaatatatgtattgttttgccccaagtcaaggggacatgttatattaatatcaatatatatatatatatgcttacatatatacacacacactaaatagttcaatatatatatttatatttattggtctgttacagttctggcatatattgtttccaaataataataataatacaaacgattgtgtagttgaataattaagtcaatattgttctaatcgaaccatgtgagttacagtcagtattagacatttcttgtctctatatcttttttctttctctctgtcggtccaataaattacattcaatatgccaatttttcaatcataacatacattttttttattagtaaatgtgatttttactcctgacaaaaaaattatttgtaattaaagtaattaaatataaattattattaatttagttttaattacaataaatattaatgttactaaacatatatttaataatcataaaaaattataatttcgtgactaatacatttagtcataaacgttttagcagattggccctaggtataagtgagttaggcttgtatttaaggtccacctggcctaagagtccaaacaaaattcttcttttaaactatatattttttttttattattttaaaaaataccataattttctaaataaagaccccaaaatatttttttcctatgatttactatacttcaagaccggtcatattttttagttacaatataagaataataatttacaatattagttataacttttttactttt

SEQ ID NO: 107545 - DNA, 1178 bp, Cannabis sativa
atcgtgtattttatcacttgtgttactctagtgaacaggtgcccaacatctttttcataccacacttattaaagtacctaaccaacggtacatacaatcgtcacttttagagaaacacttcgtcagggaaaaaaattattttaagataatcttacctttatcaaatatgctcatagcaaatttgtaatattttattaatcttcccagattacttatctttcaagaatagaatattatactattttcagtttaatccccatagttctcaataaccttcagttatccttaacattatagccaaggatatctactttagaatttcacaagattagactgttctttcttatgaattccatatcctcatttatcgtatatattgtctacactgatagatagcatattaactccgtatgtccaaccgttactacttggtcaaaaccataaggtcccacaatacatagttcataattgtgtctttttgttcctcctatgggaccttctaaactggtctattgacttaacttattaacaagttaagtatttgtttctgatagatattcaattaaagcacttcttatttttacttattaacacatgcttatcttgataccttgtaaatctttacttattaagacatcctttcctcttggtaatctctggaatgactattgattatgcatcctaatatgaatctttgtagcgtactttatcctcacttgtacgctttttgagatgactccttggaagattcccaccttgatattaccctaagttaagtatgcctcatggtgggttatcacaaagtagatgcttctttgtcgttcctacttatatttcttgttttcgtccttttgttattcaaatccaatttccattacttccttcattatcctcttataattcctcgtcgatatgttcacttatgcttgagaaatttgcatctgattgtcaacttgaatcttatccatctccactcattttaacttgcatccatttcctgagttcttagctaataacaattgatcaaagatcattccttgatctcaaagctccgtatctgtgttaggtagaaatcctaaaattcctttttcttttaacatatccagaaatatacatgtatattctctattttattgacaatcacgtggtgcgaactaccactccaacttgtagcgagt

SEQ ID NO: 107546 - DNA, 874 bp, Cannabis sativa
  modified_base (433)..(439): a, c, t, g, unknown or other
atccaatgaacacccctatatatacaataatattttataatatcaaattcactttagtgaagaaaaaacataagagtatctatacatttagtaccttatgttttatctaaatacaagtttaatattctgtatttttaataatacttatttgatacctgtattttaaaatcatacctatttgatattttaaattcaaattttttgataaaattttatcaatacaatcggcactctaaaattttatgaatttttaatacaaatttaattatttaattgcatataatataattgagaactatttagttaaattgataaaactgtattgattcaattttattttaaagtactaaatatgtacaatttaaaaatataaagtaccaattaagtattattaagaacatagggtaccaaagggtaaatactattttggacnnnnnnntttgtaaaagttaccaattgaactatctgttttgttaaataacaaaatagactatatttttaaaaattatacaaataagaccgtaaattaattttttgtcaaaataaaacttgataataatataatctaaaaatattatgataaaactggttacattttctatatttgtttgattaaaaattatcttaaaattgattatattaaaaaaaataaaatagttgaaaattgaattcaggttctatttttaccattttaaaaaatataagatctattgtgtcatttaataaaacaaaatgtacaattagtaacttttacaaaatagagaccaaaataatatttacccgtaccaaatatgtgtttcatttcatgaaaacactatattccaaaaaaaacaaaagcataaaaactgttataaatattaataattatgtggat

SEQ ID NO: 107547 - DNA, 628 bp, Cannabis sativa
agtatctcgcaaagaaacaaggtattttctttataaactgatgtgtttttagtgaattattatccttttggattaataattctggactactaaccctgttcgcgtggaggtggaaagtagctgctggttgaatgaagatgatgatagcaactttgaatggacgatggaggttatttcgggttaaagaagaggtgattggagttgagttgaagaagcggtgatggtggttggtgaatcgtggtggctgggttctgtggctcgagttggtggtgggtcgaccagagatgttgaaggtgattcgtggttttttgagcttgggtgccgaccagtgacggacccagaatttttgatcagtgggggcttaattattataaaaatatttattatttactttacattaaaattataattattttgtggggactttttactattttgttgtataattatttaattaaatagaagatatttaattttttttaacactatttttttttagtggggactatagcccccacactttctttactgcgtccgtccatggtgccgactgctgttagacaaagaggatgagggtgaacgaaggttaatggaaatgggctagggttgataatggttgaatgtgact

SEQ ID NO: 107548 - DNA, 1261 bp, Cannabis sativa
tccgctgtctttaatccagcttaaagcctccctaattcctacagcctctgccagttctggtgtagattgaacattgaataaccttgtatggccatggatgaatagcccccgatgatctcttgctacccaaccaactccaaactgttgagaaccttcgaagatcgctgcgtcaacgttaacctttacattattttcacttggaggcacccaatgctcgactccatcaccttggtttaaaccagcagccaggagctcaaaaccagaaaagtgagcatgtttccattgagaaaggtaactttttgctgacgtaacaatgatttcgggagacttgaatttattttgccaaacacggtcatttcgagcattccaaattgcccaagtaacggccaccagcagctctcgatcctctttctccatccgctgaaaattacttatacaccagtccagaaaacagtgttgctgctgcattgttgctgggataccagctctgtcccaacagtccttagcaaaagggcagcagactaaagcatgagaaatggactcttcttcgatggaacacacggggcattgtgaatgggggactgcacgtttgatcctaagttgaaccattgtgggaaggcaatttgtacaagcccgccacactaaatttttcatcttcggaggcacttttagattccagaattttttccaaaaaaggttcacttgtgattcctcaaaattcaccagccctttcagttcttggaggcgtttataggcactcttaacagtgtataaacccgacagctctcctatccaggttaaatggtcttcagtggtagttaaattaagaggaatttgcacaattagctctctatctcgagactcaaacaaatcattcaagacttccatatcccaactaagcccgtccatggtcaggagattggctactttagcattatgaagccccggatgtgaggaaataacccaaggattgtctttatctggtaaccaaggatctcctataacatcaatgttcctaccatctccaaccacccatcttactccattaacaaccaggtattgtgcctcaagtatgcttctccacacaaaactaggattagagccaatttcagccgtaagaaaagtaccattagaaaaataccgagctttgaaaatacgagctaccaaagaattgggtttagttagtaagcgccaaccttgtttccctaacatagccagattaaagtcacgaaggtttctgaaccccatacctccatcagtt

SEQ ID NO: 107549 - DNA, 1426 bp, Cannabis sativa
aggcttagacatggaagaaatttgaattaggcgtagacctgtttattgtttattgtaccctcaactgattttcttcatactaatggataggtgatagggcctgagaattctaaactcaagcacacaatgaaacaatagcaaatagttaaaaatagcagcaaagtaataagagaatagtagcaaaatagtagccaaacactaaaaatgtatgtattatatgtatgagtacagcaattacaattgtggggagcccttaggccctattgcataccctcactactcccttactcacttatatatactattgtattctctcctaaacactacccccaatacaaagactcaaatatccttttatttaatatatgctagcccaccatactaatcctagggcctaatattaccagccgtctgaagttcaccttgtcctcaaggtgattgatgaaatcacccatgagagccccatgctgtgtgcgacctctgtcaaagaaccaggctcataatgtggtattttgtgatgtccttgatacacagttagaatgttggagttgtatttggtgccctttatcgaaaatccaactctagaatgacattagtaaaacacaaaagttttactttgcaatagtttgtgatttccccaataccagaaaatagagccaaggaaacttgaatagctctcccacgacaagaccaacaagaacaaatctgtcacctatggttttgttagagttgatggactgtaagtcccatgtcaaagcttcctttagtccataacaccccgtccagctagttacgtaagcaaattccaaccaagtgaccaccaaaaatttctttgaaatgcagaaaactcgacccaaatcccacacatgaaagaaccaaatagttatggaacttatagattttaagtgactgactttgccttcctctatatttttaaatgcacataaactaaaaaaataattgtataataaaaaaaaccacataaaaataaaaaaaaaaattataaaatatctaaacaacaaaaagaataatacttttattaattaaatattaatcactctactcaaacttaaacaaggaaaatacatatatacataaaaaataataaaataacaataatgaaacaatttaacaacaacctaactataaaaaagaaaaatgaaagattggaaatgtaaaaaacacaaacaatcccgccaccaccgccgaggactcgtttcttgagcttggctcctctctcgtcttcgaagggttcccgtttgtcgggattggtgtttccaccttcaccatggacgaagtgctggagaaaacccataatcttcaggtcaccgatgaagaagaatgggaaatagataagagtttgtcaattacgattgcaaaattcaatctgagggagcgcttatgcactaatactgaacatagcagt

SEQ ID NO: 107550 - DNA, 855 bp, Cannabis sativa
agtaatcagttgatcaagtgtttggtttgcagagaaactaaagtggtttatcctaataagtatcagtggccaagactcctttattgattgaaaggtaatgtatttgtttagaaatttcaagacctgaaagtctaaattctgaagctttatttaggttcaagtctttgtcaatgaaacttggccacatgctttcattaatttggtcaaaggacagtagctacttcctttgaaagtcaattgtggccacttaatgaattcacacaaacacttcgaatatgtatatgttttttccacttcagtaaatttgaaagtcaattgtggaacaatgatgtcatgtttcaaagagaaattttaaatttagtctattagagagggacacttaataggatttccctttgagtggtttttcaatatggctttaagaaaataatgaaattgcacagtagaaaaatataactatcattattaagaggagaaaacaaaaccataatggatataaactaagattctggaaaataataataagtaggggaatttttattcttttggttattttttttgggcaaattttataaaaatatggctttaaaattactttacaggaaaaatttaaaaaactgttaaaaatataaccagttacttagcaatcaggtcatgacccgttgatttgactacttgagattttatggatttgacatgatacgaaaattattcgaatcatgttcgtgttttataaatgggaaatttgaattagtatgcttaaattacctaataatttttcccctaattgcaaagttagtaaaattggtcatatatgaccacttttcctattttcctaaactacccctctcattt

SEQ ID NO: 107551 - DNA, 1188 bp, Cannabis sativa
tagttttagtcacaacaagtattgtgactaaaaatacatttagtcacaataatttataatttttggcactaatacttttagtcacagagtttttagtcacaacataagaatattgatttataattagtcacaactatttaatctttaaccataaattttgttgtgactaaaaataattttttttgtaatgattataccaaaaactaatatcatattttattaccagtatatttttaactaactcaaatatatatacaatcatcaaaatattaataaattcaaatagctttgtttaaaaatatcaagcaggtattttctttttctctttcgaaattaaattcttattatattctaatttagtctttcactagtttcggagctacgaaactaactgggaagctcagtcctttcatgggaagggtccagtcgacgatctccggcgacattattcttgtttctgtttcagttttctgtgattacctgggtggtattgcggttctctggggttgtattgcgatttgctgcgatttactgggttacggtacgattatagttgcagttttttctgggttttatttgcaggtctttctggggttttctgcgattctcgttgtgcacaaggcgggttgtctgcgattctccatggatttggagttggtgaatagactctctgaggtcttggttcttgatgagggtgatggccgtgttctttccttgaacaaggatggtattgaggaaggtaagaaaaagatggagttatgtttggtggggaaggtaatcggtcctaggccggccaacaaggaaggaatcaagaaggctatgaatggggtttggaagatccaccaccggtttcaggtggaagaattgagctctaagaatgtatttcggtttttctttggttgtagggaggatcggcagagggtatatggtggtggtccttggaaaattgagaagcaattgatttgctttgtgaaaccaatggggctgggtgaaatttcaaagatgaactttgattttacatcattttggatttcgattaataacgtcccattagcttgtatgactgaactttttgcaagagaatggggggagaggattgcaaagctagaagacatcaagattgttaatggtaccatgaaagtgagggtgcgcattaacattacagagcctcttaagcgtggcttacgt

SEQ ID NO: 107552 - DNA, 764 bp, Cannabis sativa
taactcaagaaagatatttgcaataatatttataatttataaagaaattttgttcaaaatttcaaattgaaaccaaatgaaaaactcaacaaaaatcatagttctagggagacaaacccaattgattaaatacatattttactttttcaaacacatgtataccaataatattagagatacacttaaatatacaatctatacatactattttttttgttacaatcatatttaacatatcattttctcaattaccaaaatcatatatggggttaaggcttggtagatctatacaacctaattactagtgtgtatttaattttaataattaatattttgtaaaagaaaataataataattatttaataattttaaaagaaaaaaaaaatgtgactagaaaacttatcttggtgaaaacttgtcttatcaaagtggtgaaaaataaaatatgcacgctactttaataatgcatattactctaatcttatcttttttttattaattattttctttttagtaaatggatttcatgatcatgcatgtacttgtttatacttaataatacaattactttaagttttaccctaacatttttctgttgatcttttgttttttataccttattaccatcccttatggcttatgtacatatattttatatttatctataatcttcaactttgtaattgatagtttagaaaagggtaaataccattttggaccttctgttttgcaaaagttaccaattggactctgtgttttgttaa

SEQ ID NO: 107553 - DNA, 598 bp, Cannabis sativa
gaaatcataatacaataatgtcatcagaaataaaaaaaaaaacacaaaccaaacaaaaccacacaacacaataatgacattattacaaactcaacagaaggctctctacacaaacctcatactaccaaaaaagcaaacataaagatattactaaacaaccaatgagagaatccaagaaagaatcatgtgaagcaagaacaccaaccgaggaattcctcctgaaaatatatgaggaaaaaaaaattaaacatcactattagaaatcagttgaagataaatgaagctataagcatgtttcaacaacactaaatgaagttataagaatgagtattttccatgtttgccaattgaagtttctggtattctttagcaaacaatctgtaatatttgtggtaagttttttctttaaagttaaacttcaaataaaatttaaaagagatcatataactgatgctaacagaggcattccaaaatgtgaaagaacaatctaataagtaacattgtgtacctgagtgagtgagtgagtggatcatttgtcataaatcctacccaaacacagatttttgatcaaacaaatcttttcccaatctgcaccaat

SEQ ID NO: 107554 - DNA, 1478 bp, Cannabis sativa
agtatactgcagtatgaaagttataaaaaaacacagtaaaaaagtaaaaaattgtaaaaaaataacaaaaattagtatactatgtaaatttctcttttattttagataaaacagacactcaataaatttcttggaccgaatattacttagggtcggccctgccatacactcacatattttctataccacacacttccttattcttacttccatattctaacaccttggattgagtggattctaagcatgcacctagtccttcttaactcaagctcagccatgtgatcattagaggtatgcagtgggacttcaacatcactctcaacaaagaatctaatatttcaaagcaaaagattcatggagtggagtacaacaagatttgtattttctccatttttactaaattgtttgttctattctctagggaattatgcaaaaaagaatttcaccttggaatcaaaaggttgtgttgttttatagctaaaaaaatatttcaatactgtaaatgtggtgtatatattttttaacttatttatatatataaaaactctagtggtgtataatactgattaaatttgataaatactaaaaattatgttaaatttgatacaaaatataatatggactaaatttacactacatcataacacaaatataaaaacaaccaaaaaataacaaaaataatgttatgaaataggtaaaatagaaaaaaaggtgcttctgtaacgcgctccttatctattttgccataaaaaaaactagtataattttttaataatcatatatgttatagttatttaaaacgtcttgcaaaattttgagaggttcagaataatttacacgcgtataaaataaaaacgtcacatgtgaaatggattatttaaactctgttgacatgttaactatttttgaatttaaataactacaacatacataattacaaaaaaaaaatatttataagtaaaaattaaataagtaaaaatgtaattgtttttcatattttttttggcaatttaaaagaaaactcttaaaataaagagattatttcacaaacacacaaaaataataaaaaaataaaaaaaagacggttatacggaattttaaatatttttacgatttttataattttatttacaagaatttttgatgtattttttattatttgattttttgttattatttagatattataatcttgttacttttatgtaactttttttattattttcatgttatttttttagaacactataaaaatattaaaaaaaatctttaaacataaaaatataaaaaaaaaattacaaaaatagtaattattgtaattatctataaaataagggcattttacaaaaatactggatttggggtaatacttttcaattttactgccatacggcagaattaatattcatactgtcctcctttttttttcttttatactgtcaataccaaaacaaaagtatgaggcctccatcttt

SEQ ID NO: 107555 - DNA, 557 bp, Cannabis sativa
attttcttccattgttataaaatctctaacagatagtatttcactattaaattgcggtcattactattgatcaatcaagtatgtataactaagatttatatattattgttgtgttttatatatacaaatttgcattagatttctcgaattttcttttcatgttttgttttgttccatacgacagatcgtttagatccaaggctgtcatttgttttaactaaggcaaaggtaccaataatgactattgtgtttaatgtggtgcgagttgtgtttgtaggttgatgatgtgtaaaattcctgcatatagtacagtttttatatttaggatggtcttaattatatgagtaagactattcatcgaacatttatttatcgataacatcttattatactttgacacatcttagaaagcatttaattaaagacataagtagtgactgaaaaggatttttagaagagaatcctggcttcatatctatataaatatatatttatcttaaagctaactaaaagatggttaaagatttatgtaaaactaaaggagtacgtactttgtc

SEQ ID NO: 107556 - DNA, 578 bp, Cannabis sativa
acccgttatctggtcgattgtgtacactataagtttataaataatgtgaaagtttaaatatataattgtgtagttattattaaatatgagatttagaaaatagaatttagttcaattaattaagagattcgtagtgcctcgaaaaatgtaatccgttacccatcaattggtgcttgtatcgtgtggagaagaagaattcatggttgccctaacaagcttgagcaattgggctgaaagattttgttaatcatagtgggttggatactttaaaaaaatagaggaggtgtgatgatattcctttttatttttgttggattttgatttttttttttaattttaccagaaaagtgtaacactatgaaaatattgtaatagggattattagtaatttctaaatagcgtgaaatatataattgtgtaactattattggatatgagtttgagaaaaataaaatttctattcaattaagaaatttacactgtctcgaagagtacaattcaaagatttatcctgtctcgtgaaagaaccattacattacctatgatggtcctaaaaatagagaggtgatcaaccagct

SEQ ID NO: 107557 - DNA, 1278 bp, Cannabis sativa
gctgtaaagactccactcgcacttcctcacatactttgccatctagttctgacgagactttgtctctctatcggggcccccatgggtgatcactatcaatggttgttgaggccttggggcaatctaaagcaacatgttatatcattctctagcttcatcctgatcccttttcaatgtggcaacacccttgggggttggaaatttcatggtcaagtggtacattgagatgaccgttttcaactggattagcaatggccttcccaacaaaacattgtaagctgacggagaatccactaccaagaaggtggccatcattgtagaatgttagggtctcccccctcgttagcagcaattctatcgttccctgcagttagtcttgttttctggtgaacccgtatattggtgacgtacatgatttgagatactcaaggtccaatcccatctcctttagagtagtgtaatataggatatctactgagcttctgtcgtcgactaatgttcagtgtacctgggtgttaacaatttgcaccgcaaggattagggggtcattgtgtggaaaatgtacacctgttgtgtcctcctctataaaggtgattaggtgttctccccctcaaaattatttaggggcctccactccaaattctaggagtgagtttctcaccttgccccaagggcgtacctatcccttttccttcgagcttcgcctcctagacaaggccctcttatgactattttgacgtccttcagtgcattagggactctgatgggcactctttgttggtgctcttcatctgcttgtgccctatttatgttcgcctctctatcaccgatggcggaaagtgggagatcttgctctggtgcaaccaactattcttcgtcaaggtgattctccatgtactgacaaacacgagaatgtctacccattatgtaacaattgtgtgtaaaggagcgacttggtttgagcttttcgtttagaaacggtgccagattgttgagagtgagaactcgtcaaataagttagtggtccaaaaataggttacccaattatgtgataaagataagataaagatgaaggtgaaaagatgtctgaatattcctctctatagtgaattcaatatctgagttacaccaaattatcttccaaccccatttcacatctgagatggggtgtatttataggctctaattgcttgatgtagaaaatggtcccattgggagaagacatcactttctcgctgcatgctgcaggtgctagggtagccaggcaccctgttccct

SEQ ID NO: 107558 - DNA, 1373 bp, Cannabis sativa
cgtactatgtgttacacttaactttatattaattttattttaggaaaaaacctctaaatttcaattgtttttatagttttactattttgtttgtgagtagatattaaaaacaatctgttactgctgatgtatatattaacagacgacatatttttattgattcatatcattttaattatttaaataaaaatacaataaaattaatttacaaataaaataataacatagaaaatttttaaaacctccaaattaaaaactctttttcttctccttttgttttctttttctttgcttttctttttccaacacccctaaaacacaacctaagaaccccaagacctcagacccctctcagctagctaacagacagttagccctaaccccgatgaatggaaagccccaatgtaataccctaactcacaaggacgtcgcgtgtgcttttacaaacttattactaactaatattttaatttagagaaagtgatgtttgataaaaaacttttgatttaattaaaagtaaaactttcatacaagatactatcatgtacggggatgccctgtttataaaattattttacaacaagttataaaatcggtagtaccaaagtaaagttacatttccaaacatagaaaagggttgatcctactttttggaagccaagacgccatggctgatatgtacatccctgggagatctctaactcatggtcgaacacatctcctaacctccttacctgcaccacgaagcacctgtgagccacaatgcaagaaaagctactagatcgaaagtattgaaaacataagtattcacatcacaacataatatattgttatacccaaaatttggctggaagacacatgtcaagataaaagtaatgtgaagcggtgcaatatctttttatggaacaactcattaattacgaaagtatcagagtatatttgtaactcgctgaatgtaaggtctgaggcgaggaatcaatgtacaaactggtacttagtgtattaacgagaaaccatgtcgccaaaggtgaatagcgaggcactggagaaaagtgacacctaccttagcttgcaataagcaaactaagtgtaaaagtcggatcagctcgaagaacaagtatgggagatgaccatctcgctatgaggagacttcctatagtttcatccaactagcaggagcgaggctcataaccctggcaagtcagaagatttctttatactcgcgattgacgtaagacatacattttcgacctcggaaagaagaatggtcccaactcgctattaggatcaatataatcaagtttctgtcgagacatctccaaattcaataattaaagacgtgtttaatacacgatatttttgacccagtaaaa

SEQ ID NO: 107559 - DNA, 713 bp, Cannabis sativa
gaaaaatgaaaaaaattgctatgtaaatatttatccatcctttggtgtcagggttttttccaatattattacctgattttatatggtaatagttgtcgaactgactttcgacgctagcacttggttaaatcactttctctctcgcttggtcggtcggtctgggttttacacacatctttggtgcttttctggtgtttgtggaaatgaatttcctttatacagaaattgacagcctttgagattattttatgttgttatgataaccaaccttagtttcaatttttattgctctctttgactgtatcatgatgtattttctccacttgattagctttttccataaaagaaatatctggatattaattagagtcttataatgttccataattagggtttattatttttcattctcaagtgtcttttgatttatgtttactaggactggagaataaatgagcttgaattgatattacgtattacattcctggtaaaaaatatttttgatactttatttgtttggtaaagttttttttgcactataacaactattgcaactgtaacttttcttggattgtattttgttcatttttcaattgtctggcataagaagttagggatataaggaatgttctaaaatggcctgtttaagagtgtactacaaaattgcttatgagcttattaatgctatttttgtaatttgggttctttctttt

SEQ ID NO: 107560 - DNA, 875 bp, Cannabis sativa
  modified_base (106)..(118): a, c, t, g, unknown or other
ctagcatgtaggcagagtttaagagagagaagcaataaatatacattggtatacctataaaaaagaaatgcctaaattgtgagtattaaaataagtaagggtaaannnnnnnnnnnnntagtaataatagttattggtgcaattatttcattatttaaataaaatcaaattcatacattggttgttacgtgtattggtttaatagcatttaagtttcaaaataccgtatactgtgttgattccaaaatcactattgttaaagtgtattattggtgcctagcactttccttagtgtaatactgctattgctgtaattaaatagcggattctatataacttaagaaaataagttttagggaatatcgttaagcaatcataagataacacctataaaaattgttgggcaccaaaagtgaatgaaatcgaatccaattatagcaacgctctaactaaatatgtagtttaagcatttaatatgttctcttattccattccatgcaccaaacccacttgtcgttcaatgacacattcagtttaggccccagcattagaatcagaaacttttctttcttgctccatttctctatgcatgccacaacaatgactttgaactcattggcctaggggccttaaaacattaatttaaacaaacaaagcagggagcataagcatattaataataagagaaatactaaaaagtatataccactttttaatgtaatgcaattaaatataaaattttatacaatttaaaataataatttttaaaaaataaaagaattactccctatattatttttttaacttttttttttttcaaatttacggtttaggtttctaaagtggttgcaccgttagttgcaataggggtttct

SEQ ID NO: 107561 - DNA, 775 bp, Cannabis sativa
gaacccgcgggtgtaattgccatcagatagtaagatctgcccctccgatttctcagttaatgttcgcagatgacacagttctattttctcgtgtaaacaaaacagaggaaaaaaacttgcttgagcgtcttagaatctatgaaacatggtctgggcaacattgtagcaaagcaaaatctaatgctctcttttcaaggaacctgcctcatgaaaagataagagatatcttagaggctcttgctatagaggaaattcaaggagaagaaaggcaccttggaaacctagtttttcaagagacgaaagaaggaaaattacgaaaggctaaaggaaagtatgatgcaaaagcttgaaggatggaagataaatttgttgtcgtatgcaggtcggctcacactaataaaatcggttgcttcctcaatgtcgatttagataatgtcaacaaacaaagtcccagtctcaatctgccgagattacgatgctataattcgaaagtaatggtggggtggaaatgtgaataatgacagatatctagccttgaagtcatgggatagtatctgccaacctaagtcttcagggggggttgggtattaggaggtttgaggacatgaacagggcattactttcaaagttggcttcgagtgttgcaaacaatgaagataaactgtgggtgagaattgtttgcttcacaagtactgcaatcatgaaaaattttggcaggcaccaaaaaaagctaatgactcttacttatggatagggccggccctgacttttagtg

SEQ ID NO: 107562 - DNA, 1228 bp, Cannabis sativa
aacagttttatagaacatgtttttgaaaaatattttcacttttctacttttaaaaacagaaaactgattaaaaaagtattaccaaacgccacctaaataaagaatgaagttacaaaaagcttttaaatcattacaaatatgacattttcttagagtaattaattatgatttgataagatattaattggttatttttgataaaattatcaattttaaaataattaaaaagacaataatcataccaaatgttctataatcagatatacctatactcatatatatcaaataaacttattagtttattttggcatattgaaacaaattttcattctttgtttatatttgtcgtatagcccaccatcgtatatactaataaatcttttagtttattttggcatttttaaacaaatttttatttttctttttgtatattagaacaacaattcatcttttttttatttcaaacacaatgtgtgcttataaaataacaaactaattagtctattttcttaggtcgagatatcaaatctagttttatacaaaatacatatgactgtaacatgtcctacatagtaaacttggataataatctatgcacttgtcaaagatttgaatatgatgaaatatatatatatatatagctcacatgaaatgcattgctcataagtttatttggcatgtatcccaaataaacttattagtttatttggacatattgaaataaaattctattatttgtttatatagcagccttattgtatagcctaccatcgtatatactaataaggggtaatttcataaatatgggaaaaataaagctaattcagataaatatggtacgaaaacttaataggaaaaaatatgatatttaaaataaaaatttcacatatataggattgaattaccataaaagacattaaaatttccttcattttttttaaaaaataaaacaaatgaaactacagtgattgccggagttgtcaccagtgccgaaaaaggcaccgaagtttgatgtcggcactggaaaaaatgtcggagttgctgcatgcgctggaaaagtcaccggaatcagcattatcgcaagaaaaatcactgaaaaaatacccataaaccaatttcttgttttcttggtgattttttcggtgatttttctggcgacaatgccaattgtgacgaatttttcgtagtttattgtcggtactgaaaaagtcaccagagtagctgtcgg

SEQ ID NO: 107563 - DNA, 852 bp, Cannabis sativa
aagtctgaaaaatcattacaagtcctccaagtgtcgttttgttttgggacgagaactggatttgaaatctatgaaggataaaaggcctcgcgtataaagtcattggtcaataatttatcgatctcctctttaagtgctccttatctctcggagtctaaaggctgccatttttgcctttttgttgggtaaatggggtcgatgtttaaatgatggaaaattacattggggtctatccctatcatatctgagtggctccaggaaaattgatcctgtttttcctttaaaaaatcaatcaatttctattttagttttttatccaaattctttccaatatatacacatttggtgagattattttgatctaaattaacctcttccagctctttaatgggtttaagctggttattctcgtcttggactctgggatctagatcctcatcttccttctcgactccttctattatgaccaccatcaattgatgattggctcttctattctgaagttctatgtgataacatttgcgagccaacaattggtcgcctcgcacaacacctactcccgcttgtgttgggaattttagagataagtgcttgattgaacttactacccctagtccaatcaatgcagggcgacctatcaatatattataaattaatggaagatcaacaactaggaactcatgcattagcgtcgttgataatggtggttctcctacagttaatggaatttcaatgatgcctttgctggcgacactgtttcttgtgaacccacataagcttaccatgcaaggtgttacctttgcatcttgtaatcctattttctttaatgtatccttgtaaaggatgtttacc

SEQ ID NO: 107564 - DNA, 1914 bp, Cannabis sativa
gaataatagatctaagttatatacagttgcattttggttgatttctgatttccaatgtggaatatattttttttataaacacgataagaagagcaaatttgaaataatctacaaccagttacgtatgagtgtgtttattttttttagttgcattattgtttcataatagcttatctattttgtaggaatttcgtttgacggtgaaaaagaaagatcacttctacatggtaagttttatgaaaatagttacatattcgttttattataactgtaaaaaaaagttttgatacaaacaaaactaatgaaaataacagggttcacaattggcagcaactgacttgaaaaacgaaaagatcaagagctccaaatcgatctaaatcatatataaacaataaagataaagtatattcgattgcattgtcgtttttttttatttcaaaatataatcaagctacaaccatgttaattggagttaagttccaaattatttcaagttgatttatagttgcatcatcatttcattatggttttattcaatattgcaaaaatttcttttgacagagaaaaaagacaaaacactttgacaaaatggttagtttgtttaatatttttaaaaacgtttcataatagttgcattttagttttttcatagtttcataacagtattcaaacaaaaagatgaaaaacacatggttcaaaattgaaaatacaagacttgaacaaaagaaagacaatagaagtaagttcttttctatttcataaaaatcattttaatttatgttttaaaaattagtataaaaaattgttcaaaaacattactaacattagcaataacaaattcaaaacagtttcaaaatagttgacttacactaataataatttcatattcacgggaaaaagaagacttttcattcctagtcttttacaatggacaatctgatgatcaaatgaattataaaaattatgaagctagtggataatacatctcaatcgattgtaaatatgatgaactaatacagaagctgaaataccaagaaaataatgtcctgcaactgaaataccaagtgaaagaaggataccaactgttgaggataaaggatgatcaaagcctacatttctacatacaactaaaactgaaggaacctgactttacaacatatccattgtgtgtgaatgtcatcaacaacccaacaacaaccatcaatccatcaacccatcaacaacctgacttctacatacaaaatttgtttcttggatccaaaatgcaagtgggcactaacggcatctagaaacagactaaccaagtcattcataattcaaaaatatgacagaaaggtgattcacacttgtgatctaaacataagatttacaaacaaaagacaagctacaacgaagttgattggaaactacatcaagccaagatttaccaacataaaaacaactcaaatgccacaaggcatcatatgataaatgaaacataagtatggggtgagaatgaactacatgaaagcatggagaagcaaagagcacgtacaagaagaattacgagaaaaagcaaacgaatcatacaagctgctgccaagttttttgcacatgctgcagaaaactaatgccggaacaattgtacacatgcaaacagaagaagataacatcttcaagtacttgtttgtggcactagatgcttcaataaaaggatggaagaagtgcaaacccataataattgttgatggaactttccttaaatcaacatatggagggacattactatctgcttgtacacaagatgcaaatggacacatttttctcctagcctttttgttgtggattcaaaaaacaacaactcatggcaatggtttttcacaaaactaagggaaacatatgggatcagagaagaacagtgcttgatctcaaaca

SEQ ID NO: 107565 - DNA, 650 bp, Cannabis sativa
  modified_base (30)..(46): a, c, t, g, unknown or other
atttagggtgtttaaataacatacttgtgnnnnnnnnnnnnnnnnnggtaaaataaatttccaacatcgtatgcatcctgactacgtctttcagggattttatcaccagtttgctcgaaaccccctttagtatttcttcttcccgagcatgggatctcagtcgcatttgtcctttgggaacccttgggttctttccctggtcactgagtcgtttccctaggttgattgtcatcattttgaggggtatccttagacatggttggagaaaaataaaagtttgaatattatctgagggaggtgtttttcgagttttttttcctacaagactctcaatgaaaataccaaactattaatactgttttttgttaaccaataaataagccttaatttaataaataaactttcataataataaataataattataataaaaaatatgaacaagaaagttttttttacgtggatttgaagttaattcttcacaatccataagtccatcttattatcaggattcaaatgtttacagaatataatatatgttttgtcactataattctcaaattggatgtccctcatcttgggaaatcttcccctatttataggtgtttggggtagacagatattctcttgagtgttggaaattattttac

SEQ ID NO: 107566 - DNA, 1241 bp, Cannabis sativa
  modified_base (1213)..(1214): a, c, t, g, unknown or other
tgcctttcaaaattaaaatagttatagtttaaattaatgttaaaaaataaatatgaattgaataaacattaaagtattaaacaatatttttttaaaaatagaataacaaaaatatactcatatgtaaattttaaatttcatattcaaataagatcaaaattatcaactataaattctaaattttaaaacaaacactataaaatacaaactttaattgtcaaatagtttaactattaaacgtaatttatgtattatgttatactaagtttagtaaaaaatatgtaaatcaatttattcgggttatttggacatgttagaataatattcaactagcccaatatattcattgggcggtttaaatttttcgtaaagttatccgggttgttttttttatcgatttattcggtttgatttgagttgtttatttgagttggacgatttgttaatttttttgaacagtcctactaataacgtgtcaaaaaataatgtaaattttaacacataacaaatattgtatcaaatttactataatataaaatttacatcactatatatatatataaatacattgctttttttatttatttttatgtcattttgtattattttataattctatttagataacattaaatgataaaattatatatattttttaattattttagataataaaattataatttttttaataaaatattaaagttcacaattgtgcattagaagataatattaaaaatcaatgtaaataaattacaaaattattttctatgttaaatatagcataatttttatatttttaattaaaaataatctaacctacctatgcaatatgccatataatatggtaaataattttagagaattaatatttattggggatgcaaatcgtcattctataagttgcttatctaaattgaacacgtccaattaacttaatagaagctatgccaacttgtttggctattacacatacttttgagtaatttgcggcataaatacttaagttttatgccgagtagcagataaatacctaaatcatatttttggcggtaaaaataccttccgttacactcttggaacttccgtaggtacctctccgttaactgccaaatcaataccaacgtggcagcccctcataggtccatgtcatttaatttttattttttctaacaattttaaaatttaaaaaataaattatttaatttttttnnaaaaattaaaaaaataaatatttaaaa

SEQ ID NO: 107567 - DNA, 977 bp, Cannabis sativa
aggcgcgagcttagggaggccaaggaggcagttgaagattttactgccaagctgaagtccctagaggagctgcaccaggctgacttgaaaatcacagccaaccttactgttgaggtgaatgagctatgtgactgcagggagcaggcttaaaagaaagtaaaaagagatgagctcctggccctcgttacctgccagcattgcaacaaatgttttaacgacgatgttttcatggcctggaagactaacgatcagaaccttaagcttgacttctatcccaagcctgaggaggtcctcgtccgcttcttggagaagaagaagagacttgatgccttgctcgacgagcgcaggggtccttgccttccacctcgaattgattagccagattttcaccactattatcattatcattatttttctctttctttttttttttatatatttaatccttctcccctctctaagacaatttacttattttttttttcttaaggggagacatttaaggcccgtctccaggcccttatgttttttagagcttttctttgggatcagaacactttatattcacgtttgaatacatatttagcttttgactttgttaatcttggtctgttttacattttgcagtgtgatatgctttactaccgcctgagtgacatgaaaatcaattttaggtcactcagttttacaaactttaatttagaggttgcacatacttgtttggtacaaatttactttacagaacataaacttttattctttcgactattggtaatactttcgaaggtgatcagcattcgaggccctaggcaccatggttctgtccttttttttagcttgtaggtcccggagccgattttgtcctcaatttcgtacggtccttcccaatttggcccaagtaccccaactctaggttcctaaggggctggaaagacccttcttaggaccagatcaccaatagtgaattttctattttt

SEQ ID NO: 107568 - DNA, 1196 bp, Cannabis sativa
tgtgttattcttcttcttcttcttcttctttagctttcttgtaatcttgatgaaatacttttatttttattttgagtattttgattgtaatcatcatattttctcttgtaatgagaatttttcccacaagtataagacaaagggtcttgtgtggtggtagtgttatatacataatcaacaaggtgagatggtgttttgatggggcgacttgttctcgaagtaatggtaggggtgaaaaatgtgtcatgggatgtggaagattgaacagggcgagatgtgggggtgggagaagaaaataaggtttctatgtcttgctgatgtgtatgatgaagaaagagaaagatggtttcacgaaagaccacatccctggaatgatatatttgattggactggatgtcaagaagggattaagccttcatgcttgagggatagcctatgaaaaaagaagctccacttctaggagaaaatttatgcttgtgagaataagagtggaaccatatgataagcaaccaaaagttcttaggtgatcataggtagtttctttactatgtagtataaaaaaggaggtcttggctttgagtaaggcagatggtgttcaattgagcaagtatatagcaatttgaacaacatattactaatataccagaaggatattagattggaataacttaatgctctagcaacatatagaatatgttgatgttttctttccacaactgaaatctaatgtggtcgttctacacatatcagtggtgtgaaacaatactttagaggcaaaaaaaataattgaaactgaattctttggtattgttcgattttacagcttaggtagtaactgagtattgagtgcagaccatggtgtaaaattgaggaattatagtctgtacttcaaacttagtttttaacatgtaattccatgcaaatctcgattttttatgtactattgttaggatatatttgtactcttcaacactgattatgtagaaggagcccgaaatgtctttgtattaaatcaaacaagccattaagggctcgtttggaacgtcgtattaagtcgtattgtattgtattatattaaaatgtattttatgcaatatttttatgtaaaactatatgtgctattaacttttatagacacctaaatataaaagattttagtataaattaaagtttaacatagtattatataaaaatat

SEQ ID NO: 107569 - DNA, 630 bp, Cannabis sativa
ttgctccatctcttgacaagtttctaccggtaacaagaaaacattcatggcataactcggagagattgtgccacggttttgataagcaattctttgcccgccttagacaagaacctcccttcccaactctgaattttcttcctcattttgtccttcaagaacccaagcaaagcagtcttattacgccccaaagtattaggaagacctaagtaaaagctattttcacaagcctcatttatccccattatggtgcaaattctgttttatcttcaggagatgtattcggactaaagaacaatgaagacttctgaagattcacttgttgaccagaagcaatttggaaacaatccaacaattccatcatactcaaagcgccttccgttgaagcttgacaatagatataactatcatccgcaaaaagcatatgggaaaccataggggctcctctcgcgaccttacaaccatgaagactacccctcttctcatagtcttttaaaagagcagaaaaaccctcagtgcaaagaataaaaagataaggtgatagaggatcaccttgtcttaatcctctactaggaacaatcggcccaacttcttgccccctgccacaaagttataactaactgtgccaac

SEQ ID NO: 107570 - DNA, 1021 bp, Cannabis sativa
  modified_base (802)..(811): a, c, t, g, unknown or other
tccaattcacccccctcttggaaacatatcttgggctaacattaacttgtattataatatttacaaaagatctggagtcaacctcaaccccagccacggatctcagacccggacccctgccatggactcgaaccccgatgccgaccctgaccccgacctcgaacctcaaccccagacactaggtccaggtttcagtttggatccaagtcccacttcgggtcaaggtccgagccaagttaaaggaccggagtctgggtttgggttcgagtctaggtccaactccaagtcgtggttggggtcaggggtcgagtttattgtaaagaatttacaattttacacaactattagtacaagtcaatatcaaacatagtattatattaaattatactaatacaatataaacaatccaacacaatactatactatacaatacaatacatcacggtgtactaaacgagcacatgtgaattacttaaatgcataagagaaattaataccatctccaatgaatggtgtaaattttgtgcttaatttagttcaaaaaacgagtcaatattatatttgacccaaattttacaattgtattccaatgcattaggagtaaaataaattttattttaataaaaatgtgtaaaaaaatcaataaaagcattatatagttattggaagcatataaaaacaatatttaatatataaataaaaggttcactactcaatggttacatttttatttttattgtaaccatcatggttacattttttgttttacctataatagtaggttaccaataggtaaaacttnnnnnnnnnnaatcaattaattataattaattattttcttaaaactattaattgaatatttaacaagacatcttttagcaattaataattatacataatttttttatataaatccttatcataattattttaacagttaagtcatttaattataatatttacaataaaatttatttttttccttacaaaaattagacttctttttacacaaattagaatt

SEQ ID NO: 107571 - DNA, 926 bp, Cannabis sativa
catattaatatgattagtgaaggttagctttttttcataatcagtgtttcttaagtgccaccattagtaaaagcaaaatgacacaagtatttataatgttgaatcaaaagttcttgagaaagtttcaaatataagactaacatatacagttaattttacattacatacattagataatatatatcatatccaaataaaataaagtatttacattttctcataatgtgtctttctctattttgtcaaacaatttgccaatcaaattgtgcatataatgttgttaaacattttcgattatgggttgaacatgttttcacagagtcttttgttctgtctattttactcttattcattttttattagtatatttaaattattctttaaataaaatatataaaaaaaattaatgacatggaccaatcaatgactgccatgtgaccattgacttgacacttaatgacaaagtacttatagaagttctaaaaatataactcaagtattattaccgtaaaaaattaaatacataaggagttaaacttaggtatttatacaacaaattattctaatataaacatgatattttaattttttatgaaaaaataattaattagttttttaccatcagcataagttatcaaaaaattatttttgaaacgcaaaaatataaatgaataaataaataaaatttttgaatcaattttatttcatgcatataaactttaaattaaggtaattttttatgatgtggcaagaaaggattgtaattgagttttgtgaagttatttttataattatcttatattttattgaaaaaatagtatattatattattttacaatttgatttcactgttggagtatttctccaagggataattataccacatactgaaatttttaattgttttatttttatactgtggggca

SEQ ID NO: 107572 - DNA, 555 bp, Cannabis sativa
ccctgcaactgagcccaaccaatcggattctcaccccgatacaacttccgtacctttagccaacaatcccatggctccacgcattccaagctctcgatccagatctcaaaatgaggaagacaaccaagaacatgtccattcatcttcggttcccccaactgcttcatctcaaccaagtcggcgttctcttcttgattgattggctcacaaggacatttctagtcctttttttctcagctcagccgatcacccaggtctcatccttgtctccaccgttctcaatggtgcaaattatcattcctggaaaagaggcataacaatggcattgacagcaaagaacaaatctgcctccatcgatggcaccctttctcgacccgaatctggtaaccccctccttaactcttggaatcgttgtaataacatggtgatgtcttggctcataaactctgtgtcctctgaaatcgcacagagcatcatgtatttcgatcttgctaccgatatgtggcatgatcttcaagaaagattcaatgagggtaatggacctcgaatctttca

SEQ ID NO: 107573 - DNA, 999 bp, Cannabis sativa
tacgtaaaagtaatatatgtggatataaatatattattggtggacgaccatggtcaagagtcgactccttatggtttggtcctccatattactatagtattaagagaaatattgaacatctttaaagatatcatattttttattgcattaggcttggcgtacaggttgggagattcgtggaaagatcattcaagtttaattattctctacttaagctgtaagaaaatcatgctcgtttaaactatatataataagaaagtgaaatactaatgggaccttagccttagtatgctaaacattattataagagctgttattagtacaatttaatattaggttttaagtattttgatttaatacatgacataagaaactattaattataaacacttataacgctccatatctctgtatggtgtttggataccttaatccttaatagctatgcccaataataaaaatgaataattcttataaattctatatatattatcctgagatagagagttttttaataactattattcgttcccacctaactaaagctctaactgatattatgtattgatggatcaaacacgtaataagttaaattcctccaaatttataatatacccttatgcctttacagacaattaatcatgaagattggcttgtttatatatatttatattcattagttagtgctagcttattatatgaatattgctatttcaataaggtggccaaattagtaacaatgagatgaggaaaagagcttctagagagttcggagtttcaacttaaaactgaacaaaagttaattggagtataaatatccttccctaacgttgtctttcctacacgtttaacttttactaatgtgggatgtaatgaatgatcttagataggatcaaaatgaaagttttagatttatctatggagttgacaagagtgcagaattcttctgttgaagaagctttgatcatgatatactatatatccgcggacacaaatttt

SEQ ID NO: 107574 - DNA, 591 bp, Cannabis sativa
taaagagtaccatcaaataacataatgggtcgggtatctttctggaagaaggtcgaagtagctttgacccagtcaacgccatcatcggctcggggaggagatagggtagcaaaaggagtaagccttctgctaaggtgcgccggttgtgagacgcgtaatcgtacaccaccgtatggaaattggagttgcatggccatctgctctccgactcaaattgaatccaattccaaatggtctgaactctgaaattgtaatctcaaagccaaaaattgaagcaaatgatggaatttctttttatttatttatttaataatgactggctccctctctgtcttcttattttcacgtggcactcaaattaccataatattgttatttatttttttttttataaacataatattgttatttattattttctttttatcttttatttataattttacaatctaaaatttttaattataaaaatatcctctactaaaaaaaaaacaattaaaaaattataaaaaattaaccttaaatcaactctaaaaaaataacactatgatacctataatgcaactgcaaaatagcccgcgcttcgagtgc

SEQ ID NO: 107575 - DNA, 1210 bp, Cannabis sativa
  modified_base (454)..(457): a, c, t, g, unknown or other
acgcttccactaatctttgattctgttattgaatttctcatgaaataattagggctaaatacatattaaatgcgcctaccatttcttgttaaggacaaggatgatatcttttgtcttgataacttttttctcaacaaatcttgtcttaataaattttttcgtaacaatttttgtctttttcctatttaattatttgaaaattttatttatttattacaaaaataaataagtactattttgccaattcaaaatagatttttatgaacatcattatactactctttattctttcccttgacagtgtttcaaggtagcgattcggggaccattgacttataattctaagctccaataaactagattatttattgagtctcatcaactaaataatctttatttattaattctacgattacttccctataaatttagaattgaactcttagtaattatnnnnttatatttactgagttttactacagtgtctattgatttaatcaattctagtgattaaccctctatgtgttggttcgtagttagttttgatcaaattactgttttacccttttaattaattttttatcctttagtaccaataattcactagtggaagtataatttagattccatttaaatttgtgaacaacatttcagttatagaattaacacttaaagagaactagcatttgattcgttaggaaagttaggattccaaaatgtgtgcataactctcttagctttgaaaacacgaggggcattattcttttggtcatgaaaacattcttgcagttctaacaaaatatctacaacattctccaagtacattatgttgtcgcatcaaagtatccaaaagatcgctatacgttgttacattaacaccacatatcctaataatcatcgtctttagcatctagtacaagtaattttctattaacgaacttaattttgttccttgcgaccaataccatcaccattgaacacctccaccagttgtaattgtcacgacccgagctctaggccgtgacagatatgtaatatccataacttgggtggtcaaaggtcacactttgacccttgtagtaagataaagcttataaacaattattttatttatatcacaaaatactaatttaaaagtaatggattaactcctatattaataagaaaatattagtaacaaaatcatgaccactcattaatataaaagaac

SEQ ID NO: 107576 - DNA, 1065 bp, Cannabis sativa
tctctctctctctctctctcaatgcacaaggtttggtatattttttaggttaggggtggtggcgcgcgattgggttttgggatgacgagtttggggtggtgcatcgaatcgtctcatatatgaaagtatctttaaatctattttttagtaatttttttttaatttttagtttgcgtcagttattaaatgaagtaaattttttgcttcatttaataaccgatgaaaaatgtgaattacttttggcatcggttattaaatgcaaaaaaaaaattagtatcggttatgaagtgaagcaaaaaataacaatacttgtgtctttagttatagcgtaagttatacaaattggcacaaattttttaaatgtcacttaaaaatcaaagcaaaaagccttttttgtagtagtgactactataattactgaaataaaagctcttccatttatctcgtttagcgaaactctaaagaaaccatcatttcacttctagacaaactagaaactttagattattatatctatgattaactctttcactcaatttcactaccgagttcccaagatataagcatgagctagacctacaggtaagcgggtaacggacaagtcaaaaaacttgtgtagtacaattaagctgaagcttaatcatctaataattgagattaattgacttaagatcaactagataatattgactaagaaaatatcaatttatgatatctaaaaaaatatctttctattattgttttgtttttaaataataaaaattaaaaaaaaaatgtttatatttcttaaagaattattattgatgctgtaaaaaaaatatttattattattatattttcaaaaacaaaaaagtttatgatcatcttttttttttaaaaaaaaaaaaaaaaaatctaattatataactaaaaatatacataactaaaataatataattaagtatatgtgtattttacttttacctaatattaacctagtaatatatatatatgtatatatatctattttatataaagtgtgcatatataacagaattcttcgtttatgaaaaattcatgggtgac

SEQ ID NO: 107577 - DNA, 782 bp, Cannabis sativa
ttatctcaaaataaatttgccagggccaaaaaatattagaaagtagaataaatgtaaaagttaagacctaatgaaaattgatttattaaaaacagcataatatagaagaaatatgtgaagaaagagagtataaatataaaaatatttataaaattaaagtatcgatgtaaaaattaaatatggattaaattataaataaaaaatttaaatattaaaatttcaaggtggatataagtcaccccaaattgaaagaattttttgagctttacctaaatgtatataataggctaaataaaatttttatttcttaaactttgatatatatcaaattatactatttgaattttgttgtcgttaaattttttttctgaactattggaattgttaaatttaaggacttttgtccaattttattcaattttattaatttagtgattgttatgctctctaaattttaatatctactaaatcataccctcgaactttaatatgtaacaaatcatacccctgaatttttattatattagactttccttattaaaattggacaaaaatttttaaatccaacaatctcaataattcaaggaagtttttaacaactttcaaaatttagtgagtataatttagtacatgtaaaaattgggaaacaaatttcaattaccctacataatacatacacatatttatacaacttagtacatatatatatgatgaaattttacatgctatatataaccaagagacagttatattgatctatatagatatatatataataataa

SEQ ID NO: 107578 - DNA, 2394 bp, Cannabis sativa
  modified_base (963)..(975): a, c, t, g, unknown or other
aatgtgatgcaccagtatcaaataacacatgagcccaagagtgtgagataagaaccatatcatcaacaactccctagtctgcagcgccctgtacatcatcaaccccaagagcataggcttaagcagatgactttgcttttgattttccctttccttgactaggattgctcgtacttgtaccaaaccctccaccttgattgtaccctctttgactcccactaggagcaaaagtttggaaaccttgtgagtaccccatgttgaaccctgaaccttgtggcctaaactgatgttgatactgagactgctggcctgattggggtgtgaaactataagaggaagactgagactagtttgtcctgggctgtccatgaaaaggagtagactctacatagctccctatgggtccgtcttgagatgcttgaaatctttgttgtcgttgtgggcaatctttcttcttatggccttgttgaccacaactaaaatacacgtatggtccactatgagtctttccaaatgaaccactactagtgctacccccactaaattgttgtccttgcccttgattcttcttagtcatctttcggtcatttccttttcctctgcttgtgttcttcctctcattttcttctacatgagcctcagtttgcaacgttactatcacacacttaattaggttatcaaatgtcaaataggctattagaccacgtatcgtaggcctcaaatgatgcatgaactgttcaatcaccaagggttggtcaacaacaccagaatatgcataagaggataactttacaaactttatgtaaaactcattcacagtcataccccattatcttaaaacatcaaatactctaattagagctctcttgtgagatggactaaaatacttctccctaaaaactctctgaaaatctcaccaagtcatcccatcagtttccattatcctggacaaggtctcccacnnnnnnnnnnnnncaccctctaacttggacacaacaaaagtaacttggtatttttgaggtgttcctattgtgttgaaatttttctttatctgcctcaaccaccttttagctactatgggatcttatccaccctcaaactcaggcacttggatccaatgaaagatctaaaaatgatgactctgtcgagtggcatagatccatcttttgagcaagaactgctcttaaggctttgagaagagcattcatagagaatttaacttgtggaggtttgacattagcttgaggagagttttctccaacaattctccttgtcttccttcctttaggaggtattttcttaggtttgagaaccaaaagctaatcagttagtgaagattggatgctaataatataaatatgtcttatacatataaatatcaagatacttataactattcttatttaaaataaatctaaactatttggtgacacactctgaggtaattaaactcgaagctccaataccatttttctgtcacgacccaagccctaggccgtggcagatatgtaatatccataacttgggttgtcaaatgtcacactttgacccttgtagaaagataataattataaatgatcctttaatttatttcacaaaatacttatttaaaaataatagattaactcctatatcgataagaaaatattagtaaaagaataagtatcactcatcaatataaaagaataataatatccccacagctatgtagtcaccaaaaaaatagatttaataagtcaataaaatatcaaaataatatttagcatccatcatttctcatttctaactagtacatagctaatttaagtctttcagaccatccattcaagcttaaatacaaaattagtttcattggaaagtttgataaataaaataagactaaactaataacgacttttttcttcaatggtaccattctcacccactagcatcaaacttagttcttagaatagaaaaaaatagggggtgagcttataaagtccagtaggaaaacaagtaatatcaaaggatctttcgtttaataaaaattcttgcatggttagttttttaaaaataaatcatctcatcgccattgtcaaaatgtattaacaaaatagagagaccacaaataatcacaaaattaagcttcgaatgcatatcacactatctactagacccctagctctcaataccaatcataaaaaatgacattcaaaaatcgggtagtcgccttataaccaccataataccagggctcaaattcaattcactccctgtatggagtctaggtctttcacctataggtgagtgcacatctgatctacctatgatgacacagagactagggtgtgaaacaacaatatgcacaaattatgattaacatggctctcattgtgagtggcagtaagcatttcc

SEQ ID NO: 107579 - DNA, 1299 bp, Cannabis sativa
tagcaaggaattgaggtagctcaagccaaagtaagccctagaaacctctaatccttgagtttttaagcttttagttgggtaacatcatgcaatttcttatttgaggtgctgttagagttgggttaggttttagtttgatttttggttcatgtttaagttgaattagattagtttttgctggttgtgttggtttgaagagtggttgagcaagtttgagtttaaaaactcaaacttggctcaataatggcactttgagtttttgtgtgtttttcttgctgttgttgcttggaaactattcttggatgacattgtaggtattctagaaagtttggtggagtttaggtttgatttgaaacggatatgaagtttttagggtttactgcagggaaccagttaaccggttctgctagagctatagaaccggttaaccgtttctccaggtaggaccctagaaactagttatctatttgaggaatctggtttaccggtttgggcagtttttagagccttagttttgatgtttcctcaatatttagggtattgtcatgctatttatcgatagacaaaattttagttttgagtttaattaggtcaccggaaagggtttttgcaagttatttacccatttatgtgattgtgacatagagcatccattcaacgcgtaattttgcattcacgtcgatcgacacactaaaatttagaaacgaggtaagactagcataggatatatttatatatgaatatgtgtatgtgttatgtatgcatgctgattatgtgatttgtatgctaccaacactagtacggtagcggtactaagtgcattagtacagtgtatgatgttcaaagggtacaatacggtgttaccaatactagtacaattaagtacatagtgcatgtggtataacactcaatagtactcagggtacggtttaaaccctactaatactagtacaatagcggtacgtagtgcatgtggtacagtggttgtaccttagttaagaacgttcttaatcatctaataagtcttgtggataggtgtataggagcctaaatacaagtcggtaatatattacttttgtgtgtaggtaaagggaaggctaaaactgaacattagtgaatccagagctcgggaatgattgtacatgtcaagatagtgtgacctggagagttcagtctcgggacgacttaggcttcattttgtaggcgctctgcgacatgtctgtaaaagttattttgaatatcgatgtaattttttttttaaaaaaggatccccattttgtgtatgaatatatgtatata

SEQ ID NO: 107580 - DNA, 649 bp, Cannabis sativa
tctcactaaaagataaaaaatcccaaaaaggcaaaaagaccataatgtcgttgcctacaccaaaagtcataaaatcacttaggggtaaattggtcaaatctaaaatctctactatccctgacattcccaatgtctaactatattgccccgctatactaaaaatattaagatgtgattctaatagccaaacgccgcgttccaatgttgtcgggcacaaaacatgcaaaaatatgaaattccatatgtgacatataaaatgccttctaaattcaaataaatctccgcaaactgacaattcataatgaacatgctagattcataagtaaaccctatttatctgctaatttccaaattaaagttaagcggtctttacagcatccttcttacttttgccttcttaatcggctttgctcacgagacctcgagtgtcctaagctaaaacttgccttgtcttgtacaatccttctccttcaaaaaaggttagatacatgccctctgtttaggtatgtgtacgcctcctccctattagatcgagaaggataatgggggtgcgtttgtggtaacccacttgttctaggttgagtctcaagatttctctcgttattacgagggatttcatgttccttagttctgggttgccttatattct

SEQ ID NO: 107581 - DNA, 713 bp, Cannabis sativa
ttgaaagtctcttctcttccttttgaacgcgcaactttaactccccttttcgcacatcaaaattatagctttatcagagctaagattttcatgattggtttcaagctctagtgaagatgaacaatggtgaccagaccaaagaagctctaatggttgcttggtctatttggaatgagaggaacaacctgctgtggaaccaaaaagtctcaacagttgcagaagtagttttttcagcacgatctaatctcaccaatggaaaagtgctcaacaaaataaacttgaacctctcttagttcacaatgaattaggaactgaggtggagcactggactaaaccagcaattaacatggtgaagataatcaaatgttgatggagctatttttaaggctaataggtcattattcggtttcagattcatagcttgaaaaagttttggtgacataattgaagttgtttcttcgagtaagggtgtcctgttagaaataattggggtcacaattgtatatataaaaagtgtgttgggtcatcaaataaataagtcaaatttatgtggtctattttggaataaagtttatgacttaagggcatgattgtcatgattttaatatgcgaataccaattagatagtttctgatttgatgaggggccaaattagaaattattaataaatattaccaactgttgtaacagttggtaatataacaggtatgggt

SEQ ID NO: 107582 - DNA, 679 bp, Cannabis sativa
ttttttttttgtagtgattctctatttttctagtaatgtgacagtatttttcaattaactacatctgattaagacataattattaacttttttaaaaataatattattacatgtaggtagttttttagtgcatattttgtatgtaaagatcattattctttatgtagatgtagtatgatttttcttttcttttcattgtttgacatattattattattaagtgtagtttaagaatgcatatcatcataattcataagattatgttctaatatcttatctctaattttaatttcttactcatttttatgtagcacatcctcttactttttgttgtttcattttctttccaaatgagtggttgagtgacatttgtgaccttttttttctttgtggggacaaaataggtacaaagagctaggatgaaggagaagcttccaatgttattttctcttgttgtttgacaaaaataagaaagctaagactcatttctatttccttttctttatataagaatccaatgcaacgaacctttcttttataagtgctatttgaaaaaggttaattaggattgttatctccgaattttgacatatactaaatcatgtcttctgaacttttaaggttgttaaaaataccctttgaactattgagattgttgaatttaaagacttttatccaa

SEQ ID NO: 107583 - DNA, 881 bp, Cannabis sativa
ggccgtccttgaaaaatctttgctaagagattgtgtagtgtggaaagcaggaagctcgcctgaaggaaaaattgaagaagacaggtcccaatttttcggataaggtgctgaaaatgaagacgatagattcgattttgggtatagagcctttgcagttcacagatgagggagtagacgaaaatgaagatgatacagaggaatgtggggtgatttacagaggaaaatgaaattgtgtctcccagatcaacattggctcacttgattcgagaggatgcacgctcagattttatgagctttatggaggcaacaaaacgatgtgaagagaatgtgaaatcagatatgacatctgctcctccagtattatgatatggtcatattttgaaaaatttgaatagtaagtttgatgaatctggaaatagaactgttgagaaatcaataagggtgaaaatagacatggatgacattgaagatgaggtgttattttggaagtcagctatggtttgttatgtacttggagctaatcctcctattggtgtgacagttagagccccgtgatccaacggggaaagaccaggagctgtacaatcccacatcgcctggggaaggtcatgtgtgatgattctgagactctgtcggtatgggactacacagttgaagtgagcttacacggattgattgatactacctatatcaacaaggtacattttgttttacggtagcccatcacgaaagaactccacggttaagcgtgcttgaattgggataattttagaatgggtgacttcctgggaaattttcccaagaagcatgcgagtgaggacaaagcatgctaaaaatactcgtgttggtttgtagggttagtcatcattccatgaagcagc

SEQ ID NO: 107584 - DNA, 1527 bp, Cannabis sativa
  modified_base (1060)..(1060): a, c, t, g, unknown or other
cttgcctcttttcccgaaacatctgatccccttcatcggagacacccgtaggaatacatgatctcctaccaaaaattctacatttctacgctttggatctgcataattgttttgcctactctgaaaggcaagcattctggccttaatcttttccatagcctcattagtctgttgcactgattccagacctaagtatttcctttctcctgtttcatcccagtgaattggagatctacacttcctgccatataacatctcgtagggagccatccttatagtacttcgataactgttgttgaatgaaaactctattagtggcaggtactttctccaggagccttcgaaatctatcacacaggcacgtaacatatcctcaagtatttgaattgtcctttctgattgtccatcagtctgaggatggaaggttgtactgaacttcagtttggtacccatagcctgttgaagactctaccaaaatttgtcggatctctatccgatataatggatttcggagccccatgtaacctcactatctctttcacgtataactctgtgtattgatccattgtaacagttgtttttaccggcaaaaaatgtgaaaacttcgtaaatcgatctaccacaacccaaatagaatcgtacatgttagttaagcctgttagattacattataatagtggtatcagtatatttagtattatattggatatcgataaatgtatgctagcttaagtagtatttgacagtatcacatcagtacgactaaagcatgactagcgtaccgagtatatgctgatattatggtcgatagtattgtactacttgacagtatcacatcagcacgactagaatatgactagtgcaccgagtgtaggctaatattatggtcaatagtactgttgtacgaacgttcttgactcagtactgtgtcggacacgaggataagattatggttgggtgtatgggcgcctgattataatttgggttatagttatgttattgtctatgcttttcttactaagtttgttgactcaaagatattgtttgcatgtgtaggtangggcaaggctaaggttgagcaactatgagagcgaacggatgaagattgtacatgtcgggacagttaggcctggagcatacggtttttggaacagctggacgtatttttgtatagtcgctaggcgataatttttgtactatgcactaagaaactttaataaatattttataaatgggatcctaattatatatatgttattttggtatttataattaattaataaagttttaattaatcacgtttttcaataaacttgttgattagcaacaagctgcacaattaagttaaaatcatgttaacacgcctaaactagtagggtcttacaatttggtatcagagccttgacccagtcagaagtgtggtcgacgaggacgtcggacctcgtaagggggtgtgattttgacagtcaatagtcctgtgatccgtaagggaaaacactgggtaagctgtgcaatcccacatcgcct

SEQ ID NO: 107585 - DNA, 868 bp, Cannabis sativa
taaattattcaataataaatattataatttaatattcaagcatatatcaaaacgttccactctttaataataatcaaaattatctttataggcttttcagggaatgaacccgaacaaaaattctataaaaatatgaaatttagggttttctatattatagcacttttgaaatataattagatcaatgattatttgtatttcttgagtattttacaaatcctaacacataaagttaatggtattttatatttgacatgtatggagccgttgacagtaatttcatatcaatatggatactctcatccacactcatattcacaaatttatttttccattgcatgtgaatatagtaattaagaaaaacttagatctatgatattttacatcaaaataagaacttggagtctccttccaatcgatgaaatactcaataaatgagagatttttcccctttcttagctaaattttttggtatttcaaggtcttgtattactctttgcttcaatacaaaaccatctaaaattaaaaggaagaggtgtggaatggaatggaagagtttatataaaaaaaaatcttttgtgaaccatttaaattctttagatacaaaaaaatccctacaatatgattaaattaaataagaagtttaaacataaaaaataataaacttaatgtgtaagaaaaatttgaccaattaaaaaatatatctacttaaaacataaatgtcaaaaaataaataaatttaaaaatttaacactatggaagcattagctaaaataaagtacaagagaaaatcaatagccaaaaactccataaaacatacatgaccaattttttcaaattcgcaacccaatgaatataaattccttaa

SEQ ID NO: 107586 - DNA, 721 bp, Cannabis sativa
aacttaatcaagtggctcctaaaaccatttcacgtagagattatctttcttagtagaaaatttttccaaacgtattaccctgtatattgtggtagcattaattccatttcaccacatttttgaagaaagctctacaaaaaatgacattaatttcacaaaatcttctttgaaaaattcattatttgagctcattaagaatagaaattacaaaaaagcccatagtcaatgtggctctccctgcaaaagataatttttttgtaatataagttgtgattcgataatcataatcataatataactacttatgttcaatatgtaaaatttgatacattttgatgcaaatttgatgaaaccctacccagtttcgataaagtttgcacttaaattctaaaatacagtaccagattgcagaatataggaataaatagcttctaactataataaaaataaataaatagaaaaataatattttgaaacttatttatcaaaataaaatttaataataactcaatttagaggtagtaattgcgttttctatgtctatttctattaagaattatcttaaagttggtgatattacaaaaatatgtaaaattgagctcaatatcttattaatttatactattttaaaatataaaatttattttattatttaacagaataaattgtcaaatccgtaattttttgcagcaaaacacaaaatttcagcaagttatatatt

SEQ ID NO: 107587 - DNA, 704 bp, Cannabis sativa
aatatagaataaattacaaaaaaaataatattgtattttcttttttttgttttttcttctgtttttcttttgatttacttcttcttcctcgcacagaacctacacccacacccacacccacacccactcctccttcttctttctttcatcatctcattcttcttcttcttcatctcattctacttcttcatcattcattcttttgccatcaataacaccaaaatagccgagatctccctcacttcttcttcccctctcgcactcattgtgcactctctctaaggcagagatccccccactcactgtcattgtgctttctctctcatgcagtgatatgccgctgtcgactctgaagaaccccgagacgtgagaccccagacccccaagaatccttctccctcttacgatttccccacttggcctcaatattctccctcactctctttctctcttgctctgtatctcgcccaggcagagatccatcatcgctttagtgtaagtcttttttgctcttggttttgggttttattttggttgtgatattggatatagatttttttttctttgtgataaatgatttaaggtgatggtgattttgattttgggtggtggtttagatttttgtgattttgggtggtggttctggtgattttttttatttatttttatttttggttttgggtagaagaagaagaagaagaaga

SEQ ID NO: 107588 - DNA, 1508 bp, Cannabis sativa
ctttaccaattttgagcttcctggctggatggctggattgatctccacttcttctaactcttctattggcccaacatttgcatttcattccccaagtcagggatccatgtcttcgtccccaccttgggaaaatttctattgggcaatgcctttctctttctctaaactccggtcagaagtattttcctttttgaccttagatagagcaaggttatagcattcccgttaaatcctttgatttcccctagataacatactccacttttagttaggaacttaacacacaggtggaaaaactgatgtgaatttttaagtcatataggtctggttggcctaacaagacattaaaatcttaagggacattaatgatcaaaaattgtgccattaccgttatggtcttcagatcttgtccaactataagtggtaggcaaatttatccaagtggtgctacactctggctggagaacctgtagaccagttgggtgcattgaattaagtctataaggtggagccccattttctcatgtgctgtcttgaatagaatatttgaggaagctccattgtcaaccatagtctgctccaccattttgtttgtaatttgaacttcaacgaccaaagggttgttatgtcaaaaaatggcatggctagcatctacttcagtgaatgttattattggttttcctacacatggagctttaggctttctttcgtcgacgaccaggattgcatcattttgtttttattagtaagctcaggcatacttttatctagcttttcctgagtctccagcaaggtacggggccccaatgattacttgaagatacccattcattggtgggggcattagttggttttggttattatctgcctaggtggcccattgttcttggttggccttgacaaatttttgtaagtgcgggttatttttcctaatcaggaactcaatctctcgctttaaatttttacgttcatttgtgttatggccatagtccgcatgaaaatgatagaacttagttgtatctcttttgctcatgtcttttttcatgggcaatagtttcttgtatggcaccatagacttggtacttgcatagattgtttctatatcatctattaggactgagaaatcagtaaattttgaagcattctccctgggatgctggttgtttaacgcccaaaatgtgacttccactagcggtggttgtagtatagattgggcggtcgattccacagggaggtgattatggacaaaaatattagtagaaaattagaaacaaaaggttaataaatagtgataataggaacaaatgattttgtgatttttgttttggtaataaatattaaaagaaagtaaataaaggtgtaatcaatattaaaagaaacaaaggattcaaaaatcatccatatgcttgtttagctattttgtacccttgattcacaaagttgataaatgatttaacattgaagttcattatatttttgagcaaacaagttcttgcaaataaaagaaa

SEQ ID NO: 107589 - DNA, 883 bp, Cannabis sativa
caaataggcggcccgtgacacacagagctcccgccgttccagtagccgccgcacaaacacagagaaaagactaaagagagaaggtggctgtcgagaaatgaaattaagatttccaattaggatttgtataattttccaattagggtttctaattgtgttttttttaataaaaaaaaaaagaaaaaaattgttttttttatttacaatatttcaattttattttaatttttttaatgttttaattttattaataattatttagtagattaataaaattgtgtcatgtgtatactatcttcacgttgatgtacacgtaaaaaaaagtcaacgacacttaacacttaaaatagatgaaaatattaaattacgaacaggagtattgagaattttactgttaaattttgagttaagaaaattaaataaaagcaaaataaaagtactaaaatttttgccataatttaccgaaaaaattaaaaattctcaaagaagtaagaacaaacgtccaaagtaataaaagcagtcagtttacgcgttaagcccgtacgatggtatgagttttccacacaagagttttgaggtggtgggctccgctaatcctacttggcattttcagccacgtgtcattcagatgaagagagcttaactaagaagtcgaagcttcactaacacttctcttgtgttgtgtctatgaatttgatcaaactaaagtcaagtcaaccaacatgtacggattgctccaacaaaaatgtattgtgtttcttttgtttcttacgaatatatataacccagttccaccccactcttgctcttgagttggggtgttatggctaaaacctcttagtttgattactgtgtttctgcttcgaattaatctgattcttca

SEQ ID NO: 107590 - DNA, 635 bp, Cannabis sativa
aatattctttggtagaagtaagaaacattcttttaactcgattaaggatagaatttgggcctatcttgataaacggaaaggcaaattatttttaaggggggtaaaggaatttttctgaaagttgtcattcaatccataccatcctatgctatgtcagttttcaagcttcccatttctttctacaattttgctgaaagacagatggccaatttcctgtggggatccaaagatggggaaagaaaaatctattagaaaaattagcaatctgtatgtggctctaagtttaatggaggtcttggcttccgatctctaagttccttcaattaagttatgctagccaaataggcatggcacatccaaataaaccccacatccatgttgaccaccttccttaaatccaaatacttccctcatccaaccttccttgaggccaagatgggtcattccccattttatgtttggagtagtcttcagtggggaaaagcccacctcaaaaaatgacttagatggagaattgggaatggaagcacagttagaatttaccatgataactagatcccaaactgccacttcctatcccctgcccgggactctgaccaagcatgtgtttctagtcttatccttaattttggaga

SEQ ID NO: 107591 - DNA, 749 bp, Cannabis sativa
aaaaagtggcatatttttggggttctcgctgctcttctttttccatcggctacgactatgaagggttgacggtggcaatggatctgaggtgaggctctacgatgcggaaagaggatgagggttggagacggctagggttttggagaaagagaccttcctatttgagaaggaagaagaagaaaataagaaaagggaaccaaaaaaaaaagtagaaggggaaaaaagaaaaaaggtaaaagaatatttgatttttatttttcaattttttttttcatatttcaaaatgatttatattatttaaataattaatattgtgtgaactattaaaagtatgtcacgtgtacactttagcaatctacttgacatttaatagaattttttaaatagaaaagtaaagaccataacaaatgtgaaattcgaagggttttaccactaaaattttgatttggaaggttaagtgttagaaaatatgcagtttgaatattttagccgccagtattcaatattcttataaaaatgagcattactatgggccaccaacgtgcctaataccattataaggtgatatcatataattagttaataatttgttacaatcttattaaagtaaaataagtgagatctaatattgtattgcatccataacaatattataattacaactcataatagtataacacaccatgataccatttccaatgggagatgtaaaaattgtgctattgtaatacccggtaaaaatatacata

SEQ ID NO: 107592 - DNA, 584 bp, Cannabis sativa
  modified_base (469)..(470): a, c, t, g, unknown or other
aaataaacccaataactaaacccaaaaaattaaacaatcttttttttaaattaaaaaaaaatatctcacccacatatctctctaacaaatcctctttccttctttttttttaacgacggtgaaggttaaccatcaatatttgaataataaagcaaaaagttgaaagctcgacagagaaaggagcaaaacattgtttcttttttccttttactcttcaatgaagctccttcttttattgatgttattatttttttaccaatttcatcgttaatattctgaattagggattctcggccaattcatattttctttctcttttaattatttctgatttttgacaaagacaaaccgattatactacccttctcttacttccttccttgaattctcaaagtcactccaatggtgaatctcatcatttacctttatttctttgtttgaaaggtatcgttttatatacatacaatanntttactgtatttgatcattttattatttctagatgttacttgtaatgtgtttcgcactctcacgccgctcctctctgtctttaaagcctgaaactgaaaaaacttgagccattg

SEQ ID NO: 107593 - DNA, 1735 bp, Cannabis sativa
  modified_base (27)..(30): a, c, t, g, unknown or other
  modified_base (557)..(569): a, c, t, g, unknown or other
  modified_base (1410)..(1422): a, c, t, g, unknown or other
  modified_base (1494)..(1497): a, c, t, g, unknown or other
  modified_base (1549)..(1551): a, c, t, g, unknown or other
aaaatagattacattgaaatggagttnnnnttagggcataaaacctaacaaagataacctaaccaacccattcaccaagactttgatagagaatgcattagaaaagcacagagagaatctaggattaattgaaatgtattgattattttatgttagtgcaagtgggagtttgttaggttttgtggcctaactaaaactttatttcaatgtaatcttgaatgttcatttatgaataaagaaacagaattatatcattacttattcaatgtattgcttggttcacatgtttgtttcatgatcatttctttgatttaaaaaatcatttaaacccttatctcattgttatcatgattattgtgttgtctgcacagtgaaaagtaatccagattatgtgattaaatataataccataatttatcagtacacaagatttccgctgatatgataatcaccaatgtagtttacttacaccttgaataagtgttatgtcctttctagggtattggtaaagtaaacttagattggatgtattgttatacatcagactggaccgatannnnnnnnnnnnnagatatcataaacttaccgtaatatctatctaagtcaatataacttagttgatctttgattaatgatcccaatcctaagatggttaggttctagttcagttgtaatatttgtgttctttcatttattcgttaaagttgactgattggatcttccctagttctcataaaaattttatcgtatctctaatgattatttaatcttaaccaagtattgtacattaaagtaaatactagaatgctatgttaatgacttagtctagaaggaactttaagtttcaaactaagataatatgtcacaacaagatatccctgaaaaataatagtaagaggttaaatgtacttctatgtatgaatttaaccagactcctactgttaagtgggagccatctaaccaaacaaggaacattaggagacaatcaagaaaattctctaaaagtgacctatatgttagatgataggagtgtatgttagaatccttatgtctacaccaactcataaccaattagagactgtggttactctaggaatggaggaattattctagaagagtgtaaatactcatctataattagagacaagtcttctgtatattcagatgaatattaataagcattaaggaattcagtatccctagatgagtaatgcatatagaaaatgatgttgcataatattttatgaacacaaaggaagtaatggtggagaaagcagttgcttaccacagacttacagttctagtaatttgggtttagtcaaatatactatacttgatctggatatcaagacaatatattgattgaaatgcactacttattttatgttgtgcaagtgggagtttgttggnnnnnnnnnnnnnaaataaaactcatttcaataaaatctgatttgttatcaatagaagattagaaatcatttatgtttacatgtnnnnttcatgtttatggtttaatgtgcaacaaatctgctaagtccagaacatatannnattcacaattacagtgatgtcagcacagtggaatgtaattgtgattatatacttcaaaagacaatgtccctaattcatcagtgcactgaagttacactgatgtgataattagcgataaagtatacttacaccttggataagtgttatgttttttccagaacattagaaaagtatgctagtttcg

SEQ ID NO: 107594 - DNA, 762 bp, Cannabis sativa
aaaggaatccttgttgatgtcccagtgacctttgatgtagggaacaatatacaatagaaaaggcagcgggaaaagcgaagaaaatttgtgtcaaaaatagggattcgatcaaagactcaagcagctgagactaaaggattgggaaccagatttgatgctcttacaggggaagtttctatgcctaatgattcaacctctgtgcagattaatgaagcggcgaactctgcggggcagggtcaccgagaacaataaattcccttatttggaacgtccaaggtcttggcaacccttggacagtgactgctctggccactcatgtgaaagattaatcctggtattgttttcctttcagaaacttcatcgaaatgtcattatatggagtcgattcgtattcgattgggttttgaggggtatttttgtgtggatgttaaaggaaaaagtggggggctggccctcctttggaaggctccttttacggttcaattaacgtcgtataacgattaccatattgatgcttggatcaaaacggaggatgatcctaattggcgcttcacaggattctatggggaccctgacccatctcaaaggagacactcttggacacttctgaaaagacttgctggaaacaacactgggccgtggctttgtggtggtgacttcaacgaaattagaggcattcatgagaaacttggcggaggagggaaacttgggtacctaatgaagaattttaatgatactatagacaagtgtgcttttcgagaa

SEQ ID NO: 107595 - DNA, 1017 bp, Cannabis sativa
  modified_base (853)..(854): a, c, t, g, unknown or other
tggactaagttgtggaagttgaaggttccttccaagatcaagcactttgtgtggaaattggctaatgaatggttgcctactaattctgctttggcacataggaaagtggctattgatccggtttgtcatcgatgttcgaaaggggtaagagagactattttccatgccatatgggggtgtcgggctaatcggggtgtttggaagcttagtggttttaaggaggctactcaaaggtttggtaaggaggatataatttctttgctcatgagaaggcccaaaggtttgagtcagaatatgtttgagttttttctggtactgtgttggcagttgtggtatattcggaatagtactaagcatgggggtagggtcccgcggcctcctgatgttgttgaatggtgtcataattatttgcaggagactcgggggccgtgtgcaggtggtagtggtcgggttgtgaaggagaaggcacgttggctgcctcctccgaatgctgaagtaaagataaatgttgatgcaggtgtgaagtgtggaggggagcattcaagtttcagctgtgttattcgggatgcgggggggcagtgtttgtttgcttcggctgctgctatgccgagggagtattctccattacatgtggagttgttggctattcaaaatggcttacaagttgggatacaacggggactacatcgctttagtattgagtcaaattgtcaagctgctgtccatttaatccatgctaaggaggatgactgtcgagacattgatggcatactaactggtattagagagttaatgttacatgtttctgttgttggtatttcttttgtgtatcgggaggccaatgaggttgccnntgctttagccaattacgctttgttgaacaaggtgagagctatgtggattggggttgttcccccttgtgcgagacttgtggtgttgctaatcctttgtaattgatttgtggtaatgaagactttattttcaaaaaaaaaaaaaatatcactagaaaaatacttc

SEQ ID NO: 107596 - DNA, 1362 bp, Cannabis sativa
ttttaacggccaaaaaagttaagggggcatgatttagtataagtcaaagttcaggagacaaaaattctaattagctttttgttaatgatatacacatagttgattcttaataaataaataaataaacaactatgaatatgtatatgttatattattagtttatccattaatataatatatattaaatatattctacaacaaaataaataattaagtgtaacatattaggtagagttacatgtattttctaactttcacaatataactaattaagtgtgtaaaggatgtcatacaacttaatcttttgaaatgcaaagctacaataaaaataggggaatttatttttatactttataatgtgtataaagttgggaatttatttttataatttataatgtgtatatataagtgatataaaataaagtacaaataatttaaaatattttggagagttatttacaaaagttgaaaaatcttgtaactagtaactagttactttttttttttatctttaattattgtatgaatgtttttgaatgttggggatgctttttaataactcccataacctccacatcatatttaagcctacttacattcaattaagtgatgataatagtcatgaggtgtaggatgttaaattttaaagtatgatcccaaacactataaataagtgtttaatatatgttcatttagataataaagtttttgataaacaagcactttttaaaaaatataaggcttgaaatttctaaaagttatttttatgaaagttcccttaacattcagatataggagaaataataagcttttgaaaaaatgtgtatacgtacattgttcaagtcatgatgatactacaagaaatatcacttttgccatcacatttttgtgctggtaaaatggaatttacttctgatgtgttgacaaaaggagttggcaaatcaatattggtattaaaacttttgccagcacaaaataaaaagtgctggcaaaaatgattttttccagcgcgtaaatacgctggtaaaagttagattttagccactgcaaatgtgcgctggtaaaactttaacctttttgccagcacagtttgctactgcactggtaccagcacaatttgctactgcgctggtaaaagtaacttttaccagcgcattttgcgaactgcgctggcaaaagtgacattttttgtaatgatccctactaatctacacttaaggttgtgaatgagtgatcttcgtgttattatatagaatagttatagggtgtgtttggaaagtcacaatgtaattggatttgtgtgtaattggaggtaattacacaatttagcatgtttgtctgaccatgtaattacattgtaac

SEQ ID NO: 107597 - DNA, 785 bp, Cannabis sativa
tcttctgctgaagaatttttgctctatgtctcgggacacacatccacacttgaatttgagcaatttcttaccctttgttggagtatttggttcgaacgaaatgctgaattccatgataaacctgcaaaatgtcctcctgctattaaagattttgcactacaatatattgccaaataccaatcagtgcatgccaaatctgatgttccttgtcctgatgttgcacctgctgctcctttcccaacttccacatctgcagcaccatcagttgatccctggaaagcaccacctcaaggtacctacaaactgaatacagatgcagcctttgacaaaactaataaaattattggaataggagctgtgttgcgagactcctcaggttttattaaggcagccttttccaagtccattcacgggtcctacaaagctgaagaaatggaggctactgcacttgtttatgctctacaatggcttcacagcattggtttatctactgattacattgaaatcgattctttgttggtagttcaaggattaaaagttgcttctcattttaattctgcttttcattctgtattaaacgatgttaactatcttgtatcctatttcccacgagcacaggtctctcatgtcaggagatctgctaatacttatgcctatgttttggctaagtttgctcttacggtggatactgattgttcttggttggaggaatttccacctccacttatgactattatgtaatttttccataaattaatataatagtccttttctcaaaaaaaaaa

SEQ ID NO: 107598 - DNA, 667 bp, Cannabis sativa
atgaataaactggctaagtttattgatgataaaggctacgtcagggcgtgtgagactaagatattgtaaggcacccaaggtgctgcggtaaagagtaatgtcctccataggttctccatcacaaagactaagtttagtagttgagcttgttggattaggacaagactttgcaccttccatatgaagacgagtgagaatgtcggtgatgtacttgctttgagtaagatacataccagtagcgtcacgataaatttctatcccaagaaaataatgaagagggcccatatcttttaaggagaattctctgttaagatcagaaattagtttagaaatcaatgatgaattaggaccggcgatcaatatgccatccacgtataccaagagatatacaagagagttgcccgagccatgtataaacagactattatcagatcgggaagcagagaatccccactgaaataaagttttttgagtcgaccattccatgcccgagggcttgttttaaaccgtatagggctttgtgtaggaggcacacatgagtgggatgagtaggatcaacaaagccttgaggttgtttcatgaacacggtttcttcaagattgccataaagaaaagcattacttacatcaagttgtttcactggccaattggatgagacagcaatgct

SEQ ID NO: 107599 - DNA, 738 bp, Cannabis sativa
tgattcaaaacatatagtaattattgataacatcttacagattttcaaaacaaaaatatgaattatttaatgcactaattaaaactaagattttgaactgaaaatgaaactaattgataaatgtacgaattttattaaatcatggataaaaagttgaaaggataatttcactaaaaattgatccacttttcattttcccaagtaattaacatacatatacattgatataaaacaaacatgcatattatatattcataacaattgctgatcgagaacaatacaacaataccatgcatatatatatgtcgtatatatacatacgtacataaattaaccaataaaactcaacaacactatcgtgtcagattaaatcatatatttataagaaatataacttatatatcaaactcaaaccgatcaatatatttataaatatatgacacaactcatctacctcaaattttccaacccaaatcaagtggttctcggtcgttattcaagcttatagcccccctatgcagccggtggccgccaccaccgtggttaatattactcatcatactagcttggtttccatgtattttcttagtcatgatcaccggaccagactctgatcggagactattaatccaatcaaacttttttggtttctttgatgatggtgatgatcttgatgaatcaatataattcttattaacaacatgaggctttgtagtaattttattgtcatttttcttg

SEQ ID NO: 107600 - DNA, 666 bp, Cannabis sativa
  modified_base (87)..(93): a, c, t, g, unknown or other
  modified_base (634)..(635): a, c, t, g, unknown or other
tttattttaattttttagtgtaaactgtaaatgaaaattgtgtggttgtgtatagtttttaagtgtaaaaaatatatatatatatannnnnnnatatatattttttttttatttgaagtgtttttacattattagtgtttgtataatttttcctgatatgcatattatatatgtttggattttttttagtgaaaattaattgaattatatagaattaatgttgattataattatttataattttatatatatagaaataaaatgaataattatttatagtttaatatataaacatatataataatatatatatttaaattatgtatttttaatttttttatatatataaaatagagatttaagtgtagctttggtggaggtgatatctaataattttgttagtcttattttcacatctattattgttggactagaaatatttttctagtctaataatgttggactaaaaaaatacccttttatgtcccaggctattatgtccaacacaaaatggactcaaaaaatttatctagtccaattttgatggacttaaaaggggatttttgttgtagaggagtcattatatttcgctgcggtcaatgtaagattttctaaaactcttatgtgtttattnnattgttttagagaattcatattcaggatgtt

SEQ ID NO: 107601 - DNA, 652 bp, Cannabis sativa
aaataacgagccacaaatcccaaagggttgcgacagcaagccaagaggctcaaaagggtcaaacacgtaattttttacgtgtgcatgtaatccatgcattcccatgcatggttgacccgatgtgagcaaggaggaggaacgtgattggtttgggttttgggttgacaaccactgaagggactccgattggccctatggctacagggcatggttgaccggacctcctgaaggttcccgtgatcaacgatagagctagggaggaggaatgactgtccttgagcctcacgactctaatcgggtctcacgacctataaatctctaaactagagctttgctccttctagctttctcccaacgtcagtcttgcaccagccaactcctccctctccaacctaggtagtactcaacgaccaccaccatacacgaccaataagtcggccccacgagtatatatatgtatatgcgtgtatatgtatatatattatattttatttattttaataattagattattaattagaaaaataaaataaaagataaaatatgagatatgttattatgtgcattatccttttattttaatatcactactacaaattatatgtacacataatttgtatatataatttagcctgtctttgagcctcacgac

SEQ ID NO: 107602 - DNA, 936 bp, Cannabis sativa
gaagtttttctaatatcatatttagacaaagggctccatgaaatttcgtagacatcaaagactataacagtactactgttcttgtttgtagtagcacatataggcatgagtggctgcgctaatctgaccactctttttctcactgcacaatatatattacactatatagctctataaacattatatacagacaaaaaatatatttgtatattttctggagaggtatgctttgttaagttataatatgcaactttataattaactgttcaaaacaaactttgacaattagtataataagggcaaatccaacactaagctaccttctaggtactttggtgcatctcattttttattttttaatataatatctttaaactgactaattagaataaaaaagaagaaaagaaaagtaacattaggagcgatgctcgacagtacagcacttcaagtatttacatttttttttttttttgagacatcaagtatttacatttgaaaagtcatttttttgtttttaacaatggatcttattttactgacagccacattcgatagcaacccattggagttgctctaaaaatgtagcactttgggagtagttagtaatttttatattatttattaagattttatttgttaacacttttaattttaggtggcgtatgggaggaataaaaatataagaataagattaaaaatggaaattggaataggaatgaaatgaaataaaatttaaaatgtataaaaaaaaattgataaaaaaattattaaatttttcaatcttgcattggaatggtctttccttctatttcaaaatggaatatagttattcaaccaaaatgatagaaatgtcattctattggaatggtattccaatagttttaaatgcaaccaaacaaatgaatggaataaaaattgtttcttttctattctatt

SEQ ID NO: 107603 - DNA, 629 bp, Cannabis sativa
atatatatataaaacttaataattattaaattaaatatataaaacttaatatttaatcacaacagtgtgataacaatataatatagttaaaggttatttaaaatgaattaatgctagtaagataatagtaatgttaacattactttatttattttaagaatttaattttacaatcttattcccttactaatataattacttttaaaaaaaataatattgataacttaagaaaggatagaattaaattataattcccttctattatattattttaaaaattattttttaattaataaataaatttaaataccatcaatattttaattattataaaaaattttacgatatatatttagtatatgaaatcgattttttatttttaattgagcaataacatatatatacattatacataaattttatgtggatgatgtacataaataacatagcgaacaaaaataaataattatgataaaatatatataaaaaaaattattttaattaataaaaatacaaaaaaataatatttattaattaataaatatatttctttaataaataattattttatttttatgtatgattaaaattaaatagatacaataaaaaaattgtttttattttaattt

SEQ ID NO: 107604 - DNA, 848 bp, Cannabis sativa
aaaaaaaaaaaaacaagaaaaaaccaaaaaaaaaaaaagaaaagaaaagaaaagaaatacatgcaaaaacctatccctccttaatgcctcaaacacaataagacatgataaaaaaattacttttacaatcacttttctagaaattatatattatcacagcaagaaatttcaaagtatatatattcaatgactaatttgtaactaatgactaactttgatcaagatcggtaactacaatgaattttttagtagtcacgccgggatggccaatgatgaataacggatcgcacgtgccttcctaaaatgtccataatcattatagaaacggactttcaacgacaattgataaatgatagtgatgatttgtaaccaacaagtaactttgaccaagatcgtttctagtcaactatagtgaatctactagtagtcatgccgagatgagcaaggatgaataacgaatcacaagtgccttcctaaaacgatcctgatcattatggaaacaaactttcaacgaagattgataacagatagtgatgatttgtaaccaaccagtaactttaaccacgatcggttctagtcaactatagtgaatccactagtagtctcgctaggatgatcggggatgaataacggatcacacatgccttcctacaacgcccctagtcattatggaaatggacttacaataacgatcaataaccaatagtgatgatttgtaaccaacgagtaactttgaccaagatcgattctagtcaactatagtgaatctactagtagtaacgacaggacgatcggggatgcataacagatcgcacataccttcctaaaatgcccccagtcattatgga

SEQ ID NO: 107605 - DNA, 909 bp, Cannabis sativa
  modified_base (720)..(720): a, c, t, g, unknown or other
aaataatatacgaaactatcggtattttccacaaagaaataacactgtacatttgtataattaaaatcaatttttcgttacccaatgtaaaattctcaaaatactataatttggagtaacttttacaaaaatattatcaaacgaaaaaatttacaaaaatactgtatttttataaaacaatagtagaacacaaaacagaacaactcaaaatactagtagaacaactaaaaaacaccagtagaacaccagtgaaaacttaacacaatatactgcagtatgaaatttataaaaaaatacagtaaaaaattaaaaaatactgcatgacaatatttttgtaaaaaaaataataaaaattagtataccatgtaaattttctactctgaatcactaacctaaatggacttccttttcaatgggctgacccaaatgtttctgatcggtgtccccatccattgggagagatataaaaagaagaaattataaattttatcggttttatacgttaaaatataaaaagaaaaataattcagtctaaatttattttataatcgtatacgtcatacttatttaatatttaagatatgttttaaaattttaaggaattagaaaagtttaatacgtcaaaaatagtattcaaaaaatctgttgcacatgcatgctttttttattttatatgcgtgtaaaatagataattattaatttctatattgtaaattattntgaattttttaaaattttacaatatgtcttaaataattgtaacgactacgaaaaaagttagactaataaattattttagatgccgaaacagttaaggattatactagtacacctattttagtagggtgtattgtaaaagtaccaatgatatataagaaaaactaaaattttaatttattattattatta

SEQ ID NO: 107606 - DNA, 723 bp, Cannabis sativa
gaggccctgtgtttgttcgtcattatcctgccctcttatctgggcttgccaaacaacttcttccaactttatgaagccatcagcttgctcaaagaaatcctccgtgttgttcattgagatcctcttgatatctttccagaagtcactcaacggtaggatgcctccgagtatggctgtatatccaccttcttctattaggcctataaccttggtggccttagccatgaactattgaatgtagtccttaaggggttcatcttgtctttgctttattttgacaagatcctcaagtcgggcatgtatttgtcttgaagcagagaactgaatatagaactcttgggagagctcttcccaagaattaaatcttcctgggccagcttgaaataccattattaggctatttttgctagagttgctggtaagattcggcattagacatctccaaatacttgtaggagatctgtttggatctcaaagtacttcaggtgtactagagggtcttcttttcttgtgtacatcttccaagccgacatcttgaattttagcaagggcaaggcattgatgtatgctgagaatggtgatccccttgccctgtccaactcgagttctgaaggttttggacaagctaagcccttttgagaatatctcatatttgatccaactatgcttgcacagaaggatgttaggttttatgccctaaataaaaccctttacaatctgatt

SEQ ID NO: 107607 - DNA, 1305 bp, Cannabis sativa
tatatatatgttttaagtttatatcagaagagcagtacgaacgaaaccctcctctctcagttcaacgaaactctcatccccctctattctttttctttgattttcaactcaaaacctagcgatttaagctctggtagtagcgggataacaaatctttgaagagggaaagcttaagttaaggtttaatttcgttttaagttagaaacaattggttttgtataggggtttcgtgaattagaatagttacagagattttgactttatagaattgttatttggtagctatgggactagtttcatcttatgaacaatgcgtgatgatttagacagtatttttattagtagcattcaacattatatttgtatcacatagacaatgttttcatcttctgcatagcttgtggccttttatggtcgctggccttttagctttagaacattacttacttttatgttccatgtgacctgtggcctttttttgaacactactttactttcatgtcctatgtggcctatggcctttttagaacactgctttatttttagcaccagggccttcatgttcgtatgtttagccataagccctctgtttttgaacactactagtatttggacttattgcgtttttatcatggattgtgtgactgaccaagtgatctttaattttggctatcttcttatggccttgacaagtaagggtctagatttactttgccaagctgaagtatgcctggacgacttagaggcagatttagtagcttatactaagcattaaaatttctctacataagttctttgtgctagttcaatgcattgtacagtatggatgcgcccaagtgaccatgcagacaagtctcttggtcacttgctattcaccaagtttcaaagactttgcatgggttttggtcttgcgagggtaccatagtgtgcatgtggaactaaaagaataactttaagaagttaatttgtgagcaagtggttcatagacactataaacaagaatataaatattgttattattcattaatttgtctttgttgttgtgcaacttgttgggaatattttaccatgatctagatttactgacaagtatgttgaattaacatcctaaatattctctaaaacaacaaaattaaacacataagggtttaagaaaaccttacattgattgcaatagaatataatgactccttccgtttatatatctaaccctcgttcctttctgttccagagtattatcaaaatctaagcctggatctctttctctcattcgagtttggttaccaccgtcttactcactatgat

SEQ ID NO: 107608 - DNA, 1434 bp, Cannabis sativa
cttatgaagggcagatgggagttgttgatgttattaaatttattgctgatcatggaaataactgtgtttgattgatatatttcctggacagatttgctatatattgtttaattggataagtttatactttataatatgaccaattactttcattagagtacgtagtttatatatattttaatttttgttttttttttaatttgtatttattcgtaagggaaaaatagcagaattttttcattttttttctcttttttttacaacaaaacgactagcgaaaaccgtcgttgaaaaatacaaaatttataattaaattgataatgtgactataggtgacagtttaaaaccgtgcttatgatataggtgacggtttaaaactgtggcctatagtattttctcgacagtttaaaactgttgtctattctacccagtatccgcgacactcgtataggtgacagttttatggactgtcgggaattctttggccgacagtgtaaaaccgacggtggcgcgtacactgtgtctggacacagtgtaggtggcgcctccgtctatcttaattaagacaagggatttgtcttttctcctcagaacttttaacttttaccaatttatttaattaattaatttgaaaaataattatttattacaaaataaataattgttatttcgacatttcaaaatagatttttttgaacttccatacacaacttttttccctccgcttaacaatgtttgaaggtgtcgattcagagaccatggacctataattctaagctccaataaactagattatttattgaatctcaccaacaaaataatcctatttattaattccatgatcactccattataaatatgaaattgaacttgtagtaattataaaattatttattgagttttactagagtttctattaatataatttattctagtgattagccctccttgtgttggttcgtaattaattttggtcaaattactattttacccttataattacttttttatcctatagtgcaattaatttactagtgaaagtataatttgaatccaatctaaatttgtgcacaagttttcagttctagaattaacacttaaagggaggcaattcaatctgttaggaaagtcaagattccataattgtagatcatgttcctagccatccatattattagattcttaaaacaatagttgtaaccatcatcttcactggaaaaactttaaaaagcgaatcaaagaaactaataacatgaacaaaattacctaggatttagaccaatctaccattgatcatcattatgatatgaatcaagtctttatagtaaacgacataattgataaagatagcttaattatatattagtccttatcatatatcatctttattatatacaacaccttaactaagaaatccattgttagtttaaacaa

SEQ ID NO: 107609 - DNA, 871 bp, Cannabis sativa
cgagacatgcaatttatatatgttttacctgggtgggaaggctcagcagctgatggtagagtactccgcgatgctttacttaggaatcatggtttgcatgttccaaatggtatgtttagttgttcataggatgtcatataagtattatttataacaacttcaatgagaagtttatttatgttgtttataattatataggtaattattatcttgtggatgctggttatacaaattgcaaggggtttcttgctccttttcgtggacaatgttaccatcttagtcattggaaggagggtcatcaaccaaagaatccaaaagaattttttaatatgaagcattccgcggcaagaaatgtgattgaaagatgctttggtgtcttaaaaaatcgttgggccatccttagaagtccttcattttactccataaaaactcaaactcgaattattatggcatgttgtctattacataattttattaggagagaaatgcctaatgatcctttcaatacaatatcgcaagagccacaatcaaatgaatcaagtaactattgaggatgatagtagtggaataactagaatagaaccttctgatgaatggagtacttggagaatgaacttagcagagcaaatgtataatgagtggagaaatcgtaggcatgcaaattaggatgtaaaataacataatgtttgtttgttactattattagatgacttgcttttaagttgtagttttggattttgattggataatatgttacaaatttataaatattttaatatatgaagtttatgactatgtttataaagtttggtattattattattgttattattatcggatggcttgttatcaagatgtaattttaaattat

SEQ ID NO: 107610 - DNA, 1369 bp, Cannabis sativa
ggtattcagattattagaaaccagaagaacagatcccttgctctctctcaaataacttatattgataaggttttagagagattctcaatgacaagtaccaaaggggcagaaatgccttctagattatgtatctatctatataagaaacagtgtcccactgatcctcaagtgttagagtacatgagaagggttccttatacttcagcagttgggagtctaatgtatgccacaacaaccacaggcaagggagtgggaagaaaggaaaattcgcttgtaaatttgaacaagctcccctggagaatcaagcaaagtacactgcgttcactatcttgactgaagacacagacagtatttacatggcaaattagtcgctggcccattataagaagcccgggcccatgaagaaagatattagcaagaaggacataacaaagttttgttgattccatggagactatggccatggcactaatgaatgcaacaacctgaagcaggaaattgaattcctgataaggaaaaacaactcacacttgcataagtatttcaagaccgatcagggtcagaggaatgacaataaccaagagttactaccttcaccggtagatggacatctgtaagtcatcattggaggcccgcatattgctggagattcaggcgaagctcgggagaggtttgcccgaacagcgcagcacgaataagaagaagttatcctagccgtggaagaaagaagcccaaagttccacgagcaggagagcctaccataactttcaacgatgaagacgctgtcaaaattaaatttctgcacaaggactcgctggtcgtggaagtccagatagccaataaaatggttagatgttccactcatgcatgatattagtgccatgactatcatggcacagttcctgatattagatgttccttcagcttttcacgtaatattacgtcggccggccttgtatgacttaaaggctgacacatcagtactccactcatgcttgaagtttccaacaaagaatggggtagggtgtctaagaggaaaccagcagtcttctcgggaatgttataaccttgcagtggccaaagctaagaaggaagtatcctctaggcagagcacaaacaagggaaaaaactttcccaagtagggaacttcccaaggcggggatgaagatttggatcctcgacttggggacccaagcagcaatgttggaccagtggaagagttagaagagatcaagatcgatccagatatcccgaccagaaagctaaaaattggaaaacgcttgagcgacataccaaagattggtaaaaaaatgtttgaagaccagatcagacaaaatatggaagaatacgtggatgatatgctcgtcaa

SEQ ID NO: 107611 - DNA, 1010 bp, Cannabis sativa
  modified_base (54)..(55): a, c, t, g, unknown or other
  modified_base (962)..(963): a, c, t, g, unknown or other
ggacaaaacccgtagtcggtgtctgacgcagacacaaacttggacccgcactcnngacccgaacttggacctagactcgaacctagataccgatcggggtccagacctggacaaaaacccatacacagactcggatgcgaactcaagcaccaaggacttagatccaaaactagatccagacttagatcgggattggaattttgaactcggacccaacctgaccaagacccaggacgcgaacccacacctgaagcctgatctggacctagactgaaatctgaacccgaacaaaaactcaaaccaggactcaaactccaacctaaacaaaaagcaaaactcgaactcagaatcacaaatggaactagaactgaactaggcgtaggaccaggaccaggacaaggacctaaacccaaacccgaacccagataaaaattagacagagacctaaacccgaacctgacaaggactcgaaaccgaacctagatagggacccaaacccacacaataaccgggaacttgacccagaatcatgataggtacctggggaaaagaactaggattgggacctagtacctgacccagacccgaacttgaacctgggacccagctcgtgacccggtaccaaaaatggaaccaaactgggacccgagatttggatctggatctggacccagggcttggacaaaacctgtagtgggtgtttagatttgggacccagcctgggacccgaaccctgacaaggacccaaacccacactcagacttgaacccagtcccaaacctaaaagttgcccgaacccgtaccctctgaccaaaaattgggacaaaaactggaagttgaccgggactagaactaggacatgtacttagaatcataacttaaattggacctagacgaagaacggtaaccggactaggactcgaactgcaaatcagacctagacccaaattgggagccagacnnggatcccaacccaaacctggacacgggacccgaacccgaacctgaac

SEQ ID NO: 107612 - DNA, 703 bp, Cannabis sativa
  modified_base (267)..(268): a, c, t, g, unknown or other
taattttaattaattactaaacaacaatccttcccttcatcaaacatggcatcttggcatcctgtaaatcacaacactcgtattaatgttattattacaattctcgtagcatccagtacacttgaaaagaacagaagcattttctgtttcagtaaagctaagttttccattaaatctgtatgcaatgttctcttccaccaagcaattgaaaagtacaggttcaccaaacatacacaaatttttaaaaatcaaatcaatcttggatgnnggcttatatccgaccaatctgttagtacttcactaaacattttctattttcagcatgtatacctacacttcaaagagtaagtgtgggcttcggggttgtaaattgatgtaactttgacagtaggagttcaagattgtgagtacttgaaaaattatttcatgaaaaatcagaccaattggaaaccatggtgaaggagagaaaaaaaaacaagataaaaacaaaccagtgtaagaaattggcgaaatctgcatcgatggcatcacgcatggcagcaaaaaagtcctcacaagtaacaggttgcccattatgtctcttgaaataaagatccatcccctaaataaaaaggatataaataaaaccttccataatgcatcttcctaattcccatatgaagcaaatatattgtcattaatacaagtatttattaaggcaaac

SEQ ID NO: 107613 - DNA, 1133 bp, Cannabis sativa
  modified_base (435)..(440): a, c, t, g, unknown or other
attttaaagtacttaactacaacccttgtgggattgacctcactctttgtgagtctattacttatttacgatacgtatacttgcatgttgaaattaccacaacaatcttagttattgtgaaaaactagacgtacagttgaaatggaatcagagtcggataagcagaacccaacgcaccagttcatttatcaacttgggcgctgagcactcattttagagcttctgggatgtcattataaaggattttgaacttgaggacgaggtctcctactccatttttgatcattttggattgaatggtcgaatcaaatttggcatttgaatgatcaaaaccaatgcaataggataatcgtcaacctaggcactaggcctagcaccaagtcaacttgggtgttgggctttgcttccaaggcctcgggtttgtggttttctccnnnnnnttgcttgaatcttcattatttctgatgacaaaaaaaaaaaaaaaatacctggaatgctttttcgagaacttgattggaaatagccctagttgacaatatgtcaaactaggcgctaggcctagtgacatgtgtcacctgggcgttgggtcccctttatggcccttcaaaagttctattttgtcccaaaaatagttgaatcttaatctttgctaaaaatagagaagatgttcgaaagaatccccaaaaaatatcattagaatcaacccaggttggcaaaatgtcaacctgggtgctaagccagccccaagtgtcaacctgggcgctgggccttgcttctagcacccaggaagtattgtttcttccgcaaaagtacctatctttccatttttgatgaagataaagaatatgcaaaagtcagatcgtggtggatctaatacttggaaggcacccagattgacaaactgtcaacctgggtgctgggtgctcgggcaccgagtgccccaggtgctcaaaaatagactttctctgaatctgattttgatgtctcaaatatgcatgtggtatatctagttcatgtcacaatgcaaagtttgacccatttgcactaagatggtcccgaaaaccaaaacgctcattaaggatgtcaacctgggcactagtgaaaccctgagtgcccaggttgacttccagggt

SEQ ID NO: 107614 - DNA, 782 bp, Cannabis sativa
gggagaggcactgattcatgggttgaaattcatcttgatcgagctcttgtttgttctaactggttccagaggtttcgtatggctcagctgcataatctagaagtatctgcttcagatcattgcctgatgcttcttgaaccgacggtgcgttctgtgacggtgccatttcgtcaattctattttgaaaatgcctggcttcgtgaaccgctgtgcggccaggttgttaaagatagttgggacctttgtgaaggtcagcatgttatgaagaaaatctcttattgtggggaatctcttcaagcgtgggggtgagattatacaggcaattttaagcaaagaattagccattgcaagtggaaaatccagtattggaagaaggggcatgacgctatatccattcagaagttctgtgaggctgagctgaatcttagtgaagttatgaaccaacgccaacgctctaaacagttgtggcttcaagaaggtgatactaacagtaagtgctttcatgctaaagttacttctagaaagaaacaaaatactataactcagcttatgaatgatgtgggtcactgggttacatgggaggatgtgttgcggaatgttatggttgattatttcaaaaacttatttacttcaaatgtggctgattactcaactgtggtagaggagattacttcttcaattactctggatcataatttgtctttacttaggctaattttggaggaagaagttagaagagctctgtttagtatgtgttagaaatattttaccaagatctagat

SEQ ID NO: 107615 - DNA, 1666 bp, Cannabis sativa
tcgtttagtaggaaacatcatactgaaaacatcatacctactcactaaacatcatttgtattaacacattattagtaaactaaacatcatacctactcatttaacacgttttcttttctttttagatgatgcacaatcaacccatatcccttcactaacatcgcttctaatgtattcatcatcatcatcttcatatgtatcattgagttcatcgacttgttcgtgtatccgttgatgatcaacaaaactatcatgacataaatcaacattttcttcttcattttcgttatctaaatgttgtcgctctggtgtccgtaaaacaactgaccatttagaatcaatgggatcagttatgtaaaatacttgtttcgcttgggtagccatgataaaaggatcgttcttgctacctcttttgcttaaatcaaccaaagtgaaaccaagttcgtctgttctaactccgcctttattctccacccaagagcatttaagaagtggaattcgaagcaatccataatcaagctcccaaatttcatcaacaaccccgtaatatgtcatagtggattgcaccgggtttctgtcctttgttgatgcaaaatgcattgcttctgcaacaatacttactccactattttgaaccgttcgagcatcatctctttcctttgtatgaaatcttttcccccccacaatgtaagcatgatgctttactacttgagtatctggtccaaacgatatgtattctaactctttcgacacaccatgatcaatagctagaatggtattctttaaccatccaataaatgttttacgatgctcctctagtacccatctctgtttattcttgaccttagttggaatcattgattgtaataattccaagtgatcactgaaacgatatagtataagtcatatcaaatttcatttgaagtagaagaatataaagtataaagttgaatagaaaatacataacttacgttatatatggttggacttcagggttattctcaagcacaagcaaatgagcttgatccaattccgatctagatacagtcaccattgatcctttccctcgtaatcctctatcaaccccgtttgaatgatttcgtggcttgctaagtccgattgcatcaactcctgctatgtactccgtgcaaaattccactgcctcctctgatatataacactcaaccatacaagcttcaggccgattgtgattacgcacgtaacctttcaataccttcatatttcgttcaaatggatacatccatctcgcccaaactggcccacacaacttcgcttctcttactagatggaccatcaaatgtatcatgatgtcaaagaatgatggagggaaatatttttcaagattgcatagagttttaactatgtcatcatgcaatgaattcaatttcttcatttctaattctttcccacacaattgattaaagaatatgcaaacctttgtcaaagtttgtcgaacttttttaggtaagactgatcgaatggcaattggaagtaattgttgcattaacgtgtgacaatcatgcgatttcatacccattaactttaattcttccatacacactaagtttcgaacgttagatgaatacccatcaggcactttcatctttgcaaatgagttgcatacggcttgtttctcttctttaga

SEQ ID NO: 107616 - DNA, 591 bp, Cannabis sativa
ggttttgactcttgaaagtaatagtcgtttctcgtgcaaatctgtctaccttacccaagccatgaaaagggctcatctctgtgaggttgctccgttgctctagaataaactttggaatagtaaaattttgaagcgccataaggttttgtggtggtgtatcttgtctagtgctctgccagctcggtctgtgatcagaaaaagggaagaatctttagaacacttatgtttaccctgcgatgtggcttttcatgcttggcggtcctctccttgggggtattttatcctgtttgtgacaccagtattcgcatgtgagactgggtcaaattcattcggggaccttaaacacagcagaattgctgctgctgaggaggttttcctttatgcatcgattgttgttgacaccatctggcgaattcgcaatgacaatgtacataataattacagtagatgtgaagaagtgtattgactctatttgtacttcttttgcaaatttacatgcttctttttcccttcccctgctacgtgtctgaaggaggtttggactcctccccctcaggattggattaagttgaattgtgatgttaaagtggg

SEQ ID NO: 107617 - DNA, 1187 bp, Cannabis sativa
tccaatctggttctcaaacataccatttacaagttgttggtacgttactccagcatttttaatccaaatggcatgactttataataatagagtcccaaatttgttacaaagcttgtatgctcttgatcagggacatgcattttaatcttgttatatcaagaatatgcatccacaaaattcatcaactcgtgtcctactgttgcatccactaactggtcgatcctgggtagtgggaaacaatctttgggacatgccttatttaaatctaaaaaatctataaaagtcctccaggtgccatttggtattgggacaagaactggatttgagatcaatgagggataaaacgcctagcagataaaatcattagttaacaatttatcaacttcttctttgagttcaccttgtctttcggaatctaacagtcatcgcttttgtcatttttctggataattggggtcgattatcagatgatggcagattatctttggatttattcccatcatatatgagtgactctaagagaactgatcctgatttgcttttagaaaaataattaattgctattttaattcttcctccaagtttttcccaatgtaaacacattttttggggttgtttggatctaaaataacttcttccaactcttcaattggtttgagctggttattttcatcttgaattcttgggtccaagtcctcttattcccactcgttttcttcaattaggattaccattagttgatgattggctctcctattctaaagttctatttgataacactctcaagccaataactggtcgcctctgactactcctacttctacctgggttggaaattttagggacaagtatctgactgaacttactgctctcaatccaattagtgctaggcaacccattaatacattgtatactgatggaatatcaacaactaagaactcctgcatttgtgttgttcattagggtggctctcccatagtcaatggatgctcgatgatgcctaggctggcaacgctgtcgcctgcaaatccaaatgttaacacagattttcgttaacaaaatttgagcctcacagtagtaatttcacacagaaaaataaaaactccagaataaagatatgaacacatggttttttttacgtggttttgcagttaaaattttacatatagtccacgagtcaatcttat

SEQ ID NO: 107618 - DNA, 1638 bp, Cannabis sativa
gagctagagtaagtgagagagggggagcttcatcatccaactcgcctaggggtcgctccaatgttgatagagcaagatttgtgaatatggagccccaagagcgattttttgcaattgaaagatagacccttcattgaagatagggggatagatattggtaacccgagccaagctagaaacatacctgctgtatttgcgcccatcagagagcaaatcatgaatacgcgttggactaagtttgtggatgtcactgagcgcaacaaccaaaccttagctttagaattcttggccaattggctagaaagagaggatgataaggtcaaagttagggggttagagtactagtttccacagccgccatccatgctgtctatgacttaccgaccttcaccccaaaagaacaacaactaaagtagcaaattcgagcaaaagcttgaattatgaggacatagctgaaaccctaggttatccaggccttaggtttcatgaatatgatggagaaccgtatcagctgtttcggtgtgaattcaacccgaacaaggcatggctatacttttttagtgcaaggttggtcccaaacaaacattattttgatgctcagatcgacaggcttagatttgtttatgccatcatgaagggttataacctgaatgtgggggacatagttagagtgacttttgatatgatggtagagggtgcttgtggaggtggacttgggcttgcagatattattaccaccttgtgtgaggcacatggagtaccgcagtactcctatgacacgaaagcagcgccacaacgcagtatcaccatgtccacggtgcttcgattcaaaccaccgcaccctcatggtcaaccgccagctcagagagatactcctatggaagaacaagaagagcatgaggacattgtaccgccacgtattgctgggcctctcgacccagccatgcaatatacacatgatcagctgaattatctgattcagcagaacatgcacatgcaaaactacatggcccaaaggagtgtttttgatgaacatcaggtggcccagttgaacacgataatcacgaggatgaatgtcggtgtggacgaacccaactactttgccatgccaccccgctttaacccctatgatcagccacctccgccaaaccccttctaagggagctcaggtaagtttctctcaacacagttttattttcacacattgggggcaatgtgcatctttagtttggggggagagacttaatttttttcagtttatttcagttctatttgttttgattttagttagtttttagttagttttttttaaagtgtcgtgtgttgatagctaagttggaagattgattgaaccactgttattcacttgtgcaatggattaaaatcttaactgtatgcttgactcataactttttgaattaaattggacgtgtattaaaaggttgttcatttagatgtaaagcatttatttttgacacgtatcacttttgttctatttggattatggaatgttggcttgacatggaatagaatttgtttgacatactctcttgaagcgaaatccttgatgctttttgtttggaaagtgatttaggcaacaggtaactggttgcgtgagtatactacttgattgcgtgc

SEQ ID NO: 107619 - DNA, 539 bp, Cannabis sativa
aagtgttcctttggagtctccttaggaaagtttctgggattcgtagtcaacgcgaggggcattgaggtgaatcctgaaaaaattaaggcatagatagaaaggccatcgcccacaaagccaaaaaagtccaggccttaactggaagaatggcagctctaaaccgattcatctcaaaatcaacggacaagtgtttaccattcttcaatgtgttgcgaggtaacaaaaagtttgaatggacaaacgagtgtgaggaagccttcgcaaacataaagaaacatctatcgacaccaccagttttggccaacccagtaagtggagagacgttactcctctacttggctatctcagagaatgcgattatttcttagaaaaaataaaaaaaaaaatatatacataaatttgaaaagattatgaaaataaaattaaaataagcattaaaattaacataaaataatgtaagaaaaagatttaaaagaaatattaagagtaatttttaaaaattatttcagtttagattttttttaataatagagtattta

SEQ ID NO: 107620 - DNA, 745 bp, Cannabis sativa
attttctaggacggtgagaagtttcttcatgtggtgtttcaactttctgtgcgttgtcagccatgaaaaggatttttttttttgtatgtaaggagggtttttcttgaggaaggctcttaatgaaagcaccaaaactgttaatgcagatttttgttaaccagatatgagcctaaatagtgataaacttgcacagaaaaacaagaacagtaaagaaaaaagtatgaacacgaaggttttttacgtattttgcaattaaaattctgcatagttgacgagtcaatcttattagatttctgatactgtttcagagccttttctcttctgaatatttcgtccccttttttattctaacttgcctctatttataattacatagtcaggaagttaattacatagttgactgatatcttacaacaattatccactgaaatcgtgcggtttgattacataccacgtaaaataaatgcggttaatatttgaatatcacacagctgtgattggtccgcttttaccgggtcaaggtaatcgtgtattaaacacgttgtttaatcataacgtttagggatgcctcattgggaacatgataataatagccttggtagcgagctagaacttttcccacatctttccgaggttgataatgtaaacttcgtcgtttctacgcttgaagacataacaccccatttgacgatcgtagttcttggcgacgagatgaccttcatcagtcagcatcatttgaatgtca

SEQ ID NO: 107621 - DNA, 589 bp, Cannabis sativa
  modified_base (525)..(535): a, c, t, g, unknown or other
tattgattatataagaaaaatataagttaattattaaattattagagtgtctattttaatactaatagactgcaataatattttatattaaagtaaatgatttaaaattttatgataaatgatattaaattgagatttttttatatattttaacagtgttataactgtcaccatcaactatcattatggctattgtcgctgccaatccccatatatccaagttagtattgccacgatattttgtatcatctaccatatatactatttggtattaaatgattatattagaaatttaataaaaaaaataccaactttaaaagtgttgtttttttttcttcaaatattactacacataaagtatataacaaaatttatacataatacaaataattagtttgtttataaaagactaaataatgaagaatcaatcactatgagattattattattattattttattttattacattctcataatattttactaaaagaaaatctcattctaaaataataataataataannnnnnnnnnnataataataataataatagtgcaagttataaaaaaaaagacactattaatttta

SEQ ID NO: 107622 - DNA, 678 bp, Cannabis sativa
ttattattaaaatttgaatgatcttattttgatattaaaatattaataatattagaaataatctagtttgaatttcaaaatttactaaccatatattttttaaaaaatctgttatttttgaaaatattttattaaattaaattataagattcgcaaaatgttagttttgacattttatcttattagatatttttttaattaaaattaattttggcaaaaaccaacatgaaatttttaaaatgtgttaatttatgtttgatagaaatcttagggtttctaaccataaaattttcaaatttatgatattttattatattattttttaataaaattgataatatcctaactataaaatatcttattttttaaattctttattttcttaatatttaatttattaaattataagattaagaatataatataaggaatatctaaattttaagattcaagatattatattatattatcttattagatatttaattaatttaaattttaaataaacttgaaaatttaaaaatgggttagatatttgaatttaagttagaatttaggatatataggagatttgttgtttttttttctgaatttttttcaaatattctctaacaacctaaatttcaaattctagttaagatatattttaaattttaaattttaaaatagaaatatctt

SEQ ID NO: 107623 - DNA, 1082 bp, Cannabis sativa
gtgtttattttcattgttttaggattcatattaggatgttaatcaaacatacttggtagtaattctagatcctgctaaaatatttccaacaaaatttacctgaacaactctaaatatttctggtgcatacctatctcgatttcctaggcttgcctcttctactttactattcctccataatactttgattagtgcaattgtcttgtttctcaagactttctctcttctgtctaacacatgcaccgattgttcctcatatgaaagatctggccggagttccaatgcttcataactcagtatatgggacagatctgatacgtatttctgaagcattgaaacataaaacacagtatgtacagctaccattgcttgaggcatagccaacatgtacgctacttgccctatcctttcaaggatctcaaaaggtccaatcaaccttgggctaagcttccctttctaaccaaagcattcaatacctttcataggagatattcgaagaaatagcatagcttcaacttgcaaatcaatatcccgtcgctttggatccgcatagctcttctgtctactctgagctgcgagtatccatgctcttatcttatcaactgcctcacttgtcctttgaatagcttcgggacccaagaactttctttcacctacttcatcccagtgaataggtgatctcctttttcttccataaagtagttaatcaggagccatctcgacaattgttgcctgataactattgttgtacgagaacttgatcagggaaaagtactttacccgtgatccttcaaagtctaatacacatgctcgtagcatgtattctaggatttgaatggtccttttgaactgtccatctgtctgaggatggaatgatgcactaaatttcagttgagtacccatggctcgatgtaagatctcctagaatattgatgtgaacttcggatccctatcagaaacaatggactttgggacaccatgaagacgaactatttctctaacatgtagttctacatactgatcaatggagaaatttttccacacaggtaaaaagtgcactgactttgtaaacctgtcaacta

SEQ ID NO: 107624 - DNA, 520 bp, Cannabis sativa
agtttcatactatatttgtattatcttatatcaacacataatatagtactataaattttttttacatttaattacaaaaagtaaaaaaaaaattgaaattaattataaattatctttcttatattgtaactaaaatatctgtgactaaaagtattaattacaaaattatattttgttataactaaatgtatttttaatcacaatgcttaatataactaaaataaaattagtgacaatttaaatattatattttagtcacaagtaactttttgttgtgactaaaaattaatttaattacaaaaaatttatattacgattaaaatattatttttagtaattactttttgtaatcacagtaaacattttcatgtatatttttctaataatcagtggcaataatatattaaatacatatataaaataagtccttatcaaccattatagcggatacgacaagtaaagatttaaattttgtcaactacataaatatagattaataaatattaattatatgttttat

SEQ ID NO: 107625 - DNA, 822 bp, Cannabis sativa
ctacaaaatctattaaggcctaaccattaatcgatgttcggggttgaaagataatctcatattcgcccaactccactgcccatttgagtaaccgtctacaggcatctcgtttttgcaatatttgacgtcacagtttgtcagtgtatacccgaacaggatgagcttgaaagtagggccttagctttctcgtgtctataattaggcaataagtgagctcttctatcagtggataccagccatcaggctcaatgagtcttttactaatgtaatacgccgggtgttggatattattttcctctctgatcaatacggcacttaaagcatgttccgtgacagcaaggtatatcccaagttcttctccgtccagaggttttgagagcacgagagattttgcgagttgcgtttttagcttttgaaaagccttttcacattcctgcgtccactcaaattgcttatttcctcgcagaatgttggagaacggaacacacttgtctgttgattttgaaacaaatctgctgagtgtggcaatccgaccagtcaaactttgaaattccttggttcttgttggctatttcatatccatgagggcttgaatcttctctagattggcttcaattcctcggacattgacgaagaagcctagaaacttacccgagctgactctgaaggagcactttaggggattgagtttcatgttgtacttcccgaggactttgaagcatttgtctagagatcatctatatgcccccagccttcctagatttgatgagcatgtcatccacttacacttccatgctctgtccgatctggtctttaaacatg

SEQ ID NO: 107626 - DNA, 537 bp, Cannabis sativa
ttgagatctttcattacttaaaacaaaaaaaacaaggtcaagatgggggatctttgtcctattgctctttgtaatgttctttgtaaggtcatcatgaaagttttggctaatcgtcttaagggattcctttccaatggcatatctgatgctcaaaatgcttttatttctggtagaataattttggacaacattttcatcttttttaagatctttcattacttaaatcgaaagaaataaggtcaagatgggtatatggctttgaagctagatatgagtcaagcctatgatcgtattaaatgagagtttcttcaagcaattttgacaaagatgggttttgatagacattaggtgatgtacattataggatgtgtttcaattgttcagtaccagattggccatggtggtcaaatcttggtcctattatccctacacgtggtattcgacaaggagatcctctctctctctctctctcagctcttttgggaaaaatttcaggaacgggaacgttcggcaacggagcaccttcatcatcgaatt

SEQ ID NO: 107627 - DNA, 892 bp, Cannabis sativa
aatcagaggagaacctaaaacattaaggggaaaaaattgaaacacaaaacaacaaacaaaaaacaaaataacaagaaaaaaacaaaaaaaaaaattgaaaaacaacagaacccaacttacatccttgacagatttcgaagattcggttctctttgccttacgagattcaatcttatttggaagaggtctttttttagaaccagatggctctgcaacatcacccattcccttcttcgtgaagcatttcaaacccattttaggatcaactttagaggatttcgaaggaggtttcttagtattttttgaaactttttcagctggtgaaggggacttggaacccaacctagtggtggccatttatagaaaaagaaaagaaactataagaggaaaaaagaaatgaagttatggaagaaaggggagatcgtgacatagatgggaggttgaaatttgtgggttagggcttcacatgtgatgatcgtgggttatggaaaaagaacaagaaaaaaaactaacagcaaataaaagaaaaattcaaaagaataatgaaagagaagaagatggtagggatggcgtgtaatatgtgagaaaacccatgacataggcatgcataggtatttttgtaattatcaaacttttgaaaatataatattgaataacaaattttttataaatatttaaataaccaaataaagacaaaaatgtaataaaaaatggcaaaatggggcaccaactgtaaaaatctcaaatatatatgggtgcacttttaatgggtattacccatgagtgggtaaaattaaaattttttgagtttttatgcttaattttctatcaagaaattttatttacatcccaaatttctatagacacccattttaataatttttatttcata

SEQ ID NO: 107628 - DNA, 1280 bp, Cannabis sativa
tagaagataaatctttatctgaaattgtaaatatgataaaagagaagaagaaggatgttttggacaacaactacatcaaaaaatctattgatatttgtgagactaaactagctaaccgtgataatccaaaaattaaggctacaggagcactcatggcattgactgattggaggaatttggggttagtttcggatgagttcggatcaggatggaatgttgaaaacgtgacatcgttgccgtgggactgttttgggtcagtagatttgtgcacctttttgcctgctccaaaatctgatccttccttaaaaggtggagttgggatattggtctctcttccgaggctagccatgcccaagttcaagcaagagattgatactcttaactaattaactattgtacttaatttgaatattgatttatttattaaatattgtttggttttcccatttgaagagcgaattatatacagctttactccttcattacaatttacatttgcaagataaattaatataactactttggtgaatatcaaatatttcgattacataaaagaatataaagtgaatttgtaaaaattaaatgaagtttggtagtgctgtgtttctagtttaattataattattttttttttttcaaaaaaagattgaaaaatttatatatataattgggtctgggccaacttttatataagtcccatgtcataaatattcttcagacaaaaaaagtgaagtcatcattcaatcataatactcttagagcactctcatcgtcaacttgctttataatatctaaaataataaaaaaaaatagaaaaataattaaaagtcttaaaatctatatgtggacgaaaacttataaaaatactaacttttggtattataaagaaacttttttttttttgaatgaaaagatccaaaagagttacaaagggagaggataagggtcttggctattccaacaccatgtgttatctaatcctaatgacatttgtgccaaattatgagctcctgtattcccttgtcttcgaatatggtgaagggacacagtgggaagcaaaaataacacccgtcgaatagcattaattatggctccatagcttgagagaatatcgtcagatgattgtagatcagtgagaaggtttttacagtccacttcgacatagttaatgttaattccattctcaaagctctatctaagtccttctaacaaagcccatccttcaactgctttgggttgcatctatcccgtacgactgaaggccctcgctgcaattactc

SEQ ID NO: 107629 - DNA, 713 bp, Cannabis sativa
  modified_base (589)..(593): a, c, t, g, unknown or other
aaaaaaaattaagacgccaaaaacagagttcaaatagcgtgttgcactcgtgactattttattttatacgagtgtgaaatagatttttaaatgctactttctatattgtaaattatttcgaatttttcaaaattttgtaagatatcttaaataactataacatatatatacatataaaaaagatgaaaaaattattctgaatgacaaaataggtaagtggtgcatcaatgtatctattttaaagagtgagtgaattgtaaaagcatccaatattatttcccttactattatcctaattttaatctattagaaaattcaacgatatactctcttgaaatgggtacatcgatgcatccttatctgtctcggtatctaaaaaatatttaatctaatttttttttctagtcgtatacgttgtaattatttaagacatttgaaatttttttaaaaaatctacaaatatttaacacattgaaaacatggttcaaaaagtctgttgtatgcacggctttttgttttatatgcgtatgaaatagatagattgaatattaatttctatatggtaaattattccgaatttttcaaaatnnnnnaaaatgtcttaaataactataacatatacaactataaaataatttaaactaaaaaattcttataaatatcgaaatagctagagttattataatggacccatttgaatagggtacattgta

SEQ ID NO: 107630 - DNA, 935 bp, Cannabis sativa
cccaaacccgaacccagacactaaatcgaaatcgaaactaggactaggacccaaacccgaacatggacccagaccgagacctaggactcggaccttgaattgggccttggaaacctgtcgtagatcagaactcaggactcagacccatacctggagctggacttaaaccgagatttggacccaagccaagatcggaactctgacccagactcgaaccaagacttgaaccccgatcgggtcctggactcagaccgggacctaggactcgaacctggattggggacttggacctaggacacgggcatcagaattgggactgagacccagaatccgaccccaaagccggaccaggacctgggaaccgaagtggaactagactgagacccgagagcgtgatccacacccgtagtcaatgtttgcatctaggacccatacccggacttaaacccaaacccaaactcggagtcagacctagaccaagacccgtaccccaaacttgggtccgagtgcgagtctgggtttgagtttgagaataggaatttgactacgacctagacccaaacccggattgggacgcggacttaaatcaaaactctcatcgggactcgggacacgaacgcgaacggagacacagacttggacctcaaacccagaccgggattagagactgaaacctagacccatgacccagacctagattggggaccaaaactcaaaattagaacaacaattaggacccaggactgggactgggacccaagacctaaccccggtctcgatcccagacctggacccggacacggacacggaccgggacctaagatcccaattaaaattagactgggacccaagatggcgatctgaatcttgaccaacgacctggggctcggaaccaacccgtaggcggtgtctggatcttggaatcataccaagac

SEQ ID NO: 107631 - DNA, 779 bp, Cannabis sativa
ggggtagtttaggaaaattggtaaaatggtcatatgtactcttatctgatatactcctaatgaggagtactaaggagactctctatcccactctctcttttgcactctctatttgatgtaataaatgtcaaattttgagtaaagtttgtttttgtttaaaatattatgatattctaatgttattacaattatgtcattcgaacaaaattattttataataactagttatttattataatctatatacttcattaactttttatttttacttatatatatttggaagaaaaaaaaataaccatatttaaaaattataaaagtataatacatatatttaaattatacatagattaattgcaagattttttttttttaaaaaataaaaactataataaatttaatgtatacaaaagttaatataattaaaaaaaatcattgaattaaaactattattattaatctgtttgtactattttatattttattaattcttttattatatagtactatttttttttcagattgatcactctatttttaagttgtttttcttttttcttatacaagtgaaaattcactccacttctaatacaatatttttcaaatatttttttatttaatatagcataaaatgaggttcaataaattaatatactattgttaaaaaaaaaattaatatcctaggtaaacgatgtatttttttttttttaaaaaaaggtcaatgatagaaaaaaaaaattattatttatcttatatgtatacctatttttactatatat

SEQ ID NO: 107632 - DNA, 867 bp, Cannabis sativa
  modified_base (689)..(694): a, c, t, g, unknown or other
ttgttttagtatgattgttgaaatactcttttcgtcattaagaactatgattgtcaaaatgaagtattatgccttcaagcaaaaaaaaaaaaaacacaacgaggcgtacatcatcaacctcagaaagataggagaaaaactccagctcgctatcaagatcattgatactgagttcctaccaagacatcccagaatgctatgatttaagacgtgtttaaatacacgatcattttgacccagtaaaaacgggtaagtcacagttgtgtgatattcaaaataataactgcatttatactacgtgatatgtaatcaaaccccacgatttcaggggataaatgttgtaaagattacagtcaaccctgtaattaactgcttaccatgtgattataaatagagtcaagtgagactgaaaaagggacgaaaaaatgataagaaaaaaaaaaaaagaaaggccctgaagaaccatcacaaatttaataagattgactcgtggactatgcagaattttaaccgcaaaaccacctaaaaaaatcctttgtgtccatattttctttttctttaccgtctttatttttgtgtgcaagtttatcatttaggctcaaattttggttaacgaaaatctgcgttaacactttttaatgttaatcatacataaaaataaaataaaatatatttattaattagtaaannnnnnattttattgtattttttattaatttaaatgaactttttatatattttatcactatattatttatgtttcttccctatgtcatttatgtacatcatccacataaaatttatgtatactgcatatatatatatgaaatacttcttaatgggtattacccattaatgggtaataaa

SEQ ID NO: 107633 - DNA, 647 bp, Cannabis sativa
aagagggaccaacaaatctttaattttatttgtaacatctttatatatgaaatgtggctatttaactgtttttgttggtttagcagaatattttaagaatataagaatattttgttaaattgacggtattagtagggttagttttataaatatatataaatattaatattatttattgtagattaatttaaacatatattaatattaatattatttgttttaagttaattgaatttatatcaattttaaattaatatataaatatcaatatattatttgtaacattattattttttattgttatttttaatattgagagtatacttaactttagagtaaatactcatttggtaccctatgtttaattgaaatacaaacttagtacctcatattttgaataatgatatttgaataccttataatttaaaattatacccatttggtacccctaaacttagatttggtcaacaattttttttgtatagactagagtgtccttatttacatataattattataattaagtaattataattaattactaccaattattatctaaaaaaatatcctaccaattaatatataaatatcaatatattatttgtaacattattattttttattgttatttttaatattgagagtat

SEQ ID NO: 107634 - DNA, 951 bp, Cannabis sativa
gtaaaataaattccaacagtatccctcaaaatttagaggttcagcctcctcctcttcttccacctcggaagggctgccaggacggacatcgtcctgttccttaatctcttggacttcggcgtccccctcatgatcctcctcctcctatacgggtggatcttattcggagatgggtaaggtggcgatcttggccacgtggggatcagatgcattgaccttacgcatcgtctgctttgttcgggccatcatcctatggctggacgaaaagcttaaattggaaactccgtcacttgaagaggacggactggcacgaagacgagggtgatcctcgtacaaaagttgaagcaagtcctggtcaattcggtgttcgcttcccaaaactcagcagggttcatctacaaaagacaacacacgagatgagtgtttggtcgggatatcgaataataaacaggcaaatatgctgacggagtactcaacagattaaagaattaaagcattccacaataagccaaagcccacaagtttgaaatttttgggtttagggcaatgtttcacgaagctttgaataagtaaggtgaaagacagacaaggtacgatcaaagaccaacgtcatgaatcgtgaagtttcacagattattacaaagaaaattgcaaagttttaaacctaggttttctacctatcttctacagcaagatcaagaacacatatctgaaacccaaaaacaaaacatgcaaagtgaaagaggaaggaatcgaaaacttactcactggtcgatgtctgagttcagttcaaacgaagctgctcggatgcttttggtagaaatctcacgacagacttaaagagaaaacctcttttttgctctaagtttgcttaatagagaaattggtaaaagtgaatttatgaatgatgctcagccctatttataggcagaagaatgaaaaagggtaatc

SEQ ID NO: 107635 - DNA, 1150 bp, Cannabis sativa
  modified_base (26)..(28): a, c, t, g, unknown or other
  modified_base (947)..(949): a, c, t, g, unknown or other
aagttcttatttaggatgttaataannntacttgtgagtagatcaaagatcctggtaaaataatttccaacaagtatgagatcatgtttcagcctcgaacagcgactaaagggcaggccttagcagattttgtagttgagtgtacgggtaaagaagagaacacttcaaaaaaacaacctaaagccagtataagaacctcagctgagcaacaacaaagatgaaccaacctggaagttacatgtagatgggtcaaccatagatcaactatctggtgcagggattgccctcgtcacacctaggggcaatgtctacacgaggtagtaaaattcgtgtttagagcatccaacaatgaagtagagtatgaagcccttattgctggcctaaaacttgctcaggaattgcatgacaaacacattaagatttatagtgactcacacttagtagtaaataatgtatctggggagtacaaagctcggggagaaaagatgatagcctatctaagtaaaatacatgaccgtctcaaacaattcaaaagctatgccctcaagcaaactctaagagaagaaaacacaactgtcgatgcactagcccgactcacgagcagcaacataaatgtgaaggctaatttaatccccatcaaattccttgaaaaaccaagtatcactggcatggaggagattgaaatgattaacacatctccaagctggatgacatcaatagcagcctacctcaacactggggaactcccaaataacaggaatgaagctcaaaaaatgaggagaaaggttgtatggtccatcatcgtagatggaatcatgtatagaagaggattctccatgccattactcatgtgtgttacacaagaagaagctgcacgactcttgtcggaagtacatgatggattctccggcaaccatgcagctgggcagagtttatccaagaaaatnnnaaggcaaggttatttctggccgaccatgattgaagattccaaggcctatgttaagtaatgtaattagtgtcgatgattttcaaagatacctcgtgcaccgccctacaaactaactcatatgcaaagtccttggccttttgccatttggggaattgacctaatcggacaattacccaaaggcaaaggtggagtacagtacac

SEQ ID NO: 107636 - DNA, 1654 bp, Cannabis sativa
taaaataatttccaacactttcctagcatagcggaggaagaagatcaaccctccaagtgatacgttgatgtgaagacgctcatcctgtaactaacctaataaagatgacgctcatccttggaaaagtggaggaggaccttttctctagggatggaccatgtttcaagaggtagctgttttcctaagataataaatagaccctcacagggacagaggggggatctatcaaaggatatacgaatatttactctctttctaaagttttacgactaaacttatcatttctctacgatttgacgtactctttttcattctggtgagcaagattttaccgtcgatcatcacataaccattgacacaggaagtatttatttacatttcttattttgtttttttactttgcactataattgactgacttgaccgtcgaagtgccttcggctggcaccaccccagtgtcccaaggtttcatagtcattctttgtctttgttccgcaggttgtcggtgcctacaaacgttcattccgatcattgtagattttagcatctacaaacaaagataaacttcattgctctttaagaatttatttattcattcatggcatataccacaattttaattctgtgcattccatagtttaatttgtgtctcaaattaatattatagttgaactcttattgtgcgtaatgtaatctctagaaaacattgttcttattgttctaataagtcatcttaaggatggaccaacaaactcttaaaagagtaaatagttcaatatgcatgttgtttagaaattgtaagcaattaataaataacataacttattagaattttatcaatgacttgtggattattaatgattagttatggattctcaataaccattaaacttaagagttgttttgaatcataattaatctaatacttgaggtggaagtttgagaaaatatgaatgatctttctcaaaaactaagttcctagattgattactcccactgatcaagtcaattcttaaaaaaaatacaattctagtgttgtgagatggataataaacatgtaaccctttgaccttatagaatttttgatgaaatcgtcatttatggtatttgggcccatatcttttctttgataattattctctatctgtatacgggtatttctaaaatgtgtacatgtcataaagtcagtttccaactttatgtacactcccatgaaagagtatcaactgataatgatttaagaaaatttagagtttgctatgcatactccaccccatgtccaacaattcttagtttcttaaacctgtcacacaccataatttaggtgtaccatgcatatatattgggcaatgaacccatacttttaaagaaactttgcaaataaattgagagtttatccatattcacgaattttaaagtagtattctctattttatatttgatctcactatcttaatatgaaaaatacattatttttctacttaagatttaaatgtctttaaaatatataaatctttacttttgtagatgtaagtgtcagtattttgtgagtttagttttgttcaatgtctagtcgtgtctggagtttttagtctgttatatctgcactagcgttctgttaagtcagttactgttaagtgttagttagtgccag

SEQ ID NO: 107637 - DNA, 917 bp, Cannabis sativa
tggtacccctttgtgaaatgtgcctcggacctatctggaaatatttttttccctctaatcacaatgatttcatactactaagacgtggatattaagattgtttttgcgttaatttttgttaaaatgacccactaattaaaaaattgaaaacgttctacttttcaggatatattttaactagtttttccttactcttatactcgttagtgttctctaaagatctcaccctgcaaatctcaaaaaatatttaaattttagagggatgaagccaagagcgttgcacatcacttttctattggaaaaattgagacaaaaagtagttttcaagcactaagaatcattttaattgaaatagtggaaatctcacatttctgatagtggtatacctttgtaaaatgtgactcggacccatcttgaaatatttttgccctctagtcacaattatttcatactaagacgagaatatgaagactgtttttgcattaaatttggttaaaatgaccccctaattaaataattgaaaacgttctacttttcagggtaaattttaacaaaattttgttactcttacattcatcatgtttacttaaaatcacaccctacacatctctaaaaatcttaaatttcactgggaggaaaccaagagcattgtgaatcacttttctattggatacattgagagaaaaagtagttttcaaacactaacaattattttgatcgaaatattaaaaatctcacatttctgatagtggtgcccctttgtgaaatgtggatcagacccacctaaaaatatttttcccatctagtcaaaatgatttcatactactaagacgggagtatgaagattgtttttttgttaaatttggataaaatgaccccctaattaaaaaaaattgaaaacattctacttttcaggg

SEQ ID NO: 107638 - DNA, 607 bp, Cannabis sativa
agggtaagagttaccattgacatcactttacctctgaagcgacgaatgaaactacgtaaaacagggagtgaatggttctgggcaaattttaaatatgaatatgtgccaactttctgcttcatatgtggaatcattggtcacacggaacgattctgcccgaaactcttttcgacaccagctgatcagatcaccaagccgtatggttccttccttcgtgctcagccgagaagaaggaattatcaaattggttcccagtggctacgtgatggcagtgaaagagacgccattttttctgatgacacgatgatgcagcaggcacaagattccagccaaaacagtctgtcaaatgctgaaaatacgggaggcaatcaaagcttgattcgatatggtaataatgttgttatcaatcccatttaccaggattgtggggatggtcaacaagatattaataagattggaaatggtacagtggacaaagagataatgggggctgtgattggggaagagaatcaatatcaacttaatgttgttgattccaaaagaagacgtatggaagaggaagtcagtaaagggcttgagccgaataaggaaaaaataagtgggccac

SEQ ID NO: 107639 - DNA, 536 bp, Cannabis sativa
aaaatgaagaagcataaatgtaagtaaaaaaaattacaatttttcatataattttccccacatgcattatcaaattatagaacatcaataatagtagaaagtcattcaaactaaccaactgtgtatatttcatttattagaatagtggtagtatacacttaatttatttatttaacaatttgtaattttttacaccaaacatatatatatatataaattcatagtgatcacctagttgtatatagaaatatttaaatatatatttagacattatatagaggagaacaaaccataaagaatagataaaaggctcccatgtggagacaaatcaagaataaggtgcattccaccttcaaccccatatccaataagtttggctatgtttggatgatcaacatgaactataatccgaagctcaaacaagaaatctgctgtcatacaattaagaaaataattacagagtctgatcaacacttttgtgatttcaatcatattactatcatattcatacctttttttctttatgatattaaggg

SEQ ID NO: 107640 - DNA, 645 bp, Cannabis sativa
tataatttaatagttgctatagtatttattataattatttgtaattaattaattatttaattgggttttaaatagaataaatagtaaaaattgtgttcactgtttgggaaacctttaatataatgctaatataaaattatagtgtttgaaattaatttaagactatgtggagaggttttcctatttttggtcaattatttagaattttattcatttttaacatataaatttatacataatcatggatggtatttcacacatatttcgaagcacattgaatatattttatgatctgtataaatagttaaagaatatgatatattctgaatttggtaaataattacctaatggcatatttagttaataaatatataatattttagtaatatttcacacaaaaagtatttgtatgaattcatgttttacctttaaaatattcatgtggatacatgcaatgtgtttgtgtgaatcaaaataataaatgattaataatggtgtggcatgcaagtgaaattggcttatgtgttacgtatttttacgtaaatttttgtatgattaccgagattcatacttgaatgtattttgagtgtattgttatgttaatgaatgtttaggatcttgttctcaacaaaaaaattcagtgag

SEQ ID NO: 107641 - DNA, 807 bp, Cannabis sativa
  modified_base (463)..(468): a, c, t, g, unknown or other
aaaatatttaagtttaaccttaagggcatttaagtctttttaaggagtagtgtggtggctgcctagggaggtcacaagtggcttttaattttcagcaagtaattagctagagaaaatccttttctcatttgaaggaaaataaaaaaaaaaaattgttggaaattcactctcttgaaccctctctctttctctctttcggctgggaccaaaaccaaaggagaatcaccttaattcaatagtttttttctgggatttcagcaaagaattcaaggatgttgagcaaaggtaactctagttcttctttagttgtatttttctaggttttcattgatttcaagttatgtttttgctggatagtggctgttagagtttgatgcttgtttagttcgaattttaggattcaattgagttaatctaagttcctagcagctggtattgttgattggtttgagttttatgcaannnnnngctttgagttcaaagctttgatctataatggcaacttaggttttggtgatttgttttgtggattactgcctggaatttattgtttatacccatattaggtaccctggaaagtttggtattgtttgggtttgttttgagtgcaaggggagaatttttggttttcccagcgcagaaccggaattctgcttctgtggacctataccaactagtcaaccggttggtgtcccagaactggacttccggttggggccggtctgccggttgggggaatttttgggaccctagttttgtcccaatttcgagatatttagggtatttccatgttgtttatcgataggg

SEQ ID NO: 107642 - DNA, 576 bp, Cannabis sativa
ttccaaatcccatttcaaaaacatcactaggcctacctagcttattaagaactcttgatgctacatatgatcgtgtagcacctaaatcaaataaaacagtaaaagcaaggtcgttgataagaacctgacttgtgactactgaagggctggcagcagcatcagcctgagttatagcaaatacatgtgctggagtaggcttaacatcaggtttaggttcctctttcttcaactggggacaatctttcttaaggtgccccactgatccacactgaaagcaagctctccggttacaagtcctaggatgatgtttcttacagcgcgggcactaaggataatagtaagtctgacgtccccctttaccctgatttcatcggaaccttttactttgccctgaactcctcgaagatgggaaagttctcttcttttgctcaaaagtggaatcaccactctattttccagggccagaagtagggagagtagttgtcccaccagtaccagaagtctctcgggtttcttgtaagaacttaactgctccttcagctcgaagagccttgtcaaccatttcagcataggttg

SEQ ID NO: 107643 - DNA, 632 bp, Cannabis sativa
tttaatggtagagatatattcctccgttgctttaaaatcttagagaaagtgccacttgatcaacatttcaagtcctgcatatgaacttggtgatgggctaagtttcggtttgtatttccctctatcaaaaatccattaaatgtggaagactcctagtgtatttttcaacccattcatacaagtttcttcgtcaatgaagatgattaaactgtgaaatcttattagatgctgtagcatgatcagtggcatcttcttctcttcagacgacagctgtccatcgtgtaggtgatgttgtggctgagaataaatgtgtctttcttgcaacaaacaagtgttttttcttaaaatattccaccttaaaacagactcctttttcggaagtacctttgaggtctcttctctattattctattattgtccatccttgcaaattgctccaaccagctgagttttcatcagcaacagcaccatctgctcgggtagaacaatattctttttgtcacagacggtattatccacgccatcaaaatttttctcgtcaaatgttggcatttttagttctcttaatcgcttttagtttctaaaacgagttcctgattctcctctttcaaaagatatttcgttgaaaaact

SEQ ID NO: 107644 - DNA, 1666 bp, Cannabis sativa
ttttttttttttaataataatgataaatttgtcaaatattctctttcttgttttttttattaagtattttagttttttttatatatttttttaataaataaataaataatatttaaattttaataaaatttaatgtatcaaacaacttagttactaaaaaatatatatatattttttatttttatatttagacattacaagattaaataaaaataaatttatttttataaaactattttaataagtttgtaaaataatttgtaaataaataaattgaattgtatataaacatcgtatgagttacattagaaaaaaaaaagtaatataggtatcttaaacaataaaataacataatatagcctaaaaatatacaaaaaaaaaaaacaaaaaagtttctttgaatattagtcgttattttttggagacagaaaaatatatgtttctcacatattataatggttattttattatttatatatgtataaaattttgaaataatttttttagtggaaaagtaaccagttgatatattattcacatcaaaagcaactaaatggttgcttttttccaaactcccaaaaagtaaaaattcctggaaacgagatttttctagttttttctatttttagtaattattttgaatttcggtatgtatgctgatgtgacacaacagtatttatacaaataattttcttaaaggtatttctattaaataaaattaattttagatataataatgaaaataccttttaaattattcatattaataattattatttcttccaaatggtttgaagtacacgcatgatatttggtttaacttggtaaacgttcctattttatgatagtgactatttctattttattttgtaatatattttagtttcctacaaattaagaaattaattcttgcatgcatattattgttcatttgtgtataagtaaaaaaagagatacatagtacataaagttgtaggatatagaattggtaccattggataagactaaacattttgtgattgtgttgctcaatgacaagtcttttctaatgcccaaagttttaccaatacaatgatatatttaaaataacattgtttcccgccaagagccaacgaccatttttaatttattttttatttgtattttaatttctttattgtgcttaaagtaaaataaagtactgatatatagtactattggtgaagactacacatttattattgtgataagactacacatttgttccgtttattgacaaacttataattaataatatattaattttgttcctttatttgttttgtcttttattactttgcatgcaattcaacttatataacaattattatttttttaaatagtttgaagtacatgcatggtttgagtattgctttggcaagctttcctattttgtgttagtgataaatacaagtctttgtccaaaggtttaacctatacaatgactatataaaatgacctagttttctgctagaacagatcaccattattattttatattttaatcacttcatgtatgcatgcaattttatttttattgcttttaaaattaggcaaaagaagatatagtacatacagttgtaggttgaatttactaaatgaagatgtaaaacaattgggtatgaagggtttttcttgaaatcataat

SEQ ID NO: 107645 - DNA, 1225 bp, Cannabis sativa
aaaaaaaaaaaacaaaaaaaagatagagggggagaaggtttcatcgaaagagagaaagaagaatttcgttccgtttcgttcttttgattataaacttataatacatatatattaaataagtttaatatatataaaataaaattaataatataataatagcattaatgatataataataatattaataaaaactttattattcataactatcttatcatttctaatttatacttttaaggcgctaagtcaaactcacttactcctaattacctcaatacatatattattaacttatcacaatattctaatcaattatatcaattaaactcgtgatgacatttctggcgtccgatcgagtccccaaggttgtcaaacctcaaaatatttttattaacatatagctcatattacattcacacattatatataaatctacataatttataaattacgtttatttactcacttatagcaaatttaaaatttatgttgaattagattagtaggatcataattctacttattaccttattaatccataatataattataaatcgtaattacttaccattggacttattagaatagtacaataaacatagttagtagatctagaattaataacccaataggataataattttctaaaacacatgaataattcacaaaaaacttatagaagaaatatacctcttatttctttgccaaaaacttaggacattggatttccggtattccttttcgttgtaatagaagcatgttttctcctttgctgttggattagcagccttcttacccttattattcatgttaacaactttaacatgcttcttgctattcttcattatattcttctttttgggtttcaaagtataagaaatgtttgtctcaggctttgccgtacgaactgtagaattactagaacttggagctttatttcctcctttatgtagtcctctaatcaaatttttaaatgtctaaaggttgttgatcaactcttgaaagtcaaaaagtcaacttgttcatgacgtaatttgaagtaaagggacgaatagctggagttaaactattcaagatcaaacacacttgagtatcctaatcaataatagctccatgattctcaggttcctagagaaaactagccatcaggagtaggtgatcacgtacattctgatgagatttcatccgtgcatttatgaagttcttggtcgcctcaaaatgagct

SEQ ID NO: 107646 - DNA, 729 bp, Cannabis sativa
  modified_base (601)..(607): a, c, t, g, unknown or other
cagccacaaccacaaaatcatcaaacatgcaacaaattacttttcttaaactcaaaaaacttaagaggaagcttcaagaatcttaccaagaacttgagatcactaaatctttgttaaaaccagcttgaaatgcagaaaaattcaccaagacctagctgcctctaggtggattcgaaagagagaggaaagcttgagagaaaaaatggaattttgtctttcttttaatttttcaataaaatgggcaaagaacaattaatcaacttatttcagccaacaatagtaaataatagctgaaaataaaatataactaagtccactaaaggacaaaatacaaatggggaaaaatgaccattttgcccctccacacaaaataacataaaagggatactaagggtattttggaaaactctaaattccaaactaatcccgacattcccaatgtctaataatatcgccccgttatactaaaatattagattgtgattctactgagccatacaccgcgttccatgttgctgggcaccgaaaatgcaaaattatggaatttcactatacgacatataaaatgcattctgaattcaaataaatcaacataaataannnnnnnaatatcaataaataatttttataattaaaccctaattatttgctgatttccaaatttaaataagcggtctttacatcgactttcattaaagagtcgaccgacttccccacaagacctggatg

SEQ ID NO: 107647 - DNA, 587 bp, Cannabis sativa
tattggagacataaaacaacaatagtttgtttattttgttgttagttatgtttaataaaattatttttttattgaaaagtaaccaatctaaaataacaaactaaatccgtacttttgcgaattgaattagatttgatttaagctattgtgcagattggattggatccaaaatattgaatccacactaaggtcggcactgagaatatatagtgtatagacctaacgcgaagagtgttatggaattcaaacccatgacattgtataatatgttatacacctcaaccaattaagctatgaaaatttgttgtttacaatacacttaattttattttaataaaagcctaatgatttttttttttttttattttgggcctccgaaaagagtgggccctaggcatgggctcagcccgcctaagcctaaggccggtcttgtgcggatcggatgcactatgagcaaaataatacgaattgaattggatgaacactcctactaaattcattccaaccacactctaaaacttatcctatctatagcattggctatagtgtcccactattattattgtgacactatagactacaccaaa

SEQ ID NO: 107648 - DNA, 542 bp, Cannabis sativa
aatacgacgtaccaaacgaacccaaattacattaattgttaatctatttgctatgcattcaacctgaatttaggtaagtattttactatcaaagaactttaatgtcgaaatgtctaccattttgatggttagtaacagttattatttatcattatactaccattgctttgaaataataatagttgtctaaaataagtgtaaattagttttctaaattttttattattgtacccttttattttttgttaaatttatatcttttagctactaatttttactatatataagtggtagtttataaaagctattggtagttattttgagaatggtttttggctggagttataggatggtgctcaactcgtcaatgttatcgtttattttgttgtgttaagttatgttcatgtgatgttgtgttatcttaagtaatatttttatgagattatagaaatttggagactttaaaagattattgaaggaatattgaatctcagaataagtttctttttcttttttattattattatattctaattttactt

SEQ ID NO: 107649 - DNA, 2581 bp, Cannabis sativa
tagtttcgtagtagtttttctatattttttttatgaattcgaaacaacccatgttttgattgattctggtcatctcaggtgaagtcaccggaattaatggtggttcttttgctggttgaatttttcgtttcggttgcgttgggttgctgtgtagttgcgcaatagttgcccaggaagcatggatttcgggttgaaggtgtgtaagtggtatttgtgtaattttttttttatttggactgtatatttatttatttggccagctggaagtatttttgtaatattgttactttttttgattaaaattgaaaaaaaaaaaatcccttttataatttgacaagaaattttttatatttatactcttttcttaatttttttttcttttttactgttttttacttattaaagcttcaaaaaagtctttttttttgtcttttttatatatttttagtcaattttagctctcttttttcttttcattttttaagtcagttgcttactttttttttctctctcttctctctctatttttctttttctttttttctaatttctctttgtgtctctttttttttaaattttttttttcttaaactattttttttttttatctttgtatatatataaatgtatataataagtgtatgtttttatgtcttatttttttaactctctttttctctattacaaaaaaattaagagcactcctcctatatttttctatcttttacacgattaataaaagtagtatatttttttggatgttttgtagtttattttgagttaatttatgaatgatttgtatattttaacaatcttgatattttgtttaatctatagttgcatataataagattttctataatatgagattgaatattataattacaatacttaaattaatttttggatttttttgagcacctctattttaccgtactagggttgcattttttgttgtgttttgtctttttttttttaagtttctcatattatctttttatagagtcaaaactaaagttataagtttttatgaattttatttgcaccccataacatgataagtacaccctattagaaaaatacttatataaatatttaaattattcttaatatatttttaacatcttctcctcgcattattttatgttaattttaatacttattttgattttattttgattttttttttctaaatcatgtatatatatttttattttttctaagaaaattttatataattttttgtcataatatttaaaataaaatttatttttattttaataagtatattttctaagaataggaattaataaaaagttaaaaataaattagtacagttaaatatataaattttatataaagtaaaaatatttaaaatggggtgtctttagaagtttttagggtgtagataaaatttctagggtcaaaactggtttcatagatttatatgattttttatagggtcgaaactggtttcacatgttttgagggttttctaatgggattgcttcattttatgattttttgattttaagtttctttatattttttttttctaaatttaaaactggttttcacatttatattatgttcttaaattattgttatgtgttgtttttgattatttttgttagtatttttttttaaaattattgttcaaaactggtttacatattttgagagttctctaatgggattgctctattttatgatgttattacaaaatttttattttgagttacttttttattattttcattctaggttcgaaacttacacttatattttgtttttaaattattggtatgcattgtgtgttgttttgattatatttgtgattagtattatttttttttatatattcttgtgtgtttttttcatttttcatttttcatttgattgtctgatgaaactggtttcacttaactttattatttaacatttattattttttatagcgtcaaaactggtttcacaggttttaactgttttataatgggattgctctatttttatgatgttattgtatattttttagtttgtataaaattaggtttattgttgtatgatatttgaacaacaatttttgttttattttaaataattagtttttgacacacatattattttattattttcataacttgttttttttaagtaactagttttcataactgatttttttttattattattcaaaattgagttttaagtttcaatttttttatttgattatttcaagaaactagtttttatttgtttgtttttattttagttattttactaactggtttctcacattccattgttttttttttgttattcttttatgttttttattgcatttttgtctctttaattttctttgttttttttttttattttctctttgattttaattgttgattctctttgttatatatgctgcatattgtatgcttaaatcaactctggtttttgagcaagcaaataaaaaattaaatgccaaaataaataatgaagttaaaagtttggctaataggtattgatataaaatttgtatgtttgagactggtttttaaatgggttaatttcacaaatg

SEQ ID NO: 107650 - DNA, 1144 bp, Cannabis sativa
ttcccaactaatttattttgttgtttaattttttttttttataattttcaatatgcctttgttctaactaatttatatatagttgtcaattattttattattaattttaatatgccattgtcattttttttgtcactcaatattttaaacatttttttattattttcactttttttatttttattataccttcttttattgttatttttttttttgaaaatttttaatattcctttctcatattttttttcacatttgctaatactctcgatttattttcaaaaaaaaaataatatatttatcatacgtatattatataactataactattattttatacttttgtaaaaatttaagaatttttctttattattataattatctttttttttaatatgcctttgtcattttttttgtcactcaatatttttaatttttttcttattattgtcatttttttttcttttaatataccttcttttattgttattatttttaatttgcctttctcatttttttttacagttggtaattctctatttattttttcaaaaaaaatctttactatcatacatatattatataactaagattattatcatatacttaagctaatgtacttttttagaagaaaaaaatgacacatattattaaaaaaaaataagatttataccattttgaatattggtggattttgtagattctcattaatttggtctactatgtacaacattgcccttaattgatttttattcattttattgtctggtaatatcttatcgaacaacaattttattattctttctcttacatttaaagaaacatcacactgattttggatacacatatttgaaggacaatactaactttattttcggtcacccacatttgaagtaatactgtaagtacattacaatttcttttaattgtaattaattttactatattataaataaatttctttttaaaaaaataattattgttttcttttcatgataatatgtgctgatgaatgagaatatgtaaatcttcaagacatcccttataattctataaaggtacattaacagtcattctttgtttttcttttaagttattattactatttagtactattttttttttttttgaaaaaaattcaaat

SEQ ID NO: 107651 - DNA, 1031 bp, Cannabis sativa
tatccattggaaagagagggtgctcccccccccctcttgtgttaaccacttccctagcatcaaacccttctatctcatgctcattctccttttcctattctaccaaactctcttgattatcttctaaaatctgaaaagaattactagtactcgcccccttcttcccagcaacttcggattcattatactcagccttactcttatttcgagtcaccttcacaaagccctctgcatctgtctcaacctgcttcctattgtcctttttcattacccattgtggctttccattagagtgtttcctacattcctctgctgtatgtccaaacccagaacagtgagtacaggccactggtttccactcatacttcaacatcactgtagtagttgagccgaattcattttcaaattccaaaaagtctggaaatttctgatccatcatcacctcaaccataactcttgcatagctcaaccgttctctctccctagtgattgagtcaagcataacaaatttcccaacctggcttacaatcttggacagtgttccatgaccccaatatttcagttccaactcctctaattgaatccatatgggcacacacttcacattctctttcttaaagttttcatgggggttccaaggcttcattatcacaggcctcctattaaagaaaatataccctccattcaaaatctgatctctatattctatagagctaaatcggatgataaagactccatatgctaatagtttcaccttatcaattttatctttccatattctattgacaaaaccttcaagcacatgtaatggaggattagcccccaatacataacagacaatagatggtgtccagaaagagacttcttcttcaatatcctcaaaagtgattctaactttactgttgttatcaccagaattcctaaaagaattttcaagattcctcataacagaatcagatcgcagagttggggggattggagatttaccttgtgccacatcactgttacatgtgatcaatgatcctctatat

SEQ ID NO: 107652 - DNA, 576 bp, Cannabis sativa
ccaaaccttattgtctttcatagacttattctcttcattcatggcatcaatccacttttaagagttagaacttttcattgcctgatgcaagttgattggatcaccttctatcattccaatttgaagaaatacaaaataatcatctgaaatagcatttcttctctctcttgtggacctccttaatggctcttgttcttaagggtgttgaatttgttcttctggaacaatagcctcttcttgatttgggagttgtttaacattgtggttccagattcatttcttgatcaatgacaggtgtggaagcctgaacattgtctaaaatgatagtaggaactaagtttgaattcaattcctcctcaaaagcattgtctctaaccttatttctccccccaaattcaacatcctcaaaaaatgttgcagttcccgtctcaaaaatatttctgactgtgggatcataaaatttatagcccctaggtcgctcgaataactaataaagtagctgctaactgttttggagtccaatttattttcatgtggcctataaggccttgcctcagctggacatccccaaatgtg

SEQ ID NO: 107653 - DNA, 802 bp, Cannabis sativa
aaactcaattttttttttttttgctaaaaaactttttttaaaaaaataccgatggaacaatctcagcccctatgtataaaaatgagatctttttttattagatagaaaaattaaacataaaaactcaaatttttttaattttacccattcatgggtaatatcattaaaggtgcacccatatatatattttagggttaggaggtagctttatagggatgagaagtccaaagggatggagtaggtcccattaccaccaatctagcagatatcttcttctagctgaagcgccatcttagccaagtcgtgggagtcgtattcgctgttcgacgaatgtgacaaaacttgacatttgggaggagaaaaagaagtgtcctcaactgggaaaaaaggtctctggtcacactgaaaatttcatttgagttacttaatgcatcagtaattgctttgcaatctgtttctaggggtgttcataaaaaccgataaaccaataccgaccagaccgtaaccgaattttcggttccacgtcatcaccaaatttggcggtcgatttcggtttcagtttttttaacatggcggtcggtttcagtttttcaaataaaaaaatggttaaaccaaaaaactgcctaaaaccgccaaaaaccgtccaaaactgacaaaccgccaaattgccaaaaaccgtatgatcgattttatacggttataatttctaaacggtcggttacagtattcgtaaaataaaaaaccgtaaccgaccggtcgattataaaattgtaaaaaacgaccataaccgaccgatttttac

SEQ ID NO: 107654 - DNA, 619 bp, Cannabis sativa
tttttgttcttaaactttttacacagtaaatgcttattattcaggaacaaaaatacttataatattcaaaagaaaaaaacattacttatttttaatatattttttttaaaaaataggtatatatgtatatacaattttgtacaacttaattttgatttagttggaatcatggaatcgaagtatggaaccttaacaaagctaaggttgtccagcacagcaccactaataacccaaagcaattggtggttcatgattatattttatttgttgtagtgtctatatatattgtgtgagagcatcttataaattttatatactatgtttataggtatagcacaaagacgaaggcacgtacaatgaatattttatataaatatatatatatttagattattaatttataacgtatatttatgatagaaattattaaaacgtactaaggtaaagtactgcctaggtatagtacttattgtgtttacattaagcaaatagtgttggaaatttgtatgaaatatgtaaaaataaaaaagtgaagtgtgtgagtaggagtcccacatgggataaaaacactacattttaagtgtatatctagtgcaagtttgagatatgggtttgggcc

SEQ ID NO: 107655 - DNA, 888 bp, Cannabis sativa
ttaaaaacaagccagctaatttcagcttcgctagctttatcattgtgcgtgctgattatgtccccaaacaaccaaatttgtttgactgtggggtatttactatattatttatgattattgcttgtaaagttgatgtgcggtcctttcaggttagacatttttaagctcttttgttttttatttttatttataacattattttttttttcaatcttgtgtgattaatttgtatttcttttatgtttctattttccagtttgattccaatgaagaaaaattctcatagcttgtttgttggcatattcaaattacaacttaaagagagaaacttgtgaaggatgtgaaagacttctgtttgagtagaaaattgtagaatgtcatttaatggtagactaagctgaaatgttatataccttatttatccttccattttcatatagctaaattgttcttacacagtaagatggttatatgtcaataatggcatataacttcacttatataatgactgaatatttatatataaagttacagttgtttccttcctgatgaaaaaacataatgagaaaggaaaggcttttcaaacataatgtgatattgtaggttgttagcacaaataacatctcaacggatatatgagaaaaatctaagagtacataaaaatggtattcgatctttgacatgcattgtgcattgggcaaaagtggttcatatatatatatatatatatatattgagccccaaagataagaattattatagtactagctaatagtaagaaacaacaattctcctagtacaagaaagaactcaaaacggggtaaacttttattcagcaaaacaatgactacactcaagactcataaggcaattatgtcctaaacaaaa

SEQ ID NO: 107656 - DNA, 550 bp, Cannabis sativa
tctcatacatgtacacactattccaagtgtgtgtgagattaaaccctagtctcattatagtgtctcgtgagttgagtacacaatgtaatacctaaatctgttcatcatataaaatctaatagtccactctattcttgagtgttgaggctaacttgaaagatcaaggtgtggattctttaagcaagttcttggattggatgtttgattgttatacaaaaagaatcaagaatgccttaataggcatcaagagataattgaatttatttcagcagttagatttaatctatattcattatgttcagatccttgggcttaaggttcatattggataatgatgtgattgataactcgatcaaataactcatgcaagaacaaaacataacatagaacaacaatagtttgatcaagatcaattgcaaccacacataaagaattaaaccagaaataagaataggttaacaaaaagattaaaaatagattcaatacaaagataattacggggttcgaatagagtgatagtgaatcacctgcctgttggaaattattttac

SEQ ID NO: 107657 - DNA, 1435 bp, Cannabis sativa
  modified_base (1136)..(1138): a, c, t, g, unknown or other
  modified_base (1272)..(1276): a, c, t, g, unknown or other
attaaattttgaacatatagttatgtaccatgatagtgatgtcatcacagtgaaaaataatagtgattatatgtttcaaattatttagtcccacaatttatttgtgtagtggatttacactaacatgataatcagcgatgtgatttatttacacttgtataagtgaatgtccttttcagggcattagcaaagtaaatttgtatcagatatattggctatacatcagattggaccgatattaacattaaaaaatatatcataaacttattgttatgtcttttctaagtcgatgttacttagttgatcttaagtcaattgatctcaatcccgagatggctaagttctagcttaattgtactatatgagttctttgacatgttaattaccagtatacccgtagaactagctcatacttacatcttggaaattctaaagtgtaattgattaggagcgttaattataaatatagaatttatagcttctgtaactatttagaagtgaaataatggtttcctttaagcttagctaaatgcgataattgatatatagagcgctccttttagtaattacattagtttactagaatatcatttacaagtagctaagtgttttaaggataaaatacatcaaaggataaacgataaatatgtccctactcgatgtaaagtatatatgtgatccttgataatttatagtgtatctataattagtatatagcgttctatgtaatcaagtgtaacgccctaatctataggggcaccacatgtgtaattttataaactagtttaatactaatagaagaattatcaaaaatcatgataatattaaaaacttaactataataaaacactaaaaatggacattataacggataaaaaacgtgttccggggatccctactataaatttttttacaaaagaactaaatacgaagacgcctcaaaagcgtaaaaccaaaatacacagtagatacaacccaaaacaactcttggcaacctagcacccaagtcggtgaggtcaatatgtacattgctggagaagactgtcacctcatggttgatctagttttttttttcctttacctgcaccacatagcacctgtgagtcacaaagaatcaacaagaaaagtaataatannnatcatatattttattattcaaatattattatttatacacaatcaaaatcaaatcatcacacattcttcataagatgaaatccaaatcactactggcatctaccacgaataagctgttgggattttatgccctannnnnaacccatttcaatataatttgatttgttattagtagaagcttagaagtcatttgtgtttatatgtagttttcatgtttatggttttatgtatacaatttctgttaagtccagaacatatagttattcacaattacagtaatgtcaacacagtggaaggt

SEQ ID NO: 107658 - DNA, 1188 bp, Cannabis sativa
atactgtcacacagaattttttttcaaaaatactctttttataaaataacagaaaaacacaaaacagaataattaaaagcaatagtggaaaaactaaaaaacaacagtagaacaacagaagaaacttaacacagtatacagtttaaaaaaaaatacagtatttttgaaagaaattctgccccacaatataaaagaaaaacatagaaaatttcagtatgtggtgtaaaacactcttgtttttaatcactacttataagtattttttatattttcatcttattacatgatcgtgtataatataattacatgatacaaattttaaagaaatttcaagtaatttaggatgttgaaatcatgatttaaaaaacttgttgcatttacataaacaacgtgttcaataataaactacttaaatcctgatttcaatattctacattattaacaagtattataaataaaattatattttgaatctcaaaactaattaaaactactacatatattgtcttttaattttgctcatcataatatgtatttagagttaggcttatgtctttatgcagacaggctatttagtcctgcacttaggacctacttaacttagagacctaataattttttataaaaaaaatatatattatcatacgtaataatttttaatattattttttctaatgtctaatacaatttaaggtcggtcctgtatatattaatattatacatatataaatatttttttaggatgaattgaaaagaggcgatgttcccaaatcaatccaatgcaaaatgtatgaagacggtatatctgaagaggaagctcgtcaacgtattaagttattaataagtgaaacatggaagcttattaataaagattacataaatttggatgatgatgatggtgatgactactctccaatgttctataagtctaataatattaataaggctttcattgaaatgtgtttaaaccttggtagaatggcacattgcatttatcaatatggagatggacatggaattcaagatcgccaaacaaaagatcatgtactatcattacttattcaccctattcctcttacccaataagaacaacttcaaatcaaccttattgttggttctaaatgttttattgtctttggtgatagcagggccggtcctgaaacaaagtgggtcatagggaaaaaaaaa

SEQ ID NO: 107659 - DNA, 769 bp, Cannabis sativa
tgaccagggtcgaactatcactggttttcgatcgaattgcacaacccctgcctccacaacctgatcacgggttgcttcatcattaaactttaccataatcagtcccatggaaagtttacttaccagaagaacacccaaatgcgcccagatcctcttcacgaacccttcaaaaatcgtcacaggtggatttgctcccagtactttgcaaataactgctgtattccagtttttttcctcttcttgcacttcgtccaagtcgacttgtgcaattttgatgccatcccgaattaatggttcagtgaacaatagtcgctgatctcgactctgagttttcccctgcgtgaatgtctcccagatttgtttaacagagcctggcgattgctggttatccaaactcacattccgatcgtcttcaacctcctccgcccaacttttggttcgactactcccagatctgtgggtctctgcctcttgtgtttcctgagaacgagccatctctgcagcaacattcagcctatctgcttcatatgaatcaacagtgacctcttcgacttcatccaggtcttcgtttcctacagcaatctcgtcgacaagtgctcgagtgactggtttccttccaacttttttcttcctcgccatggagggagaaagcagagagaacgaaacgaaaaaagtcaattacataagaatatttttgatagataatattcttgcttgaagtatttttagtaaagattaatttattttaatgtatttcgaaaattgtata

SEQ ID NO: 107660 - DNA, 598 bp, Cannabis sativa
  modified_base (27)..(29): a, c, t, g, unknown or other
  modified_base (162)..(165): a, c, t, g, unknown or other
  modified_base (528)..(528): a, c, t, g, unknown or other
  modified_base (556)..(559): a, c, t, g, unknown or other
ttattttcattgttttagaaattcatnnntaggatgttaaataacatacatggaagtaaatctagatcatggtaaaacatattccaacaactggttagttaatgaattataattgatgaatttaggcttttacagaacctaatttgaattttttatgaattnnnnatgattttttgaatttggatgaaatatctgaaatcgggttgcacacacgcgcgcgcacgagggcatcactcggcatcttcatgcgttttcaggcaaacctaaccgaggatactcggacacgggatgtctgaaaccacgtcacgccgagctccctcggccaagtaggctgcatgcagcctcgtcccttggccagacactcccatccgcgcgcgcaggggtatgcattgcatacccctgtgcaccaaatttgttttctacatattttttgattcaaaaatcgtttttcattgaatcaaaattcaaattttggtagaattttgggcagaatataaattttgaattaaaaatctaattgtcagaatnaaattaatttttattaatttttaattannnnaaattagttttagatattagtaggatttaaattttgaaa

SEQ ID NO: 107661 - DNA, 827 bp, Cannabis sativa
ttttttaaaatgacctaataattttgcaactacccaattaacatggtcgagtaactttttaatgtaggtttgattccaactcaaaaaaaaaaaaatgaaaaaattacattgtatacctactttattttatctattttaagttttgcttttatttctatattctttaggatatgcccacttttatagatgatatcctcattatacccattaggttaatgtaaaatatgtactaaacttaagtggagggtgcgggtatattgggcaatccactcacttttataggtggtggtttggtgcatcgctggccttcgggagagagtggaattgcggttgtgctagggtcaaaaatgaagaagatgaaatgaaaagattcctttatcaaagggggttagcgaaaattcactctttttgcttcggtggataacagtcgccaatcttttttcccttcagaaatttgcatctttttttaaccgaagcaaaatgtaaaaacatttttaaaactttagtccttttttcctcggttccacttttagcattggagatataaccgacgctaattagattctagtagcttcagttattatttgaagcataaaattactgcttatttattgtgtcggtcaaccattttagttagaagcattgaccgacgcaaattgtgtattttgtagtagtgtaggttcaaatcttggtaatacaatgcgacagaaaggaacaagagttagagacctaaacgaaaggagccattatattctattgccgccaatgtaaggctttctacaaccttatatgtatttgttgacttcgcttttagccaacgacaatga

SEQ ID NO: 107662 - DNA, 1516 bp, Cannabis sativa
tttccaacaagagtatctggattgcaaagtagatgccaaccttgtttagcgagcatggcaatgttgaaatcatgcaagtgccaaaaacccatgctaccatcgtatttatgagtagccaaacgatcccaagacctccaaataatacctttctctttactagaagatgacttccaccaaaaccgggccataagtttttcaatttcattacatgtaccaagtggaaggaggaaaacactcatagcatatgtggggagcgattgaacaacaattttcaagagaatttctttgccggcacgagaaagaagttttccatcccaactattaattcttgcaattaccttggtctttagaaatcctagtacaatatttttgtttctcacaataatgtttagaagtcccagatagaggcttccgtcagaggctttgggcatatggagaatatcacaaatctggacacgggttgcaggacacgtattaggaataaagaacacagtagacttagaaaaagttcaccttttgtccagatccagtttcaaattgattgagcaagtttgagaccctgccggaagcactggtagttgattgacaaaacaaatagctatcgtctgcaaagaacatatgagtgataagtggtgccccacgagccaccttgcatccttgtaaaagtcgttgagattcaaacttcttgataagtgaagaaagaccttcaacactgattatgaaaagatatgtcgaaagagggtcaccctgtcgaatacctctcgaaggaatgattgaacccatagtatgacttccatgaataacagtataactgaccgaagagacacatgacataattagattaatccacctctcaacaaaacccatacaagccataacgagcctaagataatcccactccacacggtcataggccttgctcatatctagcttgagagctataaaaccttttttgcctttagtcttcctcttaagataatgcatcacttcaaatgccaccataacattatctgaaatgagacgtccaggaatgaaagcgctttgggtgtcagaaataacaagatctataaggcttctcatacggttagcaataacttttgaaaacaccttataagcaacattacaaagagcaattggtcgtagatcacccatggaggtgaaattcttcttcttagggatcgaaacaaggtttgtttcattcaactcccgcaaaaaacagccggtaacaaagtaacaagtttaaccaaatctgctctcacaatgtcccaatgtttctgaaaaaatcccggacccataccattagggccaggtgctttgtctggatgcatctggaatagggcagttttgatttcttcttcgacaactggtttcaaaagttcttcgttttgagcattagttacagagcatctgacatcagtagcaacagtattttgcaaggaacaattagcagtaaataaatctgaaaagtaagaggtgataacctggtcaagaccgtttccccaatcggtccaagctc

SEQ ID NO: 107663 - DNA, 911 bp, Cannabis sativa
  modified_base (55)..(63): a, c, t, g, unknown or other
cacaagatgagtgttggacggagtatcaaacgaaaaataagcaaatatgccgacnnnnnnnnntcaacagattaaagaacaactatgtttaaagaaaagtcaaaactgaagaggacagaaagatttcttgagttagggcaaaaaagttcatgaagcttagaataagcaagatggaagacaaacacaatgcggttcaaaaataagctctacagttgaaagcccacatgaagacatggtaaagaagagtcgtagaagtttctaaccctagggtttcctaagcattcttttacagcatagctacattcaaagcgtaaacatgcaaagaaaagcataaagggaatcaaaaacttactcaaagattcaaatgtctgagttcaagcaaaccagtaatcgtctgaaggcacttcggcaactttgaagctagaaaactctctctttttgctctgaagtttacttaacgacgaagggtgataaaatgggttatgtcccagtacgatgagtacttataggcaaaaggtttactgtatccaaaggaaccttagacgcctcgacttcccgcctcaaaagcgaatatgggaaatcaaaagtaatcaagtgcaaccttcagccgtggagagagaaactcggattttgaaaatattaattgtcagagcattaattagccgaaaaccgaaaggacgcccactcagcttcacatcgagtctcgaacggtcgtgctcgacacgtgtccccatctaaaggtagaggcagctcggaataagtctacacgcaacctcagaggtcccgtacagacttgggtggcaaatgttatccaaaattttagcactctgacgtggcatcacgagaatggtgacacgtggagtccacttggagcatctgctcggaacgataggccgagcaggacgcctcgc

SEQ ID NO: 107664 - DNA, 674 bp, Cannabis sativa
gcattgcctgaatctccagctatgagcggacctccaataatgacttgtagatgtccatctactggtggtggtagcaagtctttgttgttatctcccctctgattccgatcaaccttgatatacttctacacgtgcggattattttttcttatcagaaatttgatttctcgcttcagattattgcattcatgggtgtcatggcaataatccccatgaaaatggcagaacttggacatgtctctctagctgacatcttttttcatgggtgcgggattcttgtacaggcctaatgactgagtagccatgtaaacactttctatatcttccgtcaagacggtaaatgcagtatacttggtaggattctccctgggagcttgttcggtcttgccagtgaactttccctttttcccattcccttgcctattgttgctgttggaccgtttaccacccgagcttgaattgcttgggtaatgggggagctggacgaatgtcccaatagaaggaacttttgattggctaggtttttgttcaccctctactcactgaatggcttcttcaagcttaatgaaaccttctgcgcggtcaagaaattcactcatcgaatctactggtccgttcttccttatgtccttccaaagttcaccaagtacttcaataacccctaatatcgcaga

SEQ ID NO: 107665 - DNA, 1329 bp, Cannabis sativa
gacagaaattactttagaagaagtaatttcagccttgaagtcaaaagacttggagatcaagaatgagaagcatggaggttctaatggagaagtaaacttcagtagagggagacccaatcaaagaaaacatggacactacaaaagtaaaagtcacagcagagatcaccacaaaggaaagagtcacaacaagggaagatcaaactcaaaagaaccaaatgatcctacgggatgttacaactgtggcaagccagggcatttcaagagagattgttattttctaaacaaaggcaaaccaaataaatataaaggacagggagaaaattctaactctaaacctaattttcataaaaataaccaagctaattatggtgatggttatgagagtgttgatagtggtgaagtatacattgttgcatcatcttttaaagatgaatggattttagattcaggttgtacttttcatatgactaatgacaagagttatatgtttgattatagggaatctaaaggaggaaaagtaatccttggaaacaatcagacttgtgagattaaaggctcgggatctatcagatttaaaatgtatgatgggatagtaagaaccctaacagcagtgaggtatgtgcctaatctttctagaaatttaatttctattagtgtgcttgatgatttgggtgttgtgagtaaggtagaggcaggtcatatgaagcttagtagaggagcattaacaatcatgaaaggaatcaaaaatggtggactttactacctacaaggctctcctatttcaagctgtaacattacaactcacaacgacaaagaagaagagatagctactctatggcacagaagattagggcatataagtgagcgaggcttgcaactcatgagtgagcaacaactgttgggtaaggataaagtgagtaaactagacttttgtgaacactgcatacttggaaagcatcacagattaaagttcacagcaggtactcacaactctaaaagaatacttgagtatgtacattctgatttatggggtccagaaaaaatcagcactcatggtggttgttcttattttttatctatagtagatgattattctaggaaagtatggatatatctacttaagaataaaaatgatgcttttacaaaattcaaacattggaaattattggttgagaacttaactaatgaaaagctgaaaactataagaactgataatgatttggaattttgtaacaatgaatttgacctctattgtaaagaaaatggcttgcagcgacatagaacagtgaggattacacctcagcaaaacggggtggctgaaagaatgaa

SEQ ID NO: 107666 - DNA, 812 bp, Cannabis sativa
aaagattattggtattttttttttcttcgagtttattttcatgcctatgtaatttgcatattagaataaaagttgttatacagttgtttatttgtttttattaagttatttaaccaacaaaaaaagaatatactatatacatgtttttttatttgtgagttatttttatttatttttaaagttgacgctatgtgttgatgcttaattaatttttagtttgaagtaggttgttattgagttatttattagttgttatttagttgttcagttaagagaaaatgaatatatgttttgtttttttattgctaaatatattttcagtgtacatatatatatatatatatttttttagagtttatgcaacttgtggagttgttttgattattcctatttaattttcatattatagtgaagttgttatgaaattttttgttggttgttatttaattatttaattaagaaaaaaaataaaattatatgtatacatatttagttttttatgttacatatatcaagattgttttttttttttttttaatgaaaagaataaagttatatatcaagattgttgttatatatatattattatataaccgtgtagcttttcatgttatattggtgattttattcacttgtttaattgatattgcttgtttgtttctttcaaattctttacattatttattgatgtccaattgatttacatatataagtatagtgttgttatacaattattttttagttgttattaagttatttgactaatacaaaaatgagtaataattatttgtttatgggtacatatatttttg

SEQ ID NO: 107667 - DNA, 800 bp, Cannabis sativa
  modified_base (749)..(749): a, c, t, g, unknown or other
ggataataggaaacctttgttatatatttaaaatatttgattattatttagagatatttgctgcgaaaccctctcaactattaatttgcagttaatcttctaagcttaaattttagtggcaaaatcctccaaactattgaacagttagcaaatttaaggtgtcatttattttttacagttaactgtcaatatagaatgcttatgtgtacacgtgtaacgtttatattggtacacataatattattatttcaaaattataaaaaaattatttcaaaatttatataatttttcatttttaaatattttattttttattttttattcttttatttaattttaaaatgaattttaaaataaaagtattaggtgtaccaatataaatatgccaacatgtacaagagtgtacacctaagcagtctatagtgacagtcaaccgaatgacatcttaaaatttgctaacagtttagtagtacgaaaggttttacacttaagcttgaagagctaaatacaagtaaaactatagttaagaggatttagccgttaaaagcttaattatttattaattaatacgattctatgttggaatatgcataatatctttctctatatctttatatattaaaagtgcctatgtaacggcaattcttggtttaacagaatattttttacaaataaaagaatattctgttaaatttaaccccaaaaaaatcaatattctgttaaatttaaccccaaaaaaatcgtccacntttctcactcacaattaatcgtattcaaacaaacacaagctaaaccttctc

SEQ ID NO: 107668 - DNA, 632 bp, Cannabis sativa
  modified_base (411)..(421): a, c, t, g, unknown or other
aattaataaatttaggcttttacaaaactcaatttgaattttttatgaattagttatgattttttacatttggatgaaaatatctaaaattaggttgcacacacgtgcgcgcacgaggtgatacactcgacatccacgcggtttcagacaacctggccgaggaaactcggacacgagctgtctgaaaccgtgtcacgccgagttttctcggccatagaggctgcacgcagccttctgtctcggtcagccctctccatgcatacccttgtgcaccaatattgtttttctcatatttttttattcaaaaattattttgcattgaaacaaaattcaaaatttggtagaattttgtgtagaatctaaatttttaattaaaaatctaattattagaataaaattaatttttattannnnnnnnnnnaattaaaattagttttagatatttgtagcctttgaatttgaaactttgatttttccacaaaaatagccttatggttaattttgaaattttgattattttatttactaagatcagatattacttttttattattaaaatttgaatgatcttattttgatattaaaatattaataaattttagaaataatctagtttaaatttcaaaatttgc

SEQ ID NO: 107669 - DNA, 704 bp, Cannabis sativa
tttttagatttttgccaagttttccagcaaggagaaggagcggtggaggcgttgcacgagaaggcttcagatttggggttggatgaacgtgttcaaatttggggttctcaaatcttattttttcttttgtgttttgtttctttttgtgtgtatgtgtggtttaggtgtaaaagaatagggtacggtagtggtagggtggtggttgtggatggtacggtggttggtaggtaatagtagtttcagtagattggtggtggtggatgtcgatcatatgaagaagatgaagaataagaaaaataaaaataatgaagaaaaaaaattgttggaatgacaaaattaaattattttacttttaatttttaaaatatattttttttattttaaatatttatttacgtgagtcagttaaattgtgccacgtgtacactgtgtacacgtagatattctaacatagcacttaacatccaaaaataaatggaaatgttaaactgctaacataatacgagttttggggattttaccactaaaattttaaaattagagattagttacaataaactaagcacttgttgaagttatgccacaaattactcaattcaatatatggacaatcgccacattagcaaaattgaatgaaattagataaaagtatttaaatctaacaattttaatagtttagaaaaaaatttaatgacttaaaaagt

SEQ ID NO: 107670 - DNA, 567 bp, Cannabis sativa
atttgcaccctatgacccgttttcctgaaggtaaattaacctaaacccaagtaccatttgcaattaaggcattcatctcttctatcattgcaacaagccaagtaggatgagacattgcttcacgaacagttttaggaatagtgactgaatcaagagaagaaatgaaagagcaagaagaagaggagcgatgataataagaaacaaaagaagaaatagaaaaattacattggcgtttacctttacataatgcaatgagaagatcatcttggagttctggatctgatgatgaagatgcaggtgcaggacatgaaacaggaggtggaggaggaggatgcctggtgcacactataggaggtcgagggagtggtggaggtggtggcattgtgggagttatgaccgagacaggtgaaggaacaagagacttgtcagaacatgtatcaggcgtagaggatgtgacagaatataccaatatatcatcatcctccccctgacatgtagtagcagtagaagatgaaaaataaagtgtattttctactaaggtaacatcaatagaaacaagatatttgt

SEQ ID NO: 107671 - DNA, 631 bp, Cannabis sativa
  modified_base (249)..(249): a, c, t, g, unknown or other
  modified_base (520)..(532): a, c, t, g, unknown or other
tgtctgtgaggatcccaccagagtgccttctacttctaataggccatgaactagatcagaatcattctcaacgagtccataagaagtgatcccatttttttcatcgagttcgaatggagaccaatggtcttgagtgaccaatccggcagaataactcaaaagataaagaagtatcgttaattttttcatgcttgttccaagttctaagtaccattagtaaaaataagaatccccttcgttacatgattncttcttcatatagatagatataggatatagggagaaattacttagaaattacttagaagtacattttgtgcaacaacccttcctatcttatggaaaaggatcccatgatcctgaaccgatcttacctgggatcgcaaatcccaagtttgtctatgaagagcagatctaattatattagtgtctataattgatttcttctatgtaatactaattgatagggccttattggtaagtgctacaagatcgcgtacattggaacccatggttatgnnnnnnnnnnnnntagtatggaacattttcttttccaagtggaatcccctagtatatgaaagagtgaaaaagtgctttcgttgttgtggaataagaagccttcgtatcttaa

SEQ ID NO: 107672 - DNA, 689 bp, Cannabis sativa
  modified_base (225)..(229): a, c, t, g, unknown or other
ctttggccgatgatagagctcgagtaataagagagtatgcatcccctatgttcaacgagcttaatctgggtattgtgagacccgaaatccaagcaactcacttcgagctcaggctcgtcatgtttcaaatcctccaaatggttggccaatttagtgggttgccaacggaagatcctcatctccatatttgctcatttttggaggtgagtgactctttcaagctannnnnagtaagtgaagaggctttaagattgaagttgttcccattttccttgaggggtcgagctagagcatggctcaatacccttccccccgattcgatgacaaattggaatgacctggttgaaaaattcttgagaaagtactttcctccaacaagaaatgcaaagttttgaagtgaaatcatttcttttcagcaattggaagatgagaccactagtgaagcatgggaaagattcaaggagttgttgaggaagttcccacaccatggtattcgtcattgtacccaacttgagacattttacaatggtctcaatgtagcctctcggatggtgttggacgcttcaactaattctttccaagtctgacaatgaagattttgagatcttggaaaggatagctagcaacaactatcaatggtcaactaatagagctcttacaagccaaaaaatagcgggtgttcttgaagt

SEQ ID NO: 107673 - DNA, 596 bp, Cannabis sativa
gagtgacatagtaataggagttgacctgacacttggtcataggcaaataaggcactgagataaatagaagtgagattttgctaacaatattttggtttatgaatttttaccgtcaaaatttagattttagaaattaattgctagcgaagtgactattggagtttgctacaatttactcataataatattacataaacttttatttgttaattatctatatagttcttggaaattcttccttttcatctatattttcaccatctcatcggccatccgaccccatgttcctagcttactcaattcaccaatagcaggatcagattcccaataaaaaggaatgagcttggttacatcagagaaaatatttcttgaaaaattttgagagaggaagtgtgggtgtgttatatgagggatggatgttctactatgagagaggaagagggagggtgagcgaattgaaaaccacggctggcagtcgaaagagaagggagttagagcgattaagagagaaaaacaattttgaaaattagggtttaatgagagagaaaaataaataaaaatacgatatttcgaattaataattacaaaaaatagca

SEQ ID NO: 107674 - DNA, 621 bp, Cannabis sativa
tagaaattaagatttggtaaaatgttatttagtatatatttattgtatttattattttttatttgggattgatgtgttattatatattgagataaagtcaaaactcatttgaatcaattttgttcaaatttggcatactaaaattttaaagtttgtctctcattctaaatgagttgattgaaacatgatgtcgccaaagcaacctctcttgtgtagattgctcatgaggaatgttagatgtttgtgtgtgtgtttctcatgtaagtattgatcggcccaaaggaaggttatacttattttgagggcacacatacttgtggtgataaatatgtgacaattataaggtttccatgtgaacaatatgtacagtccaaagattgacaaattgtttgacaggatttattgtcaatatttgattgctacaacaagagtaccgcttacaagtaatattactgtctgaagacttgatattaatgtgtgtttggtatcttgagatgggatttaccattatttgaacttgttgtgttatatgaattcctttgtgaaccttgtttaataatttaagggcaaaaaaattgctaaaagatctttatttaataataaattacaaaaaaattaatt

SEQ ID NO: 107675 - DNA, 538 bp, Cannabis sativa
  modified_base (28)..(44): a, c, t, g, unknown or other
accaccgtcttactcactatgattgagnnnnnnnnnnnnnnnnngtgggcatgtcactctttcactcaaggttttgaatatggaagaacaatgaaggaggctgaaatcactcaggaaggaactctctaatctactagttctcagagaatgaaaactagattttggtaggttgaatagtcaagttgtcaagagcatgagaatagagcatcatgttccttttatagtgtttcaactagggcttaaggctgaattatatggattaaaaaagaataaaatattgggtgaaaattcaatactagggcggccataaaggaccaatctctagttacaattttgccacttttttcaaccacttattcttctttcaataataccatatttttcaattcgatcttataaatgcaaaaacaattatttaataattacaattcattatcaaattaaattgtcatttatataatttattaattagaccatacaaagtgtcttaattaacaaattgaccccaaaaccactttttttcacaattaagccctta

SEQ ID NO: 107676 - DNA, 638 bp, Cannabis sativa
ctgcaaaatttcttggtaagtttgaagcaactcatagcataggtaggaattgattgaaccactgctttgagtaacacttcttttcccccgatcgaaaatattttttcattccatgaatgaagaagcttccaaactctttctttgatatggctgaatagttcttgcttgtctctaccagaataagaaggcaagcccaagtaccgttcatgacattccgtaataggcatatccaaagtatgagcaaagaaatttttgatgtcatcggctgtgtttggagagaaagacatcacagatttattattgtttaacatctgacctgatgcttgatgatatgtgtcaagagtcctttgaattgcaatggccgattggttattagctcgacaaaacaacaaactatcatcagcgaaaaggagatgtgaaacagatggataatgcctagttaaccgtaaaccctctaaattgccaacagcttcttcatactgcaaaagtcgagagagtccttcagaacaaataaggaacaagtaaggagatagtggatctccctgtctcaaccctcgggatggttgaacatggcctacaacttccccatttagtgaaaatgagaaagaactagagcaaatgcaattcatgattagtga

SEQ ID NO: 107677 - DNA, 915 bp, Cannabis sativa
aggttttgaaatcccaaattttaatatagtcatattatatgtcgttggactcggttttgaatgtagaatgcgatgatgataattatttaaccatttgatggtataggtgagattaatatataagattggacaaaataatcggagctcgggacttgagagcttaagattgtcttttggataaagtttaatgacttgggagaggtagggactcaacttgattattggacttgatttttatatgtgtagtataacattggacatattacaatttttatgattaacaaaattgtttgaaaaattgaaaacttaatctacatatttttctggactgttcttgggcactgagtgccaaatatatttttgtgtgcaaatatttatgcaggttatgattttttggtttattcaaaataaagttgttatgttgccgaagtttttttaaaaaataaaaaggaatatgttctttgttatgattattatttgcctgctttggttataccgatgagagcaatgttgatcatgttcggtgcatattgttgtttcatgacctagtctctgtgtcatcataggtagatcaggtgtgcagtcacctgtaggtgaaagacctagaatttgtacagggagtgaattaaatctgagccccggtattatggtggatatcagatgcaactacccaattttggatgtcgttttctatgattgatattgagagctaggggtctagtggacggtgtaatatgcatttgacttttgatttgtgattatttgtggtctctctactttgtttatacattttgatactagtgatgagatattttatttgtacaaagctaaccatgcaggaattttttttaaaccagtgtaacaccctaactaacataggcgtattacgttatttttaaacatgttgtgcagctc

SEQ ID NO: 107678 - DNA, 784 bp, Cannabis sativa
cactgtgcattggtaaaaaaaacttgtttttctaattctacccaatgtattcatgacttgaggttttgtttgagagatagataagaaaataataaaaagaaatgaaaaagtatctcttctatataaaatgtggttatataacagaattcttggtttgagaaattattagggttgactttttcttttaaataaaaaaaataataaattataagcctaagccataatttaaaagtgattatctaactgtgcattttaggtttaacgattttttttagggaaaaaaacatgaaaatacaaaaaaggaaaaaaaattacaatattactatgggccgggccattcaacatttatacagtccaaaactaaaaaattacaaaaataccacctggtctataccttaagccacacggaatgaacgaagaagatggacatacctccatcgttcaaatcagcaacacaaccaaaatgaaaccaaaacgagggtaatgcgaccatcgattccggcaaaaattaactggaaaagaaaaactgcaatgatttaaacagaaaattatgaaaaaaaaccagaaaaactgggaagaaactgaaattaaacatttgattttggttttaatcattcaaaacaactccctatacaatcgaaaaatccagattcatgcaatgtaaatctgtactaaacagatctgaagcttcccctcgaatccaaaacaatgtatgaaatgaaattttttaaaatactaaatctacgttatatacagttgtattctggttgatttctggtttaca

SEQ ID NO: 107679 - DNA, 1304 bp, Cannabis sativa
ggggaatccgataatgattgataaacacactaaggatcgaacccgagttcaattcgctcgagtccttgtggaaatggaaattactgataatcctgatcgaactttttggtttgttaatgaatatgggcagttggttgagcaggaaatagagtatgaatggttgccggtgaagtgcaaacatacattgtggtggttttgggcacacacataatggatggctgaatgaatgtatgtaagaaggtagaaaagccaaaagaagctctcaaagagaatgtttctcagcaacaagcagaaggtgcgactactgaagctttaacagtagttaaacctgctgctgaagaaaatttggcagcagccattgttcaggaagtctgtaatgaagatcaaagcaacaaaggtttatctgaaggacatcttaaaggggcggcagaccgtacagagaaggaaattgttgggggttggaaagctaccaaaagcagaaataccaagggctcgggctcaacaagaaaagtcttggactctaacgagaaggttcttaggaattcttttgcgatcctaacgggggaacaaattgaagaaatagggggagtaagtcttgacagttagtgtttgatggatttttgtaatataagtagttggaatgttaggggtatgaataaaaaagagaaacaagagaaagttgcggaagtgttgagaagaaataaaataggagttggggctttggttgaaactaaggttaaaggggagaggcttcaagcaatgatggtgaattgcttttctcattgggatttttattctagtaataaaatggaaggaaggatccttttgctttggagaaagaagtttgtgaatgtagaagttatagaagactctaagcaacatgttcattgtctaatcaaaatgatagggcagaaaaaggatttttttgcttcctttgtatatggagctaatactgtagaaggaaggaaagatctttggtttgctctttcaaagatcaatgtaactaaagcttggattattcttggagatttcaatgcggtgttcaaccatgatgatagacaaggggggaatgcggtcagtgcttcagagcttgaggattctaatgattgggtggttaactcttctgtagggccgatgaaacggactggatcgaatttcacttggactaataaacagaatagtaagatcttctcccgaatagatcatgttttccataatgaggattgggttgatgatttcccgaacacatcagctcacttctcttgggaaacttgctcagatcattgcctttgtgtgattcattc

SEQ ID NO: 107680 - DNA, 589 bp, Cannabis sativa
atgtcaagcaatttattgctctacaaaaggctggtctagttggtctcctcgagacgagggttaagtcttcaaaacttggagacttataccaaagaatgtttcaggggtggtgcttcacatcaaacttagcatggcataaaggtggaagaataataatggcttggaatccgcttctttttaatatcactatcatcaattgtaatagtaaactgattcattctcatattgagactttaaacaacaggtataagttgtttattacctttgtttatggtttcaatgatgaaaatgggaggaaagttctatggaatgatttgcgtagtatttctagtcaggagccgtgggttatatttggtgactttaatgatatactctctaaagatgagagaattggagacaaggcaagagttggcacttctacagctttcttagattgtgttaatgactgtcaaattttatatgttaaaagcagtggttgttttttcacttggagtaataagcaacatgcaagtgatagaatctattccaagattgatcgggtactagctaatcaatcttggatggttttattcacaagggctgaagctct

SEQ ID NO: 107681 - DNA, 974 bp, Cannabis sativa
cgcattaaccttgggtgaggcacctctatccgccacaattatgcaagattttctggttgtcgacctgccatcaacttacaatatattactgggtcatgcagcattgatcgtactgggggaagttagttcgatcaagcatttatccctaaaatttcaaagtctagagggtgtgggagtagtgcgaggcaatcagatgttagctcgcgattgctatcgcatagagctacaacacagaaaagatggtcatagttaatggcagtattgatagagaagagcaaaaagaagtatgaagatcttgatcctcgaattcaagatgaaagaaacttatttgaaccaattaaagaattggaataagtttttatacccaaaattcagctactcaggaggacacgtgtcaaactaggaagaatgtgaatcaataaaatgtaatggtaattatatttgaaaatggaataactcattaatacaggattgacagagtatatttacaacttgctgactgaaaggtcttacgtgagataaagatatacaaactgttgtcttgcgcattaatgagaaaccatatgacatgagatgagcaaaatgaggcatcaacctcgttacgcatgaagagacgtaagcaagatataatgactgctaagacacttagcgtataatacacagtatacaaactaagtataacagtcgggtaaacccaaacaattgataaagaggcgtccatctcattatatgaaggcacgctcgtggtaccttcactaatcagctccagacatctttcaatgggattcacagctccgtcgagtcagttctctcagatagaagctgacattcaaatgatgttggctattgaagttcaccttgttgccaagaactgcaattttcatatggagcattatgtcttcaagcacaggaacgacgaggcttacatcatcaacccttcgaaaacatgtgaaaagctccagctctctaccaag

SEQ ID NO: 107682 - DNA, 666 bp, Cannabis sativa
  modified_base (579)..(586): a, c, t, g, unknown or other
aatctgttccagtttctgttcatgaatctcccattgttgctgcaccagcatcaactcctgttgctgcaccagcatcaactcctgttgctgcaccagaaccaactcctgttgctgcatcagaacttacacctgcttctgcaccagaaactgtatctgcagcaacacaaccagttattcctcacaattctcatgtaatgcaaaccaggggaaagtctggaatacacaaacctaaagtctatttcactacaaagattccacgaaatgtcaaagaggccttacaacaagaacaatggaatcaagctatgaccgatgagatgcttgcattgacaagaaatggaacttatactcttgttccattaccagaaggaaggactcccataggatgcaaatgggtttttagggagaaagaaaactctgatggaacacacaacaaattcaaagcccgtcttgtagccaaaggctttcatcaacaaccggggttcgactttactgagaccttcagcccagttgtcgaacccgtgaccattcgaattgtacttacccttgctatatcaaatggctggtctatcaagcaacttnnnnnnnncaatgcctttcttaatggcacattaaatgaggaagtctacatgctccaaccccccagttttgagatcaccacagctccta

SEQ ID NO: 107683 - DNA, 719 bp, Cannabis sativa
acttattagtaaacatgccataacccctaaccccaaacccctacccatacccctaccctctaaccctaacatctaacccctaaacccgaaccctaaaccctaaaccctaaaccccaaacatgaaaacccaaatcctacaccattcccattccccggcccaatccaattcccatttgcattcacattcctattctcattcccattccccagccaatttcctttctattccattcccattcctattctcattcccattcccattcccatcccgattcccatccccattcccattccctggcccgttcccattcgcataccaattcccaatcccttagcccttcccattctcatttcctttcccattctctcccccattcccatttccattcctattcccaatcctattcccatattcattgccattcccattcccaatctcattcccatttcctagcccattcccattcccccggctcattcccattcccagtccgttcccaaccacaaaaccctaatggcatggaaactaataagtaatgggaatcaatggtaaggtaatgattcccttactaacattttttaaattaggaaagggagaacttgattaaataagggagaaaagaaagggaggactttccccaccaattttgtaaggaatgccattaatggcacgtttactataagtattcaaaatcataataaattaatagagaaatgta

SEQ ID NO: 107684 - DNA, 594 bp, Cannabis sativa
  modified_base (40)..(62): a, c, t, g, unknown or other
ggacccaagtctttaatttcgaattcctcaccaagtcttnnnnnnnnnnnnnnnnnnnnnnnaatgtcatccccagttatcacaatatcatctacatacacaattaaagtagccacatttccttcctctgaatgtttgtagaacatagtgtgatccgcttgactttgagtgtaaccaaacatcttcaaaaccttactaaagcattataaccaagctctaggggattgtttaagatcatacaaggatttcttcaatttatacacttttccaactccaaactttttttcgaaacctggtgggacactcatataaaattcctcttcaaggtctccattaagaaaagcattcttcacgtctaactagtttaaaggccaattatagttaactgctaaagatagtagaatccgtatagaattaatttttggaatagatgcaaaagtctcttgataatctattccataggtttgagtaaagcctttggccacaagcctcgctttaaacctctcaatacttccatcagctttaaattttactgtaaacacccatttacaccctagaatcttcttgtcgctcggtaacattacaatctcccaa

SEQ ID NO: 107685 - DNA, 1015 bp, Cannabis sativa
ctctaaaattaaattcttaaaaaataaagcatacaaagatgtcccataatatgcaacaaactcaacatatatagtagagtagatgatgcaatataaagtctatttaacactttttcaagaaatagttgcactaaccaaagtaaaaatataacgagaagttgactttaattcatctacacaaccacaaaaatctgaatatgaataaccaacaactcagagattgtcgacatgcttatatataagcataaaactctccgttctttgcaaatatagcatgaatttcttggctatagcccaatgatcatgatcagataaatatctcccaagaatattgactataaaagtaatatcaggtctagtgcaaacacttgaggacatatcaaaatccattctacacttgcatatgggatatttttcttttcttctctttccaagtcgtccttaggacattgttatttagtaaatttgtcccgttttagaagaggaacatcaccatccttacataaattcatgttgaaccttttgcgcacacgattaatgtaagcttcttaagataagtcaagaactttttcgattcttgtcacgatgaatctcaatctccagaaaaaaaaaatatgccttccaagatccttcatatcaaagttggcaaacaaaaaaattttagtctcattagtaatgacaaatcacagctgcttgcaagtaaaatgtcactcacataaagaacaagaaaaatataacgattctcactaatcttcatataaatacactagtcaaaattattctcaatgaaactaagcttatcaaacttcaagtaccactgatgagatattgttttagaccataaatgcatcgtttcaatttataaaccaaattatcatttctatttttcttgaagccttcaggttgaaacatataaacttgctcaaataatttcctattcagaaaagcagttttaacatccatttgatgcaatcatatattaaaatatgcaactaaagcaataataagtttgaat

SEQ ID NO: 107686 - DNA, 639 bp, Cannabis sativa
ggttattaaatgctgatgtgcattgaaaccacaaaactgccagaatcagaggacatgcatttttttaaaatggattatgacaaatatgccctctataatcatttacaaagcacttttcattaaaaagaaatttttaaggggcaattgttatacccaaaatttggctagtactttagaggaggacacatgtcaacctgggagaatatgaatcaacgaatagaatggcaattgtattaagggatattaaaatggaataactcattaaatgcgagattgacagagtatatttataactcgctgactgtaaagtcttaagcgagataaggatgtacaacctattgactcatgcgttgacaagaaaccatttcacatcagaagacacaatcataagggtggcataaataatacccgacgaggaatcaacctcgctacgtataagaaggtaatgatgagacatgttgactgttagaacacttagtgcataatatacattatacaaactaagcataacagttggttgagtttgaacaacaaatagcgacacatccatcttgctataggaaggcatactcatgataccttcactaatcagcttcagacatctttcaatgagatccactactccgtcgagtcagctct

SEQ ID NO: 107687 - DNA, 1163 bp, Cannabis sativa
  modified_base (1004)..(1013): a, c, t, g, unknown or other
ctattggattacctgcctaggctattataaagtatgttagaaagtagcatattgataattttgataagaatatgtgtatggtatatgcatatagatgttgatatccgtttgagttttaaatggtttgaagatgtggactaaatatgtgataagttatacagtaagggcaatcaaataatctgattaacaagctatttgggctcggggcaaacagtaagaaagagaattctttattgccataatgttgggaacatgtaaattctgctatgcaagatagacaacaaggaaaaatagatctgagatctgaaagaacaataggctcatcttgtatttgttcttgtattaccgacacttcctgttgtaccactatatgtgatggaatatatgaagtcaacttactagtagatcaggaagcaaaaactaaatgaaccaccaattatgggacaggataaaaaagttttagggtggtcaagatagcagttaaggtgagaataagaaattgtgaccttatcctgagtgttcaagatgttaaaaggcgccatttgaaccattgtagagccatatcttgttttattgtggggtagtgggtcatttgaaaagaacctacccgtagttaagaaagactgatgttaaaggagaaaagtgtatgggtactgcccaagtgctggttatgactcaaggggacttaggtaccggtccttcgaccgactcaaattagaatttatgggaaatattataattgttattttaatatatattggtattaagcattgtactctcaattggggggaacatcaaaagatctaacggactgtgcctgtgtgttatttagtggtagttcatctgacagggtaaaaaattgacaatatgagttaaatttgttggtaatcctaagtggaatataggacatgactagtaaatggaggtatcaatctaattaattcaaataacaaaatcttttgtttaaaagtgatgtagcgttagtgttatagtgagatttctcnnnnnnnnnnactcgagaccagactcctatttaaaggacacgtatattcagatttaaaatgaaagctgaaatgtccatgagagacttctcgaagtttagacctcgcccaggataaaaccagcgagatactgcgagtacgacctaagtcggatcgcatcat

SEQ ID NO: 107688 - DNA, 1537 bp, Cannabis sativa
  modified_base (719)..(722): a, c, t, g, unknown or other
accatgctagaaagcataaagtatagagctgtccaatccacggtcactggttccacttgtgggccaagtggtaggtagccaaaccttatctgaaaattccttaggtggagttatacctaataactccatccaaacagacggtttcggccaacaaactggccaaatcaaccaaacactgagacaacctggtgtttcagtattcaacagattgggtccagcccatgatctcaaggatgatttgaatagaaagaggggtctggacgaacaatatgttcaaccggccactcatcttggtatccgcatctaggacccaactctaagagatcctgatgtgacacaggtcagccaagaggctgaagtagttcacccatatgtgcaagcacaattggatgaattgtaaaatatgttccaaggcctagctggccaaaaactcactgatctcgagttggaccgagcacgcaaatcaccttcactccagagatcaacgttctggagctacccctcaagttcaaaatgctgacctggaagatgtacataggaaggaggatcccttgtcacctcttaagtatttttaaatgcaaatggatttgcaaggggtacgaggagatgtgcggtgtagagtattccctgctacgctttcagaagccgcacaacagtgtgtttcaagttaccactaggaaggtttaactcctggaaagccttctcctcggagttccatnnnnagttctcttcttctcgccaactcccattacatttagaagacttggtcgaagtgaagcaaagaccaggagagcttctccaagcctatataagcaaattcatgacagaagctacgaaagtagcacggttaactgaagaagcgaggttggccacaatactgggggggcattgaagtacttggagaattgtggaaagacatcaagaaaagtggccctgtagactctatggcagattttctagaccgaacagatgggtttatcaagcttgaagaggccattcaacgggcaaatgtcgagcctaagttgggccaatgacaggtcccctcggcaggatcatctattcagaatccccattaccctagcagttcaaatccgagcggcaaaagatctaataacaatggtagacaaggcaatggaaagaagggaaagttcacaggcaaagccgaacaaacctctaaagataatccttccaagttcattgctttttctgtcttaactgacgacctggagacaatctacaaggcaacccagtctgtggtcccgtacaaaaaacttgctcccatgaaaaagacataagcaagcgggacatgtccaaattttgccgttttcatggagactatggccatgacactaatgagtgcaacaacctgaagcgggaaattgaattcgtgataaggaaaaataacccgcatgtgtagaagtatgtcaaggtcaaccaaaatcaacgggccgcccaagtagacgacaaccaagatctattaatgcctccactggtgggcagacatttacaagtcatcatcgagggcacccatattgtt

SEQ ID NO: 107689 - DNA, 526 bp, Cannabis sativa
aaggtggatatggccaaaagctttaggaaatattgttctcaaacttctaatcttctcagcaaccgcaagcatatcatataaggtcactagttgtaatcgaaatcaaaccaagcattccaaatatatttttattatgttgtaaccaaactgaatcaaataaaataaaataaagataaaaacctaaacattcaactatacaaggatttgtgaaccagatcgaatccttactcaagcccaaaacatttaaacacaatatagaaatagatagatctgatccaaaaaatacttaaacacagggaaattaaacacaaaaataagaacaaaatcgatcagataccattatatgatacttatgtagagagagatacataccagacgaatacaaatagggatagatctgaagcacttgcgccaaatcggagaagatgactgaaattccggccaaatcggccggagaagatgactggaaccagtgagactatggcagtggtgagagagagagagtttgggttaataatacaataca

SEQ ID NO: 107690 - DNA, 1438 bp, Cannabis sativa
  modified_base (26)..(40): a, c, t, g, unknown or other
  modified_base (695)..(709): a, c, t, g, unknown or other
attccccctgaactattgagattgtnnnnnnnnnnnnnnnttgtctaatttcattcaatttaataattttagtgatcgtttatttactaaaccatgctccccaaattttgatatctaccaaattatgcccctcgaactttgacatgtactaaaccatgccccctgaactttcatccatgttagattttttttactaaaactggacaaaagtccttaaatccaacaatctcaatagttcatgggcatttttaacgaccttaaaagttcaggagcatgatttggtacatgtcaaagttcggggagcaaaaatcttaattagcctatttattaattccacgattactccactataaatatagaatttcactcttagtaattatagaattatatttattagagtttaactgtagtgtccattgatataatcaatttcttttcagtgattaatcctccatgtcttaattcgcaattagttttgctcaaaataccattttacccttctaattacttctatatcctttagttttattaattcactagtgaaagtataattcaagatcccatctgaatttgtgcacaacattctaaagggaaccaacattcgatcagttagaaaagtcaagatttcatatttgtacatcatgttcacaaccatccatattattagttcctaaaacagaagttgtaagaatcannnnnnnnnnnnnnntttaacgagtgaatcaaagaaactgataacatgaacaaaagttcatgataagtcaagatttaggtcgatctactattgatcatcataatgatatgaattaggtctttatgataaacgacatgttaataaacacagctttattcatataggtcattgtcatatataacctctattatatacagcactttcacttagatgtttcactacatcagtaatccgaactgagattatttgcacagaagaatgggcatcagtgaactgtggtcttagttctctgttcagctacaagctacaacctcatatataaataagaaactttttgatatttaatataaatttttcaataataaatattatcaatttaacattcacatatatatcaaatgtttactctttatttaataatcagaattatattcacaggtttttcaagatataaactctaatacttttaatggaaaagcattgatatttggatatcagtggtgcccaacacattttagagatgacgtcctacgatttgttagtgatatttcttaaaaactattacattaaattatatgagacttaatacttaattatactaataataatgtcacttaggaaggtgcagggccgtcttaaacattgtattttaaaaattaggccccttataaaaaaaaatgaatttttacaaaaatactaaattttttagtaaaagtttacaattttattatcacacaatttttt

SEQ ID NO: 107691 - DNA, 619 bp, Cannabis sativa
atatggatttctatattcattttataatgtgtacattgctttatttttcgttttttatattttttttagagtttttctatattattaaatattatgtatttgtgtatgatgatagtggctagatttttgtcggaattggacattgcattgcgcttataaagtaaaaatttaaaccttaatatatagtatgtatgtatatattttgtgttattgaatatatgtatatattttatgaattttgtgtatatatattgtgtattgtacttataaaaatattgtaattgtattatatatattctaagtattgtatatgtattgtgaataagaataagatagttgagtatcaattagtttaaaaattaaatttttaaaattttgttggtgtaggatataatgtattatacatatatgtaactttttttagtaatagataagaaacaatagctcttttatttattttttaatttatttattgaattttttttttggttcctatttatgtatttttatattttttactaactagtaactagttactcataaatgatataactagtaagttgctaaataattaaaattttaattttgtcatatttcattataggttgcgagctaattt

SEQ ID NO: 107692 - DNA, 597 bp, Cannabis sativa
ttttttatttatttgacaaccggttgttgtaggtttcttcaccagttgtcaatttaattttttaattaaaaaataaaaaggtgcgaaaaggtacaattaaattactgtttgtgatagttaaggtacgaaaaggtacatccaagttactgtctgtggtagtttacaaaattactgcagacagtgggtccatgttctcggagtgaggttattttcgtcttttcattccttcatatcatctatgtatttgtgcgatggtagttaagtatattattgtttctgcatgatgtttagtaaaattagtttacaaaatatcacctaccgagtatgtttgtttatgtttcgtagtacattagtaagaaaaatttcttataactcataaaattatgtgttgttatatattgagttttacattggtgtatttattttattttaattattttttagattaaaaattactatagaaatatttttttttcaccttgtaagattagtttttttaactaaaataatttagttgttcatcaataataattttaagatttgttcaagatgagataattaccttaaacacctcaaacataacatgaagtaaataaa

SEQ ID NO: 107693 - DNA, 533 bp, Cannabis sativa
agactcctcacttgtggtgatactttgatggggaaaatttttaaagctcgctacttctctacgggttcttttctgtcggctacacttggttctaatccaagttacatttggaggagtgttcttgaagcccaggacttggttcgggctggggttaggaagatggtgggtgatgggtcaacaacgaaatttttgatggatccgtggctagctgatgagttgaatccgttcattgagtctcggcacccagctctagttggtaactcagtaaagtctctaatgaagcccgatgaaattgaatgggatgatgaggtgattttggatgtgttaaccgagcgagatcaagctctagtcttcaaaattccactctcacaacactatgtcaacgacacctggtattggatgaaggaggaccgtggtttattcacggtcaagagtgcttacggcctgcaacaagagatcaaaggtaacagtggtatggatgccaactctggtttttggaagcaactttggcagctgaaactccccccgaaagt

SEQ ID NO: 107694 - DNA, 1631 bp, Cannabis sativa
  modified_base (1467)..(1468): a, c, t, g, unknown or other
attccggggacaaaatttgatccccgtccccaccccattccctatttagacggggaatccccgcctcattagggaagggtccccgcggggcaccatccccatggagaaaatgtgcatccctacttgtaagctgatagtaacctgaaaattaatttccttataaaatcttaattaaaattaattatatttgaaattaaattactaataattattaattaattttttacaatttgttactaaataagaatcttttaaaaattatctttttggatttaaattattaaaatatttatagtaaaacccttacaatttaaaaatattacaccaataaccttaattaatagaaaatagtaagaataacctctaattaaatgtaactatacactcaatcttattatcaatactttaagtgccaaataagtgtgtaagtccaagattgattcaagtgatttattttttttttccaaaaaaatttaaaatcttatagcaattatataaaattaaaaataatttttttgccgcactcgacaatgttgtacttcattccaccctctgtcatgtaatttttctttctcagagagcaagtcactttacctaccttctttgcagttctcaattattatactatatatgtatcaattgatcagagtggaatcatagaaaaagaaaaaattataaaagtttaaaaattattgatcgttattggttattgatcttgaatatatattattgaaaggtttgaagttactaaccgttgtcggttattgatcttgaatatgtgttattgaaaaagtttgaaagttaatattgttattgcttattgatcttgaatatgtattattgaaaatttaaaagttattaatgattattggttatagatcttgaacatgtgttcttgataaacttaccaaccgatgttattgattattattaattattaatttttactatgtatcgtcaacaaagttagaacatcattactgtttattgatcttgaatatgtgttactgataaaaatatacatatatgaagttattagtttcaagttctatctaacacatgtaacttgaagatataaagatgaaatgggagtttagatatgatgtataaatcgtgaattctcatattctagtatttcgtacttttctcaaactttgtgattaattactcaaaaatatatttagaagggtgaaagtttaaattttataaaataataaagttttattgtaaatattataattaaatagtttaactgttaaaaaaaatatatttgagacttaattataaaaataaaattattaatattaattgctaaaaagggtcttattaaatattcaaattaaaaattaattattttaagaaataattaataatagttaatttaattctaaaaaaagtatttttacatgttgagaatctgctattacatgtcaacaaaaatctaactatcatggttacaataaaaanntaaccattgagtagtcacccattgtatatatgtgttgtaatatttatatataattaatctcatacttttgtccttgtattatttttataattaagttgtaatttatatcttgatttattttccattgatatataaaatatcttacaatcaaaagtttatttct

SEQ ID NO: 107695 - DNA, 1264 bp, Cannabis sativa
aacaaaactaacaacaatgaaaaaataaaacaataaaaattgatttaaacgggttaacccaaccaaaccgacaaaaatcattgagagggtaacactttttatttttattttttattggactgattacaattagatatttgcaacccgacatttatattggattagtaaaaatatactatagcctgaccaaaccgactgatgtatacccctaatatctccatcaatagaataaaaaattggtaaaagatggggtactcaataccttagattttactgacttgatacttgtgtggattgcattaaaggaaagcaaacctccaagtctgtcaaaaatagtgtccataagagttctgaaatattagaaatcatacatactgatatatgtagtccagacatggactcacatgttcagaaatatttcatctcattcatagatgattactcacgctacatgtatatatacttacttcataacaaaagtgaagcattagatgtctttaagatatttaaagctgaagtagagaaacaatgcaacaagcaaattaagatagtgagattagatagaagaggtgagtattatggtaaatacacagaagatggacaaacacctggtccattttgtgaagtttcttgaagaaaataggattcttgcccattacaccttgcccggtacactcgagcaatatggtgttgcagaaaggagaaaccgaacattaatggacatggtgcagagtatgcttagcaacaactctaattttcctaaatccttatggattgaagctctaaaggcatctatgtacatattaaaccgagttccaacaaaggtagtctcaaaaactccttttaaattatgaaaaggttggaaaccaagtttaaaccatatacacatttggagatgtccatctgaagtcagaatatataatccacaagagaagaaattagacccaaggaccataagagtattctttatagggtacgctgaaaagtctaaaagttacaagttttattgtccatctcatagcacaagaattgtggaatcaatgaatgcaaaatttcttgaaaatcccttgattagtgggagtgatcaatcaaaggacttaggtcccgagaaagatcctttagaaccttccacttcaagagcaagattgataatggtcaacacccttgtagttcaaatggatgttgtacaaccattaccagtcattgaagatccaatgggttttatgccctaaataaaacttatttcatataatcagatttactt

SEQ ID NO: 107696 - DNA, 742 bp, Cannabis sativa
actcaaaatttaggtcgatctactattgatcatcgttatgatatgaattaggtctttatagaaaacagtaagtttgataaagacaaatttatttatattgatccttttcatatataatctctattatatacaacacattcacttaaatgccatcctacatcagtaatcggaactgagattacttgcaccaaacaacgagcattagtgaaccgtactagcaaccattaattaaaaattccataactttaatatgttgttgactatattattcatagctaagtgatcttagttatctgtacaactacaagtcacagtctcatatatgaataaagaattttttgatatttatataaataatctaataataaatattaataatttaacattcatgcatataccaaaatattcaagtctttattaataattagaaatgtctttatagacatctcagggcataaactctaaaaatctcccacttaccctaaaagcaaaccgggcatctcccttagtctcatattaattatatgacccataaaagatttcgctggtagcgtctttgtgaatggatcttccaggttatattttgacacaatctttaagtccattatatcacctttctctactatattttttagtagatggtacttcctctcaatgtgcttgcctctcttgtggctccttagttccttagagttggccaccgctccactgctgtcatagtagagcacaagtggtttttcta

SEQ ID NO: 107697 - DNA, 1069 bp, Cannabis sativa
aggaaaatcaaaaattgtgaatgaattttgattaaagaaccttgacgagaaagaaaaatcaaaagtttcaaatgagatataactcataagctatatgtgaagttgaatactaacggctcgcattgttgtataggaggaaagtagtattaaacgagagaccaccaagatgcgttgaaaaaatacttaaacctaatatatgaatatatggtctaactattcatataaagcaatcaaaaatatacaaagtgataaatcattaacaatatactcaagtttgcttaaaaacagattataattatttatgcgaagtagaattgataattgctcacaaatctaaagcatagcagattataactgctctcgtacatagtagattactaactacttaaataatatcaaaggaaatcacgagcaatggaaaggcctaaaatgttttaagtttgatcaaaatataattgtttaagttgtgaataaaatcgcaaataagcaaatatattaagttcaaatataaaagtatgaagaattcaataaagatagattaaaagcaacgttggccatccaaccttgtaaatttgtctttacaaaagtgccacaaggggcaaactattatctcggccttaaggccatttgttaaataaaataaaaataaataaacaccaagcctacatagtaggatacttggacagttcttcttctactgctgccttggcatcttcttcctccttcttagtcttctcacagaaggcaaggatttcctcctcagattctcccaataaactggtatcaatctttggatttgccatccaagcttggaaaatgggtacggaggccaaagataatgcattttcaatggtttcggcctctttcccatcaagtgttaccttggctgcatcaagttccccttggagctttttgcatgaaatcgatcttatcctttgcttccttcttggcagcttcaagattcttcttcatcctctcggcatctttagtaaggtgagtaatctccagttgggcatcattccattgcttagccacaaccttgcggtggcctatcaagttctggacctca

SEQ ID NO: 107698 - DNA, 961 bp, Cannabis sativa
tatttctttagtgagttaaatatttccaacccatgaatctttagataagtggacgagtgctcacacatgtaacaacttcctgagatccatgatcaagaaagcccaatgagatttggtatggcaactgaccaatgaaggtattttttcaatcacttaggggtaaataagacatagtatacgagagttatacacgttacatgagcattcacaaaaaattcatagtacacgagatccatgtatgtcacatacaccttggtatacaggagctgggtgttaccctggtatacgagagccaggggttgcagtggcattcaaaaattttgcgcacctcagttagtatttctatagtttaatgaaatgttgatgttgtccctagtaaccgagtttcttaatcctaaggtgctagagcgagtgctggtaagtcattaagttgaacaaccgcacatacagactatttacacgccatagttaatcattgttatggtataaacgcttgaggtcacacaagaatataacgaccgagtttattaatctaaagtgctagtgcaagtgttcctcctcagagcacaaaaatcaaaaagaaaagaaaagcatcatcaattacagaaagctctttggaagcaggacgttgcatccaaaagagattttctagttgatggaagaataccctctgagagtgggatggtaccccatttgtggtattctttcagtggctaaactcctccaaagtatgggacgttgcacatgtttagtctaatttgtcttttttatttttcctcccttaaagttttttctttaacaaggttttatgagttgaaatcatcaaaccaggttcttcaaaaacctatgattttacccctatacaaaagatctggcaggttttttcgcactacagtttgatagtgattcatcttactcatgatcataaagtgaactcatgcttgagcaccaagcacacaag

SEQ ID NO: 107699 - DNA, 621 bp, Cannabis sativa
ttgttttgtcaagccactagagaagctgctgatagcatctccaacctcctgcacacctttgaaaatgcatccggtcaaaaagtcaattacacaaagtcttcgatcttcttcagtcccaatactgagactaccattcgtaatctggtttgtgatacactccatatgtctgaagctcttgaaggcagtctttatctaggtcttccaaatattataggccgcaacaagaatgatgtgcttggctttattaaaaataaagtcattgctcgaattaacagctgggatggaaagtttctttctcgtgctggaaaagaaatcttactcaaaacagtcattcaatcttcaccaacatatgctatgagtgtttttcttattccaattggtacttgtaaggagatagaaaaattaatggctagtttctggtggaagactaactctagtaaagggcgaggcatcatctagatgtcgtgggatcgcttagcaactcctaaagaagaaggtggaatggggtttaggcatcttcatgattttaatatcgccatgcttgccaaacaagggtggcgtttattgtgcaagcctgactctcttgctggtagagtctacaaagcaaagtactttccaaat

SEQ ID NO: 107700 - DNA, 721 bp, Cannabis sativa
gaaagaaaaagaagaaaaaaaacatgtggaatattaaattaagtttttggtatatataatttttttaatttattatattaatttttcattatagtatttctgattatagttatagtatgtagtttttgtatgctattatatatctttgtggaaaaaaaaatcatttaatagtatattagtttatgtttgtagtatattcatattggtcttaggtatatcgtttgtatgtgatatgatacatcgtgagagaaagaaagaaaaagaaattgaatattagtttaaatttgacgtatattttattttcactacattatatatattatgcattatattatctcattaaaaaaaacaaaaaaaaaaaaaaaaaaaaacttataaaaagaggacaaccaactggaaggaaggtcccttgaagagaaaaaagaagaattaggatatgattactttaatgataataacttgtatttaatatttcatgcgaatttttaaacttttgtaatagatattttaatacttaaatgtgtcaaatatatacatattgttttttataatttcttttaaaggaataaaacatataataataccttttatataatgaatggtattttaggtattaaaaagtaaaaatgacatttactttattattttaaaaggagacattaactatcagtagagttagaaataggattatttacttacatttctcttttttttttttttt

SEQ ID NO: 107701 - DNA, 526 bp, Cannabis sativa
tatatatatattttgttttttgtatgagagaattttttatttgaaatattttaaaagtgttaaaaaagggataaaacttaaatatttttgccgcaaattactcttttctttttaatcattgtctctctcatcttttttaacatttgttgcttgtttggtgttggtgtcattatttttttctttttataacattttttattagtttattattttattatttttgctatttattatccatctctctccactttataatttgataattattcaagtttcaaaattgtattatagtctttttgatctttctttattttttttcaaaagtttttttttaaaaaaaaattagtcacaccatttattatttaaagtcaaaaattacattattgtaacatatttttgtaaggtgatcattttaacgaatgggaagcatatattttttcgccaccacacaaaaaaaaaaatccaaaattaaaagtaacactaatgtatcttaaacaacaacattattatatttatctaacataat

SEQ ID NO: 107702 - DNA, 1813 bp, Cannabis sativa
  modified_base (42)..(43): a, c, t, g, unknown or other
  modified_base (1451)..(1465): a, c, t, g, unknown or other
atccaatccaattagaatctaacttttagcatccaatccaanncaattgtaattggatatccaactttttataattagcttagattggatcaattcggttcaattggattggattggatgatgcccaccccttacttcctactcttatgcttggttaaatgttaaattaacttcaaatataataagataatgacttacttttagtttcctgagattccagtttgaggcaatactccctactcttatatttgagaatttaacttaactgttttcttatgaaagaggtaaaattattactgacaatatcatatataatatctcccaaatgattaatagttgaaatttttgatatcttgttacataatagaacctttaaagaccaatatgaaatgaaaacttcttcgtttatttaaataattcctaccctgaggcgtacatggaaattagtaccaaaataaaaagtgaaaaaataaaataaaaagggatctgaccaccccagtttactgatagtatcggtgcatgcggttagcattctaagctctggggacttttgttccatctaatgtctttaaatggcaaagttccatgaccaattttatttatatttgacagaaatataaatactaatattaatatatttgtaaaaataaagactaaatttaaaatataacaaaaaataaataatatgtatatatttaacaaaaatataaatactaacattaatatatgtacaaaaataaattataaatgcagatataaataattatatatataaaaatacaattattaatattgatataaaataaaaaatttaaaggtagaagtataaataattgtatatataataaatattatataacagaaatataaatattaatattaattatattgaataatatatattttattatatataattaaaataataatatgttttacttaagtaatatatataacaataataaataataatatatttataaatttgatatataccttaaactaataataatattaatattatatataattttatatatatataaattttactttaataataaatataatataatcattagtaacagaattatactaacctggattaaagtagtttttcttcttgcaattccccgacaatgtgccaaaaacttattgtgaccaaaaatagtacgttttacatttatcaactcgcaagcgcacgaatctttattgtagtgtagagattgtgaagaatgaggtcgaacccatgggaattgtataagatcgaagaaaatacttatgtaatctaagctattaaaactctaatctagttccaaaaatagtgaggtttttggtataaaaatacaataaagtattttaacggtaaaaatgataaacacagatatttttagtgatattgggagatattattaaggtttagaatccacttaagtgtatataaaaatatnnnnnnnnnnnnnnnttctcataatttaattagtaatcaaacaattattttctaacaaaaaatagatttttcttcgcttttaaaattataacttctaagcattacatgaaaaacaatttaatgtaaatacaaaaaatcaaagaatattatttttaataaaacgtagaaccaagcattaataatttttaactatcaaaaatacgtgatattaaagatgaaagaaattattttaagaaacaaaaatcataagcatatattgtactgtggataaaaaaaaatacttaattgaatacactaggtttcatcgtctgtcttaataataagggaacttagattcccataagaaaattaactaagaatagc

SEQ ID NO: 107703 - DNA, 1502 bp, Cannabis sativa
  modified_base (517)..(521): a, c, t, g, unknown or other
  modified_base (935)..(941): a, c, t, g, unknown or other
acttctaaatacttatagaaactatagattctatctatgattagcctcccactcaattatactatcaagttcctaagatgtaagtattcagccgaccaagctttaacaaacaactctaagaacatagataatacaattaagcaacccatatcaggattaagatctattgacctaagatcaactaactaatattgacttagatagatataacaatgagtttatgatatcttatctgagttcaatatcggtccagtccgatgtatactccatatatccaatcctaacatacttttccaatgtcctagaaatgacataatacttatccaatgtgtaagtaagctctaacgttgattatcatgttagtctaaatctagtgtactgaaattatgagacttaaactttagaacatataatcatgattatatgtcactgtgttgacaacactataatcatgaataactatatgttttggatttaataaattttatacattaaatatataatcatgaaataaatnnnnngaaccatgcaacataaaattatttatgatcttttattaattaataaatttgattacattgaaatgattttatatagggcacaaaacccaacaaacactcacttgcactaatataaaactaaaattacattttaattaatctcaataccttgatttttatatcaagtgtagtatgtagtatttctttgtaataggatttgacaagttgtattcaatacaatctttctccaccattacatctctttagtcacaaaattcttgatattgtgaatttcctttctatatgtctactcctcttgggatacaaaattccttactatttgaaaactatatttgtgcaggtctgaaagcaacactagtagttaatccattattggaataatgccaaaaattgtatagaactttccataggctnnnnnnntatctagtagccttcctggccactttaacattcagtctcactggaagaattagagactccatataggtttttacacttctccaaaaatcactgctccaccccaaagtaatctccatctcataagtagactttctagcattaacgcaagtctagaaatttaatttggtgtagtctaagagtattaaaataccacccttatcatcgaacatatagttcttctttgatcttaagatttacttgattatcttccaatgttcctttcctagattaaactgatacctactataaactcccactcaacagtaggtgcctagcctaatgcattgcaaagcatacatgagacctctcactgttgattcttagggaattcttttcatgacttttatcttttctggaataattgaaactgttccttaaataataaaatctatatctaggagtccaaagacttcttttagaattagccattagaataatgctccagcatcttactaaagtaagttgcatgaactagagtaagtaaattaccaagtatatcacaagtcacaggtttagataatc

SEQ ID NO: 107704 - DNA, 662 bp, Cannabis sativa
aaaaatacaattgagtttttgttgttgtacatttatgatttttctcttcttcttctcttcttctcttctagaattaccattttcctataaaaacactcactaaaagaaaatattaaagaaaaaacaaataatattcattagagaaatcttagagtgccatatatatcaccgcctcatatttattttttttttatatatagatatgtaaaatgcaaaaatataactatatatgtatcttaagaaaaagagtaagcacgagacaccttggtagctatatgagacttaataacttaacaacacaagccatatgaaatggataaaagaattgcaatgtaattttgttattctttccttgacacaccaaagcgagttgtatgaaggataagaaacatacttttttatcactcatctactttttcattcttatttagagtgcgaatacctatcatcaaaataatcaaaataaaaatatatttaataattagtgcacatattgtaagatactcaaaataatgtaaaaactttaagtgaagaataataataatgtttatagaagatgagggatgtgatttttataagaaaaaaaaaaagaagatcaaggattaccatcaagggatgtattatagtattataagttgtttaataagttgagagaattttgg

SEQ ID NO: 107705 - DNA, 778 bp, Cannabis sativa
cgtattttaaagaatgtagaaagaccactcaagttattttgtgacaataattaagcaatgctatattccaataacaatagggactcatccaagtcaaatcatattgatataaagttcctagttgtgaaagaaaaagtacatagtggatagatattcatagagcacattgggaaaaattccataatagcatatctgctcactaaaagattaccgcctaaggtcttccataggcacatggctcatatgggtgttttattgtttgagaatattataatttagtgggagtttgtattttgtttgctttatgtttatttaagacatttatgtatttagttattttctgatcagaaataaagttttcagtttattcactctattttgttatgtttaagtctgacctcactttgggaccaattagaaatagacatgttcggttcacatttcatataatctccatgctacactacatccatgattgatctatatcatgtgactatatttgtatatgtgaccattgatggtagtcatgattgatatgaagaagaccgctttgatcctatatatatgggtatagttgatggacgagattattctgaatacatttacataatagtaaattttgagctcataatgttgtacatttataaggtaacatatgttgcctaagtaggagattgttagattaaaatcttattgtgggtgcatatgtataatgtatatgctacaataaagtgtgatacaaaattaaatgactaattatgttatgagtattaaaagg

SEQ ID NO: 107706 - DNA, 714 bp, Cannabis sativa
  modified_base (89)..(107): a, c, t, g, unknown or other
  modified_base (337)..(341): a, c, t, g, unknown or other
  modified_base (528)..(553): a, c, t, g, unknown or other
tgaatagatttattttattttcaaaataaaattttctttcttgtccttgtaatagaaaatctttagttattccatatgaatggttttannnnnnnnnnnnnnnnnnntacttcttagttccctattctgactacccatttcttgtttaaactaacaatggattttaatcacaagtgtctcctaatcataacagggtgagttccttgaaaccttcccactacgacaaggtaccgtgactaatggtctaagaacataagtggtattgacctcatcggttgtatcaagacaacataggtagtgggaccatcttatgcagaataagatgatagaacacttnnnnnatcaagaaaaaaatatctcctctactttgcttctttgttttcagatttaatcatcttcttagagaagtagtatttgttgaaacaaatactttcttatcttaatgaccatagcatggtccacctctaatcacttagaatagctatcaaatatgtaaacttaagtcaacagttctagcttttcttaagnnnnnnnnnnnnnnnnnnnnnnnnnnagtaatggtttacactaagtacatagccatttcatcattctgaaattttcctatcactagggtattcccctataaggacttaggctagtaactaatcatagacctaatactatcagtattatgcaaactgaatttctggggaggttagttttaatacaatt

SEQ ID NO: 107707 - DNA, 689 bp, Cannabis sativa
aggaaacaattaatattaggtagatttttgggtagtatacttttgcttttactgcaaggttgtaatatattttggggcaattaaatttgttaaggttatatatataaatatatcttaattataatatgtatttaatttataatatgtatttaattttttttatgtatttaattttttttaaaaaaaaaattaaataatttataacattgaaaaatagaatttgaaaatttagaaattactctatataatatttttttaacttttttttataaatttacgatttgggttgttctgttagtttctatgtgagttgctagttacaatttaagttactctgttatttgctatagaagtttctgtgtagaatctgtaaaaaggcaaaaaatatatatattttttaaagtataaaaataaaaaactcccttgaaaatattacacacatacttatatttatatataaaaatatatattatatatttggggtcattttagttgcagtgtattgtatatcattgtttttagagatattgatggctaaaccacttaaattttaaattttttaacacttaatcacaaaaatcaatttcttaggagcaaaactacctaaactcctattctgttttgctctgtacccctccgtctaaaaattatagttaagtgccacaatggactgcccacgtgtacacact

SEQ ID NO: 107708 - DNA, 1167 bp, Cannabis sativa
cacctgttggtgtctgaaacttcagggataggtgtttaattgaactaactgcccctagtcccattaacgctggtagacccagcagtatgttatcggcctacgacaggtcgacaacgagaaagtcttgcattatggtagtggataaaggcgtcttgcccacagttaatgggagttcaattatcccttgacttgctacactatcttttgtaaatctacacagatttaccatgcatggttttaactttgctttctccagtcccattttctttagtgtatccttataaaggatattcattgaacttccattatccaccaacaccctctttattcttttattggtgagtaggattgtgatcacgagcgggtcgacgtgagggtacctcaagtgttttgtgtcttcccctaaaaacacaattggaggttcctcagccttggctctcttagatgattatgaagcaaaggttgattgctcgttcttaacttccttaacatatctcttttgggcattgttactttctcctgcgggatgtggccctcccgagataaataaagtgtcctccccttcaacaggaggaggttgtaatccttggtcgcccgggttattgggcagatttggctggttttgtccattgctttgtcatttcacatattgccagaagtaaccatgcgagatgaggctttctatcttgttcagttgacgacattcttctatcgtatgccctatatccttatggaatttacaaaatttcattgcattccttttatgcctcgtgtgtctcatgggcttaggtttgcgaaatgcgaccctgtgcacatgtgcgaggtagatatttttctgagtttcattaagctcggtataaatagtgtagattagcacgtacttgccgtgctttttctaatttttcttatctttcgctaattccttagagtcgtcaatcctctttgtactagagcctcttggattgtcagcctttgtcaagacggtacttgtcgagacagtgctgggtttacctcccgagccaatctttaacaacttcatctctttccttaattcctcttttcgaacaaacatctgagctctctcattgaactcactgatgtttttcattgggcggccctgtaaatcatcccacagttcacctttagtcatcgagagatcagttgtga

SEQ ID NO: 107709 - DNA, 1410 bp, Cannabis sativa
  modified_base (1058)..(1058): a, c, t, g, unknown or other
gtaatgggttttatttagggcacaaaacccaacaacaaatgtgtcccattcttctacatccttcgaggaaagaaacagttccagtggacagaagaatgtgaaagagctttccaagagctaaagccacaacttgcaaaacctcccatacattcaaaacctatggacggcgaggaactgggaatatacctagctgtcaccgatcatgctgtgagtgccatgctgatcagagaagagaacaacgtacaacacccagtctattacattagtaaaagactcattgaggccgagggccgatatccgttgatagaaaaactgacctactgcctcattctagcaacaaggaagttgaggccttatttcgaagctcgtcctgttcgggtatataccgaccagccactacgacaaatactgcaaaagccagatgcttctggacggttactcaagtgggcagtagagttgggtcagtacgaaatcaccttccaaccccgtacaaaaattaaaggccaagccttggctgactttgtggtagtatgcataggaaaaaaagaaagcataacagaaagcaaccccgagccagcatctcagccaagtaacaatgaagacaaaccgacctagagactacatgtggatgggtcggctacagattaactatctggcgtagggattgccctcgtcacgccagggggcaatacctacacgctgcagtcaagttcggattcaaggcatctaacaacgaagccgagtacgaagctctaatcgctggactaaaactagcccaggagatgaaggccgaacacattgaaatctgcagttattcacagctggtggtaaatcatgtattaggagaatacgaggctcggagagaaaagatgatagcatatctgagcaaaatacacgatcttctcacacaattcaaaagctacggtctcagacaaattccaagagaagaaaatacaactgcagacgcattagctcgattggcaagtagcaatgtaagtgacaaggcaaacttggtccctatcctgttccatgaagagcctagcatcactggcacggangaaatcgaaatgattgatacataccgaaactagatgatgccaatagcagcctacctcaactctggggaactcccaaataaccgaaatgaagctcggaaaatgagaaggaaggcagcaaagtatatcatagtagagggagtcatgtacagaagaggattctcgatgccattactaagatgtgtcactcaagacgaagctgcacgactcgtatatgacgttcacgacgaattctgtggaaatcacgccgctggatagagcttatccaaaaacattcgaagaaaaggttacttctcgccaacgatgattgaagattcgagaggctatgttaagaaatgtgacaaatgccagagat

SEQ ID NO: 107710 - DNA, 660 bp, Cannabis sativa
ttattttaacctgtattttaacctgtatcggtttcccttgaaaaataaataaataaataaataaaatattatagacagattaatagaatatgttatttaaaaagtgattagctgctaacattaatattgtgctaatataatatagtattttttggttttaaaaattaaaagtgcttattacttttaaactatttcatttgcaggttctttttcaattttccaggcagaagcagttgcgttactagtagatttctgttgagctcaagatgtgggacttcccgtggagagggttttttctgattcactttctctagtctcaactttgaagggtcagacaatgtatttgcttgatctgggagttttcttttccgacattaaagttttattgtctagttttcctggggcatctctttcatgtacaacaactttattgttgaggttcatagattggctaagcatgccctttaggatagacaatgaacttttttagatgaaagaaatctccccaaattttgtgtaacttttgttaccatggttattttaacctttatcggttacaataaaaaaaattaaataaaaaatgatatttttatatttttgaattaatattaaatttaaatgtgtaactgaatattcaattaaaaaattaatttaattcaa

SEQ ID NO: 107711 - DNA, 611 bp, Cannabis sativa
gaatatataaggtaagaaaatcggttatgaatgcaaataaatcttaccgtaaaagaaaaaatattttggcatctaactttccaaaaaaggactttacaatccttacctttggcactttagataaacaaaatattttttaacaaagaagtacctgcaaatcaaagctagcaagagaaaataacaactccccctgagtaacacaatcgaaaaccaaaaaaaaacaaaataatatgctaacttttaatccaaaaagatcacaagtaccaaacacaactctccctgaaaaaaagggtcaagagttgagacaacaaacagtttaaaaatagattattactccccctttttgtttatccaagggccaaagataaaaagacatgagaatatagaaatatgtccaacaaaaacataaaaagaaagaaaacttattccccataaagcttgatcaacgaggacaactgcttggacatctcttgctgaacctcctccatggaagcaagtcgattgttcatcacctcattcttgaattcctggacatctgcaggagcagaactcgaacttgcaccagcagcagcagtaacaccagctttaggacgcttgggaaaagctccatc

SEQ ID NO: 107712 - DNA, 961 bp, Cannabis sativa
  modified_base (77)..(91): a, c, t, g, unknown or other
  modified_base (374)..(390): a, c, t, g, unknown or other
ctggtaaaataattccaacacacatccaaatcaatacaattaacatattgatcgttttaaattcatatttcatgaannnnnnnnnnnnnnntggctctgaggctagttgttggagatgttttaccagaatctagatttactaacaagtatgttgatcaacatcctgaatatgaatatctctaaaacaatgaaattaaacacattagagtttagaaaaccttacattgattgcagtggaataatatgactccttctgctcatatctctaaccctttgttcctttctatcgcaaagtattatcaagatctgagcctgaatctctttctctcctttgggttgtttaccaccctcttccgcactatgattgagtactnnnnnnnnnnnnnnnnngcatggcactctatcactatgggcgaatttgattgaagaacaatgaaggagggttcgaatcactatagaaggtgtctctcatctactagttgtcagagaatgaaaactaggtttggtgggttgaagatgaataattagatgagatgagagcatcatgttccttttatagtgttttcactagggcttaagtttgaattatatggattaaaaagaataaaatattgggcaaaaactcactagagtggccggcgacttaaggaccaatctctaattagaattttgccactttatttcaccagttattctttgctaatctctatacatctgatactggtaaacttttccaattccctagaaaggacataacacttatctaaggtgtaagtataccttatcgccgattatcatgtcagtctaaatctagcgatctgacaaatcatgtgaattaaacttttgaacatataatcatgattatatgatactgtattgacgacactataaccatgaacaaatatatacgttcaggacttaatagaatttatacattaaatataatcatgaagtaaatcat

SEQ ID NO: 107713 - DNA, 642 bp, Cannabis sativa
ggtcattggcccaatctgcatcactgtaaccggttatatctaggttggaaggtttctgcaagtaaagaccatgatccaaagtccctttgagatatctcaacagccttttaacagttttccaataagattgtaaggggttttgcatgaattgggaaactctgttgacagattaggcaatttcaggtcttgtaatacacacatattgaagagcaccaaccaagcttcgatataaatgtggctcaggaataggatcactccctgttgcagagagtttttcaccacagtcattggtgtagttaaaggattggcatattgcatcttggcacggcacaaaacatctgcaatgtatttcttctgagaaagaatcatgccatccttagtgtagtgaacttcaatacaaagaaagtagtttaaaggaccaagatccttaagagcaaactcggtttgaagactttgaataagagcccgaatgactgttggagaactgcctgttattattatgtcatcgacataaactagaatatatgtagtgtggtgaggagtgatcctgagaaagagagactcatctaatttggcattgtgaaagccaaaagtagtgagtgtagtactcagtttatcataccaagctcgtggggcttgttt

SEQ ID NO: 107714 - DNA, 721 bp, Cannabis sativa
  modified_base (29)..(50): a, c, t, g, unknown or other
  modified_base (485)..(485): a, c, t, g, unknown or other
  modified_base (512)..(522): a, c, t, g, unknown or other
aaattaattaaaataattaattttcaacnnnnnnnnnnnnnnnnnnnnnnaaaaaaattcaaaattatctacatttaataaaatacaatttagaaattggtgggaaaatgatcaataaaataaaataaaatatatttcgaaaattattctaatttaagttgttctgaaattaaaatttccaagttaaatgtaattttctatctaattaaataatttgaaaataactaatatttaagtgtctagataaaaaacctacttaaatatttaattttcaatttaattatatttattaaatataagaaataaataattaagtatcttgaataaaataaacttaattattaattctaatttaatattagaaaaaatattctaatttaagttgatccaaaattaattaaagtaattaattttcaacttaaagatatttttctaattaattaaatattagaaaataaaattagttactagaaataactatctanaatatatctcattaactaagtattttnnnnnnnnnnnttttaaaataatctaatgaaaattaaatttcatatattttaaaactaattatgttgctaattcaattttaaaataacttaatacaattatttaattaaggcaaatgtgccttcaaaattggggttgttcgtgtgatggaaggctgggttcagtatgtcgtacccactactaatgaccccctaactctcacacaagaccc

SEQ ID NO: 107715 - DNA, 1133 bp, Cannabis sativa
  modified_base (1058)..(1061): a, c, t, g, unknown or other
tcaatgagggaatatgggtcaattgtgattcaggcaaacataaacaaaaaaagaaaagaaaacgtgtctaattggtaacttacttgcaatagcttacttgtagtaatgtttatttatgtagtaaatatttgttatagattacttgtgatactattttttatgtacgtagttactctattatagctaactttatattttgtttgttaatggtgtagatatggctaactcaggttcaggctcagattcagacccagcaacagagtgtcctagggagatacctacacgaggagctactcagatgaatgaagtatccaaggtgatggactaaggaaaaagacttcctctccaagtcaatgataaaggagagtataatggcaaaagttattcgaatctagtatcgactttaggagttagatgccgtcagacgatagggttgtcctatgaaaattggaagcaagtcaaccctacactaaataataagatttataaggatatacaggtaagaagttatttgtgagaattttggtctgtgcttgattaatttagattttaactctaatcattttgttttccttaaaactagacaggttttatagtgcgagatgatttcaaacatgattgtctgatccttgctggaatgttaatgaaagacttcaagaacagaatgataaaagatatcatcatacccgtattaaaataaaatgattttgaacggttggcatacgtccctaaaaagcatccaaaaattgaccttacagattggttgaaatggttttaaagtcgactaactcctaaatttcaggtactaattatatttgtaataagataaacttttaaatacaagtactagtagctaatgtatttttttggcattgtaggaattgagtaaggtgcaaagggaacgttcaggaaaaatctgatccaaacatcaaagtggtcggagtggaatggtgaacgtaagggaagatgtggtaagtaatcaataatttctaacaatgtgattcaaaatgtaattgtactcacttaatttttataaaataatgcagaaaaaggacctnnnngttcaagatcccccatgccaccgtgtttggatcaaatcttggaccaacagaacgaaacttgtcactaattac

SEQ ID NO: 107716 - DNA, 936 bp, Cannabis sativa
  modified_base (253)..(256): a, c, t, g, unknown or other
gagagagagagagagagagcaatacctaggctagggtgtcgctgtcacacggtggtgggcaagggctagggttggtcgccgagagagagataaccctcctacatgccaatatcgctattagtccaactaattagtatcggatcccatatagtttaatttaataattttgagagagtatcactagtcaatcgtaagacgatacgtttagaaagtgctaggcactattggtctctacaaaaaatcttacttttannnncaacaaaatttgtgattaaagataaaaaaaattgtggctaattttaaattattattatattgtattgtgactataatgtctgtggctaaaagtattagtcacaaaagttacaatttattgtgactaaatgtgtttttagtcacaatatttgttgtgactaaaataaaattagtgacaacttgtcactaaatactatgttttagtcacaaataactttttgttatgactaaaagtcacatttagtaaaaagaattttatgttgtgactaaaaagtaatcactaaaagtaaagtgttttatagtgggtgcctaatagcaatgctcttaaactaatgttaaatctcaaaatattggtttaaaattaatgcaaagtagcattgatccttaacggacgaaaaatttcaaactagtttcttttgcgtggtcatcaattttgaaagttgacaacggtaccgtttttgttctagtgtgtgcttcctttatcaaaaaaatgttagataaattaacaattaacccaagatctatttgtatataacatagaacacaataataatatataatgattaggtatgcgtacctgattagtccatagcaattgtctcaattcgatccacaacaattacttcaattcgatagtgcaatactatcaactaagtcttcctccctagatctctaaatcag

SEQ ID NO: 107717 - DNA, 1609 bp, Cannabis sativa
  modified_base (338)..(344): a, c, t, g, unknown or other
  modified_base (1102)..(1104): a, c, t, g, unknown or other
atagattaaaataagtatcaaatgaaaatacctcttttaaaataatgagctttactttttaagatattcgatcttcattgtttgtcttacatggctaatatttcaatgggacctcgagaagctagacttcgttccacatagggatggtcttacattgaacatataacaccgcaaagatctcaaaagataataattttgtaagttttctttttttattagactctgccctacggtgactacttagaaataaatttacaagtataaaacaatggtagaagctcataaaataagaataatcttgactctcgcctaccgggacaacattggattcttatttnnnnnnnataaaaggttgctaaaatggtgtccattttagatgagctgctgactactctattcaactgatggtatctttgactcttacctatcgagacattgtatatcagctagttggaaaccttagaaattatttaagatatgattattttgtattttcacatatctttgttacatattaaatgcttaataatttctgaatatgtatatgaatttatattgaaccttcattatattttctgttgttaattattgtagtatcaattttaaatcttcattgttggtctaacttggcttgtaattttaacgggacatcttcatagattatcatccgttagacaacataatagtgttagatctcgacataagtgtttgtggatacaaaatctagttgactcatccatacgatgacaactaagactagtgtttacaataataaaataatgaagaagtttatgaattaagaataaccttgactctcgcctaccggaacatcgttggattcttattttcatcgaaattgttctttattttttcctcttagctttttcattaagaaatttcttagataggatatcattggacaaaatatttataaattatctgcttatgatgtcactctatttttttctataaaattgagtggcgcagatgactatattccagaaattctatcccgaaatgatataactcctcgatcttagagaatctcctacttgtatatgcttgctaaaggcaacttaagcttagagttagattagtagtnnnggtccaagctagaataaaactcaagaaatattcggtataaatttaaatctttgactttaaattttagattctaaatagaaattttaaatttcagtttctagaatacattggacagtacaatataacttttacaagttgttaacatccattttctacaatggatccgaactgtatgttaatgtatggattatgagttttgtattttgtgaccataatccacttgaactattctaagaactctttgttgtaaataaacctaagattcatcaagattcatcaaaccaccacatatatatctatggcgtttgcatttttttcatagtagttttgacaagatcattctctgcaaagagaaatatgccaatatctacttggaagtaggatcatttgtattgtaacatatggatgtacattcatgggtggatatgagttatcattaaattcttaaacgatcactctagatatttaccttatgaaaaaaaaatttgacatgtttgagaaattt

SEQ ID NO: 107718 - DNA, 646 bp, Cannabis sativa
taaatatctataaccgaatttgattactgatatttcaggtgagggaatatctcaaccaacttgaaatatttttaaccacttataaaaattgaaatatatatctaattgaattaattaacccataaagataaaaccaataaggacaccctactatagggtaggcacctatcttgtttgaattaagacaatgatgatatcttttgtcatgataacttttatatcaacaaatcttgtcttgacaaattttatctcaacaacctttatcttttacctatttaattaacttgaaaaataatttatttattacaccattttaccaattcacaatagatttttccaaataatatttacaactctttatctctacccttgatatatagtgtttcaaggtggccatttgggaaccataggcctataattctaagctccaataaactagattatttattgagtctcatcaaccaaataattttgtttattaattccatgattacttcactataaatatggaattgaattcttagtaattatagaattatatttactgagttttactgcagtgtccattgatataatcaaatttcaataattagcgctccttgtgttggttcataattagttttggtcaaattactgttttaccctt

SEQ ID NO: 107719 - DNA, 879 bp, Cannabis sativa
  modified_base (274)..(293): a, c, t, g, unknown or other
  modified_base (666)..(667): a, c, t, g, unknown or other
  modified_base (818)..(820): a, c, t, g, unknown or other
agttggtccaaaattaattaagattaattttcaactcaaaattaattttctataaatatatgtataacttaattaaaaatccaatgtatttaaaatattttgtttttgaaattcatcaaaataaaataaaataaaactagaaaaaatattctaatttatatttgtctaaaattaaataaattaatttttaccataaatataatttgcctatttaattaaatctcttaagaaagatatcaaatattagtgtcttgaataaaattaacttaaatannnnnnnnnnnnnnnnnnnnaatatatctagaaaaatacaaaaagtttacctagaaaatatctatttagataattcataaactaattactcattttttaataataatatattttagtttatctattttgattaatcattaatcaaaattacttgatttaagttgatctaaaattaattaataaattacttttcaactttaatctaattttcaaaatattcacattaaaaaaaaatattttgaaattatgttaaaaatgattattgaaatagaataaaatatactctaaaaattattctaatttaagttgatctgaaatagaaaaatttccagcttaaatatattttctatttaattaaattcattaaaatagaaacaaataattaagtatctnnaataaaatcaacttaattatcaattctaatttaatatataagaaaatattctaatttaagttggtgtaaaattacttaaacaaattaattttcatcttaaatgtattttgctatttaattaaatttcttgaaatagaaataaataattaannntcttgaataaaatcaacttaattattaattctatttttaaattctaagaaaaatatcct

SEQ ID NO: 107720 - DNA, 665 bp, Cannabis sativa
ttttgttatgatttttcatatggtcgaaactggtttcacatggttcacaaatgcagaactggtttcacatgctttacaaatttgacattggtttcacagatttttattttatgtttcttttattattttatttctaggctcgaaactggttctcacacttcattgttttgtgtgacgaaactcattttttgttgggttttgtataatattaattgttgttgtaagatgaaactggtttcagtttatttttgtcttttgctcaaatggaatatgattcctctaataaggatgcaatgaaagatgttgctaaagattcaagtgtttactctgagaagaaacttttcctctaattaaaattaaaattcttaggaaggttattcacaagaaaaaagaaaaaaataaatatgatccaaattttaaggattcatctttggtatgcattttttttttttgaaatatattaatttgttttaatttatcttcttgtgaatgtttaattttttagttggttgtactaaatgactgatttccgtgttttattgttggtatgttattttacgtaattgaggtttaagtttaattttttcttttgttattttaggaaactggttttactgtgtcagatttacgtaatgtacttgctttatgtaactaatttttctgtg

SEQ ID NO: 107721 - DNA, 1370 bp, Cannabis sativa
  modified_base (916)..(925): a, c, t, g, unknown or other
atttatgtaaatagttgcaaattagttttataatagttggaaattgatctgattcaaataaaactgatgaaaaaagcacaaggatcacaactatgttaatttgagtagagtatcatggtttttcaagttgatttacagttgcatcatcatttcataatagtttaattcatttatttggaagaatttattttggacataagaaaaagagaaaacacttgggcaaatggttagtttctgaaataaatttaaacgtttcttaatagttttattatagtttaataacagcaataaaacaaaaaaaatgacaaaagcagggttctgaactggaaatacaagacttgaacaaaggaaaagaaatagaagtaagtttttattctatttcataaatatatttttttattattattttataaaaatgatagtcaaaaatgttagtctacaatactaatattatcaataatagaatcaaaatagtttcacaatcgttgccttgcactaataacaatttcaaaaacacagggaaaaaaagacattccattcctagtcttctgcaatagaaaatttcatgatcaaatgaattatgaaattatgaagctagtggacattacattttagtgaattgtaaatatgaagaattacaacagaagctgaaagaggtcctggaatgcaaccaagaaaacactgttttgcaactgaaatatcaagtcaaagaaggatacaaaccattgaggataaaggataatcaaagcctgcatttctacataaaactaaaactgaaggaacccaacttcacaacatacccattgtgtgtgaatgtcgtcaacaacccaccaacaaccatcaatccatcgttcttggaaaatagtaatgcattaattgcacatacaagcgcatttgaactgatggaatacaatgnnnnnnnnnnagaagactcaacaaatcaacaacatacaattgaagctacagtactggaagatgggggagaaaattttgatttcatggactatgcaaaacttgtggcagaggaaatggttgagcaactagaaaacaaccaaaacagggagccagaaattacaaattatgacgaactactaatcacacatccgcaacatcctaaaatagaagaagcacaaatatacaaagacaaagaaacactccagagtgtgcttggttttctatgtgattagaaataacttccaattcagagtaaaaaaatcatgtgcaagaacatacaaaatttgttgcttggatccaaaatggaagtgggcgctaatggcatccagaaacggaccaacgaagtcattcataattcgaaagtatgacagaaaggtgatacacacttgtgatctaaacataagatttgccgacaa

SEQ ID NO: 107722 - DNA, 1448 bp, Cannabis sativa
  modified_base (950)..(950): a, c, t, g, unknown or other
  modified_base (1265)..(1265): a, c, t, g, unknown or other
  modified_base (1417)..(1417): a, c, t, g, unknown or other
gtgtctcatgtgatgccacgtcagagtacaaaaatagggataacagtcttattttagaaaaataaggaaattggaacaaaaaccaaaaaatagagaatcaagcactcttgaagctaaggtaaccctagaacttttgttaattgaattctgtaagtttttacttggtttgagttatgattttaggttttaagggctgttagggttaggttgtgatacaattcaaattttaagttttatttgagttatattttgcttctagcagctgattttgatgtctggagttggttttgtgcaagtttaagctttgatctctaatggcatgttgagtttcattgagtttttctgtgaattactggttggaaaatattgtgtataccctaattaggtactctcgaaggtttggttgcatttggtggaggattgtgcaaggaatggaatttttggggtgaactggtgtaaaccggctagccggttataccagtacctgtaaaactggcaagccggtttttgcagggtccctgaatgctctatttcctcaattgtcgtccatttcagtgccgtagttgggtgtttccctatttcctgagttagtgtaatccctagggtgtatagcagaacctaaagttgtaggttcgggtttcccgagatttggtttttgatcatgtgatttacccagtttcattatgtgattagggcatccatttttcataagactttccgttcaggtcagccggcacatttgaatctgaaagaaggtaagaactgtatataatgtgtgatatgaatatctgaatgtatatatgtgttaagtgtatatgcatgctttaatattaattgcactaccaacacttgtatagaatggtacagagtgcattggtatagtgaatatggttgaagagtacattacagtgataccagcacgtgtacaggaaagtacagggtgtctgtgntatatcgctcagtggtactcagggtacgaaacaaacactaccaacacttgtacagcaaggtatacagtgtatgtggtatagtggctctaccgtagtatggaacgttcttactaatctgttaagcctagtaaatagttgtactggcgcctagatacaagtcattattttgtgatatgttatatgcttttcttacttagtctgtcgactcacagttctgcttccatgtgtaggtaaaggaaaggcgaaagctgaacacgagtgaacctggctaggatgggattgtacatgtcgtggcagcgtgacctggagtgttcngtctcgggacatctgggaatattattttgtagtcgttgtgcaaccagtaatgtattttggtattttgtgtacgaaagcttttaaataggatcccagaacttgtaaataattttgtatattataaagtttattaattaatataaaagttttantttgacacgtttttcaagaaaattttttgat

SEQ ID NO: 107723 - DNA, 543 bp, Cannabis sativa
ttggtcggcctaaagactcttaaatcttaaataatggatgttactatataaagctcgagtttgtgttcctagtgttgttgaactcaagaaagaaatcctcggtgaaactcataccacaccttattcattgcatccgggaaccatcaaaatgtatcaggaccgaaaaccctacttctggtggtatgggataaaaagagaggtggtggactacgtgtccaaatgcttaacctaccaccaaatcaaggctgaacattaaatgccggcagaattattgcaacctttagcctttcccgagtcgaagtgggaggacattgcaaaggatttcgtaactggttttcttaaaaccataggaatgtgtgattcagtatgggtcatagtggacagattcacaaaatcaactcactttctaccagtgaaagttacatattcagtggatcagtacgctgaactatatgtaaaagagatagttcctcttcacggagcttctaaattcattattttagacagagatccaaggttaacatcgacattttgggtgaattt

SEQ ID NO: 107724 - DNA, 1435 bp, Cannabis sativa
aaatgaatactagaagagttgattcgaatgactgctctctaggagaacatagaaaccttagagacaatcacaatatcgaaaaagataaacacgatctgcagcatcagaatcgggatctgacgcagcaaatcagattagaaaattaaggaaacttgctataatcgggtccgatcttctattaagtattgattcttgccataaacagattatatattctgattgtatcaagacacaatcaaattcaataaagaaaatgcaataatcaaagtttcctttaaaaactaactttccataagagaattgcttctcttacaagatgtttccatacaagaaaggatcagttgaaaaatgcatctttcctaacatagaaaaaagtaataaaaaccgaatatacaaggtaagacaatcgggtataaaagcaaacatatcttaccataaaagaaaaaatattttggcatctaacttaccaaaaaagaactttacaatctccccctttggcactttaaatgaacaaaatattttttaacaaataagtacctgtaaattaaaattagcaagagcaaattacaactccccctgagtaagacaatcaaaaaccaaaaacaacaaaatatcatgctaactttaacacaactccccctggaaaaagggtccagagttgcagttaaaaacaaagtattactccccctttttgtttatctaagggccaaagacaaaaagacaagaaaatatagaaatatgtctaacaaaaacataaaaaagaaaggaaacttatcccccatagagcttgatcaaagaggacagctgcttggacatctcttgctgaacctcctccatggccgcaggacaattgttcaccagttgaacctcgtttttgacttcctggacatctgcaggagcagaactaaaacttgcaccagcagcagcaacaccagctttaggacgcttgggaaaagctccatcaaaatactctgagggttggaaaatggtgtcagtcaggggaggctcaagtgtttcatgagattgggtcacttctttctgaaaaagacaaaattttatagattaaattaggaaacacaagcttatgagtttgcttttttacctctctgaaaagaaacaatttgatccaagattgaagaagccagatcaatggatgcccctgaggtgattcgaaaaagaaaggatgccaaatcttgagacatcacggttttgttggaatttggaagccaattgctaagagcaaacctcatgagtgatgcatgagcataggtgagatgtgtaattcgaagactctccccagatttccattcaacccgtgcaccagtaagttcaataagcatcaaatggcgatccatagacatgatcgcattaggcacacctttgggtaattgcaaagccactgcaatttccttgacagtaaaagaaaaccaatgcc

SEQ ID NO: 107725 - DNA, 1940 bp, Cannabis sativa
tttttctttctttaaaaaaaaaaaataaattaaataaataaaaatctgaatgaaaaaaaataattaaacttgaaaataaatttagtttgagggtataaattgatcatgataaccctaattggaaaccctaattttctttctctttcttcctcagtcgacacccatcttctccctctctctacatttgtgcggcggccactggaacgacgggaccactgtgctccgatcacccatgcctcgacaggaccacgaatcatcgtcctcagatccaaaaaatctccaggggcacacacggggttaaggcctcaaatgggattcgtcgtcttcctcatcgtcgtaaattccgatcccgtcttgcctcaatgacgatcgcgccctcaacccctccaccgttgccagatttagcttcagattttgttccttttctttttaacgccaaatttgtaccctccaaaaatccctctaagaccgagagaaggatcggggaacacgagttcctgggattttgtggctcgtggaggtcagccatggcctccgtatagccttcgacgaacgagggtggctccacccataaaattgagagagaccggcgagaaggggagagagatattagagtttttggttttttctaagggttgcaagaatggaggtgtggttcgtttacaccaccggcgccggtagaggttcgactatcattggtagaagagagggagaaagagatgagttaggtttttcaaattagggttttctaattagagagaagaaatgaatgaaaaagaaaaagaaaagaaaagaaaaaaaatgtttcagaatttttattttatttttttaaaaaagaaaactgaaaagaaaaacattatttttatttatatttttttaattttattttaattttttaaataagtttttaagtggaccaataaaattgtgccatgtgtacaccgtgtcgaagtagatgtacacatggacaatccagcatggcacttaacagcaaattaaagtggatggaaactgtaaattgctagcagtttcctagttttgggagttttaccgcccaaatttgagttttggaggttaaatataatcaaaataaaagtattggggggttttgccgccatttaccctaataaaaattacattatatcttttaatcttaataaagactaaataatatatttttttaaaaaacaaaaagactaaataataatgataagtgtgacttttaaatttttctataatattaaatataggcacaatccattaattaattgttaataatattgatcaaaattaataaaaatcttaaataaagaaaatagagaaaacaaagaatatgaaaaataactcatatgtgatgtcacatgaacttctcttgtgtttttctttttatatatgtatatatatgggtgcattcttaatagatattacccataaatgggtaaaattaaaaaaagttgagtttttatgcttaatttttctgtctaatgaaaaaaaaatcagtcatttttatatcatatgggctgagattgttccatcggtaaaaaaaagttttaaaaaaaagttttttagcaagaaaaaaaaaaagaaaaagttgagtttgagttaaattttttgtatgaacatatttttgatataatgtaaaaagagatattttttgatatattttttttaaaaaattaagtagttaaattaagcatagaaattcaaatttgtgatttcattattcgttatcagatcaaaattcgatggtttgatatttttaatattaatatttatagttaaatttgtttagtaaccattcatgggtaatacacattaagaaatgttctgtgtatatatagatacagtagaacctttatccaagaatacacttgggactaaaaaaataatattcatggttttagcttgtttgtaagtttttaaaaacctattattacttg

SEQ ID NO: 107726 - DNA, 1001 bp, Cannabis sativa
aataacacaaaaaaataactaactcaaaatcaatcagttatttataactaaatagaaccggttatataacataatcaatacaaacaagtagcacacaataattcaagctgattacaattaaaaaaataaatgagcaatcagttcctgaaacactgaaacataaattaaaaacaaaactagttctacaataaaaaaatctcataacacataatatctcataaaaccgattataatatttaaaaaaaaaaaaatagagatcaatttcaaaaaatattaagacataaatatgtaaagaaccaattccataacaaaatatataaacataaataacaataactcaaatataatataaaaaacccggttatatttatcaactagttaaaaatttaaaacaaataactggttccgtaaaacaactaagataaaaactcacacacaaaaaccagttaaataaaatagttcaaacaaaaatatccattcaacatgctcccaccaaccaaatgattacactcataccatatctacctcaaaaatactcattcattatgttatatattttagttataaccgaaaaaaattatcgtcgccaaaaaagtcatcgttgctggaaaggtcattggagaagtcaccagaagtaaatatctcagatattacttaaaatataaccggttctataaataaaaactaataactcaaactggttataattgaattataactagttctataacataataaataacaaataactcaaacgagttataattaaaataaaacaagttctataacaatgttataatgaataaaaactaacacgaaataactcaaaaccggttatataatataatgaatacaaacaaacaacacacaataattcaaaccaattacaattaaaaaataaaggggaaatcagttccaaaaacggtgaaacataaattaaaaaaaaaaactagttctacaataaaaaaacctcataaaaccgattataattttttttaaaa

SEQ ID NO: 107727 - DNA, 1009 bp, Cannabis sativa
taaaataaattccaacaaaggtttcaaccaaaaacaaggtattgattatcttcacacatttgcccttgttgcaaagtttaataccttaaaacttatgcttgccatcgcggccactaacaatcggtctctgtaccaacttgatattaacaatgcctttcttcatggcgatttaaatgaaattgtttataggacactcccaaaagggtacaaacccaagggacaaattcccccaaatattgtttgcaagttaaccaaaaatttttatggcttgaaaaaagcctctagacaatggtacacaaaactcatcaattatcttctatccactggtttcactcagtctctctcagaccacaccttgttcatcaaatatgataaatgcatttttctcgccctattaatatatgttgatgacattgtgattacctctaataatgatgatgctgttacatcttttaaacaacaacttaactctttgtttcagcctaaggacctgggtcctttacgtttattcttgggattggaaactggtcgttcttcatctaggatatttgtctctcaacaacctttcttcctgcaacttttgactgacacaggttttctaggagcttctattgctcccaccccaatggaatccaacattcggctctcattcgatgttgggaaaccattagaaaatccaaaaatctatcgtcgcctcattggtaaactcctttacttgaccattacacgacctgatatctcttttgctgtaaacaaactaagtcaatttttatccaatccgagggttccccacctcactgctgctcatagaatactacaatatcttaagggtacctctggccaagggctatttttttactcaccatcttccactaacttatctgcttatgctgaaactgatatgtcaaacatagactttcatctcaaaattttttcagatgctgattgggcttcttgcagtgacactagaaggtccattttagattactgtgtcttccttggcagatca

SEQ ID NO: 107728 - DNA, 2107 bp, Cannabis sativa
  modified_base (377)..(381): a, c, t, g, unknown or other
  modified_base (1509)..(1525): a, c, t, g, unknown or other
  modified_base (1896)..(1896): a, c, t, g, unknown or other
gtttattttattctagatacttaattatttctattttaatgaatttaattaaattaaaaatcatatttaaattagaaaaatttcaattttagaccaacttaaattagaattattttcaaagtataatgtattttattttaagattcatttttttttatacaatttcgaaatacattttttttaagtgtagatatttcgaaaatttttaattttgaaaaattagattaagttgaaaattaatgttattaaattttacattaatgatttattaaaataaatagactaaaatatattatattttaactagaaaataagtaattactttataaattatctaaatagatcttttcttggtagactttttggtatttttctannnnnatttaattaaattagaaaattaatgttaacgcaaattttcgttaacgataattagcctaatttcgtgatagatttatcacaaaaaaaattatagaaaataaaagaagcaaaaataacaccaagttttttatgttgtttttgacgttaactctgcatagtcaacgagtcaatgttattcagactcttctaatacagaactagggttcttttttctcaaggattttccatcccttttttcagtacattttgtccctatttataataacatagattggcagttaattatattcaaattcaaatcctgtaataatattttctgaaattatcggccttaattacgctccacgttaataaatatacttattataaaaaaatcaaacaactgtgatttaaactgcttttaaagagtcaacgctggggtggattaagacacggtggaaagtgtatctcaccggggcatctcgcttggtacttgaacaacttggcttgttcataagtcttccagcaatggcatgagcactctagtgtactgagcaaacttaagatctgctcttggaccataaggccttgcagactgaacaatcatgtccttggggttctcaatagaaccaataaccctggtagggagttggagcttaccaagagtatgccttcctatagcgagatggatgtctcgctatttgctatctatgtccttcaagaaagtacacttacttagtataatttatattatacgctaagtattttaacaacccatttgccttgtcatcaattctctacgtatcccaaggtagatgcctcgttacgtattatcgatgtcttccttacaactgtgtcctcttatgcgaaatagtttctcgttaatatgtgaatcgatagttcgtacatcctcatctcgctgaagactgtgcagtttgcgagttataaatattccctatttactctgcatttaatgaattattctatttaacatcttttaatataattaccattatatttgttaattcatattctctaaggttgacacgtgtcatcttctgaagtacaagctggatttcaggtataacaattaatatttaagtttatttgttctagacacttaaatatttgatatttttcttaagagannnnnnnnnnnnnnnnnattatatttatgttgaaaattaatatattaattttatataaacataaattagaataatttttccagttttattttatttatttattttttgatgaattttgaaaatgtattatttttaatacattggatttcgaattctgccatatatatatatagaaaattaaatttgaaaattaatttttattaatttttgaccaacttaaattaagtaattttcataatattattggaaaattaatactaagaatcgaaaaataaatttttatttttcatatcatcctgggatatcatttaataaatattaaattaaaatttatatttagagttatccaaattattaattttatttaaataaatatatattaaaatanatagattaaaataagtatcaaatgaaaatacactctttaaaataatgagctttagttataaggacattcaatctccattcttggttccacataaatttaattttactgagtaatcatccctaatggatgaacgttcattagcaatttaacgtcgtagaatctcaaaagataagtattatttgcaagtgttttattcatagtaacgtccacc

SEQ ID NO: 107729 - DNA, 700 bp, Cannabis sativa
atgtctaaatttaaatgtttcctatttttatgttgaacttctcttataaaaatattattgtcactattattttctagctacaatatattaatcactagtttaattataagaagaacccttatattattagctaacctagtaacaaaattaaagtgaaattaaatatttatactattttgggttttatgttttaactaatttctagtttacttttatttttttaattttaaaaaattattttggatcgtataatcttgtaaaagattactattaagaccttagtgtcaaaatatttttaaatacaacaaaaatataataagagtattttagaccctacattttagtataaggatcttatatataaataatttttttcctaaaaaataggttaaaattaagacattaaagtaagtttcgtaataatacaagtcttgctaattaagataattttcaaattgtgtatctattaaaataaaattataataattatgaaaattcaataaaaaaattttattttaattgacataactagactcaagatgcaataatgttacaaaagatattacaatatttttttctgctcaaacgacatcaaattcattaagaataagctaaaattttagtgtggacagcggacatgaggtcaagaactttaaacgaagacttcttcatgctagtttaatggtactaaatcaggtac

SEQ ID NO: 107730 - DNA, 642 bp, Cannabis sativa
tgggtgaacttactgatccaacacatatcctaatgggtgctgctggtgcaatgttgcaggggttgacgtgctttactggtgttgtgagccttgttcaattgacacagcatgtcgtgggtgatcttgctggtgcatcacgtgtcgtgatgattgctggtggtgcaatattacaggtgttgcgcgtgcgttgttggtgtgacaaatgaggattgtggttcttcttacatctttaatttactgatcgatatttatccaaataacttatagcttgtgttgcaagagcagatgcaacacgttttgttccactatgaaacactttatttctatcattccaaatgctccacataatataaattaggagtttaacataagccttatccatagttgttgcgagaagtacaatggaaatcaatgaaaaagtgtgtttgcttccaaactgatttaaaataaattatagaaattaacctaaaataatgtaagaaaataaaaacaaaaaagtacggagagtaaattttaaaaattactcacaaaagaatctttactccagcaaaggaaaaatgaaaaaaagaaagaataattagtaatttctccctgaacttttgataatattaattttggcccctaaaatatatggcttattaa

SEQ ID NO: 107731 - DNA, 635 bp, Cannabis sativa
agcctgttatttaatcaacaggtgtccctcaacagccattaacttcgaaactcctcaagaaatgtggactggtcaaattcctaagtatgagcatctaatagtatttggttgcatagcctatgctcacattagacaagataagcttcaacctagagccattaagtgtttatttctaggttatcctgatgggatcaagggatacaagttatggtgccttgaaactggttttaagaactgtatcataagtagggatgttgtgttcagagaagatgagatggccatgaaagtgactacaagtcaaactgaagctgctcctgcaaaagaaagaaattcaagcagattacaacttaaggtggaactaagtaatgactcaattcagacacaagaccaacagattgatggcagtcaagatagatcagatgatgatcaagatgacctcagcaactatcagttggctagtgacagagatagaagaaaaataaggccacctgatagacttggatatgctgagtttatagcatttgcacttactgttgcagatgaaattgacagttcagtcccttcaatctactttgaagctgtcaatggaaggaatggtaaagcctggttagaagcaattcaagaagaaatgactt

SEQ ID NO: 107732 - DNA, 899 bp, Cannabis sativa
  modified_base (788)..(796): a, c, t, g, unknown or other
tcactaaaagttgcaattttttgtagtgacttctactcttattctaattagggtaaatagtggcatacgtacttaagttttgggtttttaagcggtataaacccaatgattttttttagcggcataagtacccaatgtttataaaactgtaattttcttcccgtttcattagtacagactctgttattgtcttaaacaggacacatataagactcaaattctaaattatttggtctggatgaaaatatgtagtatcagttacctccaaaactttttttaataaatttaaaacggaacctgtactgacgaaaatagagaaaaattacagttttacaaacattggatacttatgctactaaaaaaataattggatttatgccgcttacaaaactcaaaactttgggtacttaagccgctatttacccttctaattattataacatagatatactttccattcaaaaagaaaagaatgtgagctttatatatatagcctaattaataaggttatatactaaaaaaaattatattttgtgacaattttttagttataataaaagaaaattgtgactaaatgtgacttttagttaaaacaaaaaagttatttaagactaaacatggtatttaaatacaagctgtcactaatttaattttactcacaacaagtattgtgactaaaattatatttagtcacaataaattgtaatttttgtaactaatacttttattagccacagacttttttagtcacaacgtaggattgataatttgttaattccatttttggnnnnnnnnnttgacaaaaatattttattattcattgtatattttcggctggtatacattaatatggtttcctatttggtgtattcaaacttgaaaggaaagttgtctagctt

SEQ ID NO: 107733 - DNA, 595 bp, Cannabis sativa
attttgggtccgggtcctagattcaaacactgactacgggtcaagtccaagcctcaggtccagattcagatatcggtctaggatctcgttcttcttctagttcaggtgcgaggtcttgggccgcgtcctaagtttggatttaggtccgagtttggggttgtgtcccagtagtcaggtcctaagttcttggtatagggtcgggtctcgtctctcgagactgtggtcgagtttcaggtctcggtcccagttccggggctcagtttcgggtccaagtccctcatctggctctggatccttagtacaagtctgggtccaggttcaggtctagggccaaggtcccccatttaggttcggatccttggtctcggtctaggtccaaattcagattcgggtttggatctcgagttttggtgcggtctaggtcctagtacgagttcgggtttgagtctgggtccgggtgttggtcggagtccaggtccttattcgggttcgagtcggggtcccgatccgggtcctagttaaggtctaggtccaagaccaggttctggtttgggtttgggtccgggttcaggtcctgagtttgggtctaggttcg

SEQ ID NO: 107734 - DNA, 1283 bp, Cannabis sativa
cggtcaacgtgagtgtgagtggaacaacaatctgcttggcgaattacaggctcctaaattacaataatgacaacactgataagtgacacgctaaatgaattcccgggggacttgaaactaaaagttcccctatcgattaataacatggcaataccctaaataacacaaaaatgggaaaaactggggttcccaaatttgtcccaaccggtagtccggttccccaatcggaattccggttctgggaaaaattcctggaagccaaccggaattccggttcctacaggcctccctgaaccgaaattctggttcagtgtaggaatgggtcaaaattttcatcataataacaactcgaccaacaaatcatcaactccaattcaaaccaaactctccagacctgctatatagaccacaaagaacattttcaaagcaacaaacaaccctacacactcagaatcaaaatccaccatgtgagctccaagtttgagcttcaaagctcaaagcttggctaacaccactactagccactacaacaaacttaattcaacataaaacaacatatgtaacatccagaagccaaactcaaacacaaataatagccacaacagcaaaaacaccattaaaacccaaagttttgagttcaaagctccaaacttggttaaatctaactaactaacaacaaaacctgcttgaatccactcaataaaacataaccaagtttctgaaaacaacaacaactaatcacagcaatcacaataacaaaaactctattcatgcaaaatatcactttcttacaactcaagaaaacaaaagaaagttgttagagattataccttggcttggattacactatgagctacttgaaacaaagaattgaagaagcaaaatcaaaagccctagctgctctaagggtggccgaaagagagagagagcttgagagagaaagagtgatctttttctagttttttctaattttgtaaaaatgagtaaaaggatgaatttcttattttattgaattgcttcagccaataaaaaccataaaaataaaattattaacataattaaaagtccataaaagacaaattacaaatgggcaaaaatgacctttttgtcctcacacactaagttgacataaaaagggttctaagggtattttgggatattctaaattcccgaccattcccgacattctcaatgtctaacaaaactgccccgccatagaaaaatactaacatgtgattctactaagccatacaccgcgttccatgttgtcgggcactgaaaat

SEQ ID NO: 107735 - DNA, 631 bp, Cannabis sativa
tttacattaaactaggaaactaatggttcacaaaataactttaatcttgttactagtttttgggcacgtgcaatggacgtgctccctaaaattagtataaaataagaaaaattgtgagaataactataaaagtaataattagtacacaactaattaaagtggccatagacatagtttagtagtttcacccttttaacaaagaggagatcctaaatttgaatctagtggcggagccaaccaatattagggggcaaaaaaaatatttttggataaaacttacacttataaaaaatattatttttattataaaaaaaaatataaatttaatagagattagagtagatatatgagaataaatataaaaatatgtgaagataaaaataaaaaaaaaaatataaatttatatagacaaaattataatatgtgatgacaaaattaaagtaaaaataaaatttatggagcaaaaatataaatatatataaaaaatacatacaaaaaataaattttaaaaaattgagtgggtcatgtgggggcactctttgaatcctctctcccccaatgacacaaaatactacaaaaaaaatttagttttagtcacaacaaaatagatttatgactaaaagtaaaaaaa

SEQ ID NO: 107736 - DNA, 1333 bp, Cannabis sativa
  modified_base (1273)..(1307): a, c, t, g, unknown or other
tgagttgagttgtgattgcattttttttaataacaaccccttatattttgaaaaagttacttgatagtttaatttcgggcttttataatttgcttttaaaagtaacctggtacatcacttttgaatatggttgagtatattgagttgtgacaatattttctaatgaagaaccctaatattttgaaaagtcacctagtagttcaattttaggtttttcctttacttctaaaagtaacctggtacttttactttttaatatgactgagtgtgttgttgtgactgtattttttaataaagaacactcatatgttaaaaaagtcacctattagtttatttttaggcttttatttttcttttgaacgtcacctgatacttttacttttgaataagactgagtatgttgagctgtgattgtattttttcatgaagaaccttcatatcttgaaaaagtcacctggtagttcaattttaggcttttattttacttttgaaagtaacctgatactttcactattgaataaggttgagtgtattgagttgtgattgcatttattaatgaagaacacctcatatcttgaaaaagtcacttagtagttcaattgtatgcatttattgtgcttctaaaaaagtaacatggtaccttcacttttaaataaggctgagtgtgttgagttgtgattgtaatttttaatgaagaaccattatatttgaaaagtcaactggtagttaaattttaggcttttcttatggttctgaaagtaacttggtactttcatttttaaataaagctgagtatatagagttgtggctgtattttttaatgaagaacctttatattttgaaaaagtcacctagtagttcaattttaggattttattgtgcttctgaaagtaactaggtactttcactttagataaggttgagtgtggtattgtgacaccaatttttaacaatgaaaccctgctattttttttacttgaagtaacttgttaaataaacttatttgctttttgcttcaggaagcaacttgggacctgtaattttcttgaagaatgggtttcattaaagcattaattcattatggaggagagttgaatgaaaataacaacaactcaaattacaaagtggttggtgtacatgttctagataactgttcactacataatcttgagaatttgataaaaaaaaaagtatcctgctatgtgtgttatgctttataaagtagttgttgggttttatgccctaaataaaatcaatataagaaatttgaagnnnnnnnnnnnnnnnnnnnnnnnnnnnnnnnnnnntttaatatgtttattacattcacaca

SEQ ID NO: 107737 - DNA, 605 bp, Cannabis sativa
  modified_base (51)..(51): a, c, t, g, unknown or other
tgaaatatgaattaaaccgatgatttgcattgatttggatggtttcatgtngtttatgtgcttatttgatgatagtttagaaatcgcaatgtatgttactgaaatatttttatttcaatctagaattacttttattggaaagtagacaaaaattaataaatttatgcttttacagaacctaatttggatttttaaaaaataagatatgattttttgaagttgaatgaaaatatcaggatttgaaacactcacgcgcgctcacaaggtctgggacgctcgtacaacgcccattcagacaaggcgctaaccgaggtttctcggactgagcctctgttctcggccgtttcccagcttccacgcgcgcaggggtatgcatttcatacccctgtgcctcaaatttgtttttgtcataacttttgattcaaaatcgtttttcattgaaacaaaagccaatttttggtagaattttgtgtagaatctgaattttcaattaaaagtctaattgtctgagtaaaactaattttttattatttttttaattaattaaaattagttttagatattagtaggctttgaatttcgaaaatttgatttctcacaaaaat

SEQ ID NO: 107738 - DNA, 1568 bp, Cannabis sativa
ttgagtcgccctggctgcgactgcctctctttctaactcggcatttcgttggttagactcggccaagcgttgctggagttgtcgatcttccaattctactaatggtacatacctagtaggatcataggcatcctcacttctgggtacataatcagtattagtattggtttcttcattccctctttttgggttttgatcatgaccaccttggcttcttcttgaacgtgttgttggaagtgggtggcctttgtgaacctattggttctttcccaagacgaccattagtctctttaggacgactattatcgctttgattatcatgagctatggacaaattttttgttggtgaggaggaatttttttgagttttatcacgtagactctcaatgaaagaacaaaattgttaacacaaattttcgttaacaaatattgagcttttttcgtaataaattaaacacagatatatataagaaaattgataagtataataataatgatgatgatgatgatgatgatgagaccaagtattttacgtggttttgttgttaaatctgcatactccacgagtccatcttattcaagatatttctcgatatttaatacagtattacaattaatgatctctttctctcaaagtttttcagttcttttttctgtagaatctgcccttatgtataggaatataggttgacggttatttacatttaaatttgaattacataaccgtttcatgaaacgtgggctttgatcacgtttcatttaaacacgtgtagataacaattgataaccgtacaaccgcttatcattcctatcttcaaggcagttaatactaatgtgggttgaggcatctcgctttatatatagatgactaaataataacttggtttaactatataccttccagcaatggcatgaactccaatatactgagcaaacttaagaactgctctttgacgataaggcctcgcagactggacaatcatgtcctacatgtttccaagttattatacttagttattataatgtggaatatacactaagtgtttcaatagttgattcgtctcgtcggtatttccttatatttagcgaggtatatgtctcgttatacattgtccgtagtctctttgggattgtgccttccgagataagatggtctcttgtcagtacaggaattgatagtttgtttattcttgtctcgcctaagactgtacagtcaacgagttatgaatatactctattaattctatatttagtaagttattctattttgcattaaatgatataatcactattatatctggtgcttcatatttcacgctactacaaaaatatactttttatcccagattttaagggcattttatcccatttttgctaaaataaaaaccgggatatatgccagtaggataaaagctcttataaaaatcgggataaaaaatcacttttaattaatctcggttattatagagaaatcgggataaaagactatttttaatcccaattttcctttaaaaattgggataaaaagtaatttttttatcctgattttcctataataaccaggatta

SEQ ID NO: 107739 - DNA, 678 bp, Cannabis sativa
aggtagaggatgatttttattctcacttataaaaaatgtataatttttaagcattagtgttacaatttaatgaaattacataaaattaaagaaactatatgtagacaaaatataacacttatattttaagaatgtaaacaatttaatgaaacatatttaatcaaagagtattatatttttgcataatgaaaaattaagtgaaaatatgctttaacaatttaaaatatatgatattgaaaatgaaaatgacatatttttgatagaaaaattcatggacaatatagcacaaatggaaaatcaacatacaaaaataaatcctatccacttgcattttgtttcatcattatcttaataatcttgaaaaaagattagaagctcataactagattgaaataaaaattacaaagaataaacatactttacatgctcttcaaaatataaaaatagtagaaagatgtgtggaatggtgtatgagatgaatagtgaaagagaagagtgaagagtatttaggagtgaagcgtatttaggggtgaagagatgtgtaatgaaaagatgtcttgaaatggtcttccaacatcctatttataggcaaaattgggagattaaattaattaaaatataataaataaataaattaatttaattagtattggtaagagaatggataaataaagtatg

SEQ ID NO: 107740 - DNA, 872 bp, Cannabis sativa
atttagcatataattcatttaacttaggttatatttttcatcacaaataatgatacccgtcacaataccattaaaagtaatttatcacttaaacttagaatcatagaatattagttgaataacaattccaataatgatggtagaataatgtaaaacctaatttagcggtcgtttaaacaagattaaaatattaatcataaaattaagcatggaagaatataaacaattcaacatgaatgaataaaataataatatttatcaaaacatttaataaatcatgtcttgagttttgaaataacccttaacctagaagaggactactctataatctcaaacataatcataagcacaattataaataaatattaaaagagtttaagaagtaaaattagatgtgaatgtagattcttctcttctcttctcttgagttctctcctttaaaagcttaatgaaaaactttttgaaaataaactctaaaagtcttatgtatggaaccctaaaaacaaatccaatttaaacttaaaacttgacttttatgtaaatcgtatggacttcgtatggaactgagtgtctgggtagagtataagttgtgcctagtcgctcattcctggtttttcactgttgcgtgctcaaattagtatttcgcccataatttcttcaatatttcttagaattggacaatttcaggtattctgaaaaagctaagaatgatatctaaaacttttatgttgagctccaagtctagatctagttttaaaggtgtaaaaaattacaattacgttatgccttgtaaacccgaactctcctacctccactatttaccaccaaaatgtgtcaaaatcatgtctaacagttccaaatgtatgattaac

SEQ ID NO: 107741 - DNA, 838 bp, Cannabis sativa
ataaagactacacatatacataattaagactcatctatctatctctagctagtctttctttttattttttcctcatcaccagctgtgtttttttaatcatttattaatcacaaaacacatatacgacttttaatatttaattttacaatagtcgataccatcatgtcatggccaaccatcaaattttgtaatgccaataatacatataaaaataaaaacattatttaatttgaatcattgttattttatttttatttttatttttgaaccgaaagagaatttcattaaaaaaaaaaaaaaaaccctcaatacataatagtcagattaaagataagactgtaaatccgaaaaaattcaaaaggaatcattatttaattttgatcattgtgattattagttctatgtacttgattttagtatatttgaaaacttatgtagaaaataattattccaaatacaaaatagattttctagctacactatgctaattctaatatatatttcttcatgtatagtcttgtattttacttgagtaaattaattacatttctttctatcaaaatatatctaatcatagtcttgtaaattcagtcttttcaaaatgaatgtttgcaatgagctactaatatgctcattcagtctctaacaagctaataatatgctctttctcattctttagctagatttactctttcgctaaacttactttaggtgatttatgcttgtactaatctgagaatctttgtggcttttgtcagaaaggataccttttaaatgttctattccattaatgagtaaatgcacgatgaatactttatatattacaagtgaatgaacc

SEQ ID NO: 107742 - DNA, 973 bp, Cannabis sativa
  modified_base (920)..(920): a, c, t, g, unknown or other
agttctcgaagcagatgttccaagttcagggatgacctttctcgaatgctattcgataggttctcgaagccaatatttatcgatatgatatcgatgatatgtcaacagttctatatagtgtttcaattgcctcaatgtcatgtcatgacattatttttctcgaatggttatcgataagttctcgaaaggttctcaaagcagatgttccaaggtcagggatgacctttctcgaatgcgattcgatagatttttgataagttcttgaagccaatctttatcgatatgatatcgacgatatgtcaacagttttgttcagtgtctcaaatgcctcaatgtcatgacattatactgatagattatcgacactttgtcaatttttctcactgcttgaaatcatgacacttcttatcgatgggatatcgataggttgtcgattatattaaatttctccatttttggtttttatatttttttggtattgttccctaacaaaccttttgttgtttcaaattgcaggatcaattgtgtttcttgttattacgatggtgtttggtgtgttaagggttttaattgggtttataaagatgaaggcagtttgacgttgacaattagaactgacacaaccatacaacaattgcgtcagattttatatgaagagttggaggttgatcctttggcgtatgatttgaaattggagatttgttccttgtacatgaaaggaaaatgattctgctagaggttattaagaaagaatgccaactaagaacgttcttagatatgagggcaacaatgtcaaacacataatttatgccattatttgtgactaaggtaaaaaaagttggaaattcggagtacaatctaatataaaaaaacactaaatcccatcgagaacctgtcgagaacccatcgataatcagtanacactcaccaaacatgaattaatacttttgagaacctatcgagaatccatcga

SEQ ID NO: 107743 - DNA, 1379 bp, Cannabis sativa
ggagagagagtgcccagtcgagctatctatcaagaaaagatgagtgaggaaaatatcgagcagacagaatttttgacaccattgagtttggctgctggaggattctccaagcttgcttagcaagaagggcttggttgaaatgggtcagggatcgaaagcccaagcctccttcctttttggagcgacagagttttttccaactttgccaatgagttttgggccggttattatcattgacaccccaccagaaattggccataaccgattcgagagagtgacaggtggctaccggaaggcggaagcacgccattgagtaggtgggaatggcttgtatgacggatttaagcagggtttcctttccgcctttagaaaagactttattcttccaattatggagatgaccccagaccttgtcatgcagataatggaacagttgtttttttgttcgcccaatatgctgtgggaggcccaggtatttttcaaaagaagaccgaaccgggatacccatataatcggatatcaaagttcgatcccttagctcaacattaggggagaaatacaaagaggatttctggaaattaacttgctgccccgtggcccgcccataggcctcgagaacctctttgatgacattgcaaagagctgaatgttgggcttgacaaaaaaggaagctgtcatcaagcgaaaagaaggtgggagatagcgggggctcttctagcaactttaaagccaagaagagttttccttctttcctgttgatgcagcagggaagagaaaccctccgcacataacaggaagagataaggggaaagggggtcgccctggcggatacccctggaaggattgacgctgcctgagactttaccgttaagattaaattggaaggaggcagtggagatacaggaggagatcagatggacaaacctcgaggggaattggaatttcctgaggatagctattatgaatggccactccacacgatcgaaagctttagccatgtcaagcttgatcgccatccaacctttttttcctcgcgtcttgagcttgatggaatgcgcgacttcctgggctataataatgttgtcggaaatgagacggcccgggaggaaggcgctttggtgaggagagatgagagaattcagaacaagtttcagcctgttagctaaggtcttggagatgatcttataaatgatattacaaaggctaatgggtcgaaactctgagatgcacttaggttggtggactttgggaataagcgtaatgagggtgttattcagaggggccacactcgcatttccattgagaaagctggaggccgcttcaagcacatcgttcctgacaacatgccaattggctttgtagaaatgagaattgaaacc

SEQ ID NO: 107744 - DNA, 502 bp, Cannabis sativa
  modified_base (42)..(46): a, c, t, g, unknown or other
taatatatattacatattttaattttttaaaaatatatatannnnngtgcggattggattggatcggttacttttttaggtcaaacaacatccaataaaataattgagtgcggattggattggatagtttgtgaacacccctagttttaattccttgcctttcaagaaaactaactaactttttttaaaaaatttaattttaataaaataaatggaaattcaatccaataaaatgtaaaatcctgattacgtacaatacttgtgccccaagaatagggaactaactatagatattttcccgatattaatattgttatttgtcccatccgaaaaaaatgttactttttttttttttgaaaaaggaaaaatatgttattaataactcaataaaatcagcttccatatataatcaataaaaattttaatataatgtacgtagaaggataatcctgatattttatttacgtggtaagttaactaaaaaataatattcctagtaaag

SEQ ID NO: 107745 - DNA, 720 bp, Cannabis sativa
agttctgttggcggcacgcgaggtatatgtgaaaacctctgaaacttatcacatttcttgacaaactcgtgtgtgtccttattgatcgatggccagtaatatcctcgtctaatgatctttttatacagactttgccagccaacatgatccccacaaaggccttcataaatttctttgatgatttcatttgtttctgtaggaagaacacactaaagtaggggcattgagtaccctcttctatatagtttgccttcgataattgtgtagtgaggcactgaatacaataatttctgtggctcgtttttgtcattcagaagttgtccgtcgagtaaataattgataataggagtcatccatgtaggagagctatctatcatctcgacatcttcagtttcacttatacttggctcgctcaacatttctaccaaaactacattcaattcttccaagtcattctgggaggccagttttgctaaggcgtcggcgctagagttttgttctctcagaattttttcgattttaaagtaatcgaatctttccaagttcttctgaactttctctaaatactttgccatttttaagcctttggcctagtatagtattccccgaggacctggttcaagatcagctgcgaatcactataacaaatgagatttttgacttttaatgcctctgctatctttaagcgacgatcaaggcttcatattcagccttgttatt

SEQ ID NO: 107746 - DNA, 564 bp, Cannabis sativa
  modified_base (308)..(311): a, c, t, g, unknown or other
atttaattaaatatatctacaaaaataccaaaaagtctacctagaaaatatctatctagattattcataaactaattatttattttccaattgaaatataatctattttagtctatttattttaattaaccattaatgaaaattacttgatttaagttggtccaaaaaataatttttaactttaatttaatttttaaaattaaaaatttcaaaatatcaacatttaaataaataaatgcaattcaacataatgtggaaaaatgattattaaaataaaataaaacatattctgaaaattattctaattnnnnttgatctgaaattgaaaaatttccaacttaaatataatattctatttaattaaattcattaaaatagaaataattaagtacctagaataaaatcaacttaattattgattctaatttaaaatctaagaaaaaatattccaattttagatggtctaaaattaaataacattaattttcaacttaaataatttttttttaatatttaattaaatttcttgaaatagaaacaaataattaagtatcttaaataaaa

SEQ ID NO: 107747 - DNA, 746 bp, Cannabis sativa
  modified_base (87)..(109): a, c, t, g, unknown or other
  modified_base (230)..(230): a, c, t, g, unknown or other
  modified_base (516)..(518): a, c, t, g, unknown or other
ttatatgcatataatcatgaaataaatcatgtgaaccatccaacataaaaatgttattgctgatatttattaataagtaaatctgannnnnnnnnnnnnnnnnnnnnnnagggcacaaaacccaacagaacataatctgccagttcggatttccatataaaatagtttcggacaatggcaaatagtttgacagcgaatccttcaatgatttttgtgcgaaccatggtatnatcaaaagtttctccgcagtggcgcatccccaagcgaatggtcaagttgaagcagtcaacaaggccctgaaggatacactaaagaaaagactcgaggatgctaaaggaaactcatcagaggagcttcatgaagttctgtggtcgtactatacaactgagaaaatggcaagttgaattcagccatttctgtaggagcagaagtggaagcaaatgcagcagtaggttcatcagtaataacaggggaagcagaccgagcctttttcttagcagattttccttgaggagnnntctctggaactttgaaagtggttctaacagaaggcatctcgattgattcattctcaagaatcaattcctcttgatcagataaaatcttatagattaaatgaggaaatttaagattgagcctatgtttattgccctttctaagagaaataattttctcccaaatcatgtcagccaaatcaattttagcacaaattgaaactttatacaaaaagaaggcaagttcatttg

SEQ ID NO: 107748 - DNA, 3146 bp, Cannabis sativa
  modified_base (776)..(792): a, c, t, g, unknown or other
  modified_base (2392)..(2394): a, c, t, g, unknown or other
tattttatttcaaaaacttaaaaaacctaaaaaacttatttttctctctctacatctctctcatcatcccattcaaaaggagccaccaccttcctccctctatttcttcctctagatccctctcatccgcccaaagatctcgccgccctcaactcgcccggtcctctgtggatgcccaaatgtctgtcatggaagcatcctcggtctccggtcatccatggaagcccgtcaaagacccaaaacgtcccaccacaaagttcggaggtcagagctcgtgacttaatgggtaagtgttttataaaatatttttttaaaataattataaaagtatactctattttcagtagatttatgtagtgttgtttttatttatttagttttgatgtattcttcgttgaaatcgtgagatctagttttcttgagtattcagtgtgtgcgtaattttctcgatgctttatcgatacattctcgatccaaatgtcttaaggtcagggaagacatttatcgacagtttttcaatatgttctcgataagttatcgatagttcaagttttaaaaaaaagcttggaatttagttattattgattaattatcaacgtgttttcgatagattatcgatatgagtggggatttttttttttttttttgtcgttattgttaacgcggattttcgttaaccaaatttgagcctcacaatattgatttcacacagaaaaaattaaagctatcaaaataaagaatatgaacacatggttttttatgtggttttgcagttnnnnnnnnnnnnnnnnnacgagtcaatcttattcaaatttcggagtatttttcagggcctctttcatatgaattttttcgtcccttttttaaatttttctgccactatatataattacatagtgggccgttaattacaaagttgaccgaaataattttacagcaatcatccctaaaattgtgggatttgattacatattatgtagtgtaaatgcggtttatgatttgaaaaccgtatagttgtgattcaacagcttttattgggttaacactatcatgtattaaacacgtctttaactgttgaatctggagatgtctcgacagaaacttgattatagtgatctcaatagcgagctagggccattcttccttccgaggtcaacaatgtatgtcttgtgtcgattgcggttatttatgaagaggtcattctaactcgctagggttgtaagcctcgctcctgttagttggatgaagctataggaagtcttctcatagcgagatggtcatctcgcttacttgctcttcgagccaatccgacttttacaattagtttgttcattgcaagctaaggacttttatagttggtatgtgtcactttcttcggtgcttcgctattcatattcagcgacatatggtttctcgctaatacactaagtaccagttggtacattgattcctcgcctaagaccttacaatcagcgggttacaaatatactctgatacttacgtaagtaatgagttattccataaaaagatattgcaccgattctcattcccttaatcttgacacgtgtcctccatccgaatttcgagtataacaactgcctcttaaaaatttcttttttagtaaaaagagctttttaataattatagagggcatttttgtcaagatcttttcttggaaaaatgcatccttcaactctggcggttgtacaatttcgagagtcattatgaatcgtctcttcatattttgcacaacttccaaccgttagatttcttaatatttggctttcttgtcactggacttcgtgtataaaatggcggctcaagcttgtcatttttcacaaaccttctggctctttagtgagatccattttcataatgggtcatttctttcctgccaaaatgtcccttctgagttcagaagttcattctttcaaactcataatacctagatgctccaaccattttccatgtattcctacagacttcaagcctcaaccggagctggaaacgatgggttccaaggctgaggagcttccgaccaatccaaactatgggaaccccatagcctgccatgggcaatcctcacaagtgatcatagatcttgtgggcgatttaaaaggtccaccccaggctgataaagaattccagaggaaggttggcatggttgcagatgaatttgggaaggaagctagcttggtttctatcagagaatccgaccaacccaagacccaaacctgcgccagaagatctttgtaccaacctctttctgggatcgaggaatttcctgaggctgggaaaaagatctcggcttcaggaaatgggatcttgtgatgatgaggggaatgaggtctgtgcagagattaaggctctctacatgtagccggtctttctnnngctatgtgtagtcggtctttctctgagctacgtgtagatggtctttttcaagctatgtgcagacggtctttctcgagttcatcggcttcccctctcatccttggtttaggaagatgacttaatggtttgcccctagtggcatttttgtaaagacaaagttgtaactggttttaggtttttccttatcttaaatgccttgtactgttttcatttgaacttaatacaattgtgtttgcttgcatttttattcacaatgtaaacaactatattttgattaaatatacattacttttgggtttctccattgcagtaatctaccaaactttttgattttcgagcagttgtcaattctgcctcgctatagcagttataatctgccttaagaaaacttaaatacactttaaggattttatcactttgtatatttttaatttgctcgtataaatagttatatgatctatccattttctagatttaagtacttttatcaaggcatcgtgatgtctcgttttgtactttcctagctcgtgagaaccgttagcattcagttttatacgtgagttataacttttgattttcctttcctgtcggataggttataaatcaaaaattatagttgtttaattctttctttgtgaaaaagttttgatcaagatgttataacgattcgacccctctctcgtcaaaaaagtttggtcagagagttataacagtttgactccacttttgtcaaagaagtttagtcgagaacc

SEQ ID NO: 107749 - DNA, 912 bp, Cannabis sativa
ggagctctccttttataagtgaatgagacccacaaaaataggaaaaaataattcaaaatatgaaaaaaaaaatctaaattggctatttttgattgtatatgatgatccaacgatcaaaattaacttctgaaactgatagtcaattttcgaagcctggcaagccccacttcgggtaagttggagcttatttttgtaactcccttggggtgaaatttgaagtcgataacatgtctgattcagggccatccattgcttctttgtaagtcaatggatcctccttgtctgtgttagaaataagaacatgtgcttcatgttcgtagcaaacaggttgtctcataatcctcccactacgacaatgtattggggtttccttttcagaaaccatgataaccgctgttggtcgttcaactaatggtgctaaaatcattagttcaaaaatctcatttctaatttcctcgataaccacttgaatgtgtggcttgtgacttttcatatagtcatgtttaagaaaagtaacatttgacacaaatactttattatcttgatgaatatagaaataggcacttcgagtctcatctgaatatcgtacaaatatacacacttaagtcttaggagcaagcttcctagacttaggtttaaaaatatgagcaggataaccccaaatacgaaaatatttcaaactaggttttgtcccattccataattccattggagtattgcctatgatattcgagggtactacattcaaaatgtaggtagctgctagaagttcgtatccccagaagttcaatggcagtaatgaatagtacattatcgatctgaccatgtctaacaaggtctattttcttctctctacaacaccgttctactgaggtgttctaggtgttgtaagttgggacaagatcccttctt

SEQ ID NO: 107750 - DNA, 1110 bp, Cannabis sativa
tgcccataacacccctgggagttcgtctgcccatcttcctttggccttgtctagtcttttctttaaagatgccaccactgtcttgtttgttgattctgcttgtccattcaattgaggatatcttggtgttgagaatgggagctgtattccccatttaatacaaaagttttgaaagtctaggcttatgaattgtgagccgttgtcagtcactatttattttggcataccgaatctgcatatgacgttcttccaaataaagcttttgacttctcgatccctgacttgtgcataggcttctgcttctacctatttggtgaagtagtcagttaccaccaacatgaaaactctttgtcccgagctgtaggcatcttcccgacgatgtccattccccatttcatgaaaggccaaggagttaatgttgaatggagcttttcaggtggcatgcgtgatacttaagtgaacctctggcatttgtcgcatcttttgacgaaatcatacgaatctgtcctcattgtcggtcagtagtattcgattgtaagatccttgttgcataggcttcttggtcccgagtgatttccacattcaccttcgtgtagttctgtcagtatgtacttcatttcggatggacttagacatctaaggagggtccccgagaatgatctcttgtataatcgatcattgtacaaggtgaacctggaggctttggtcctcaacttccttgattcatacttgttggtaggtaaggtgccatggagcaggtattcttcgattggtgtcatccaagactgattttcgaccacgttcaattattgttctggttgcttccatacggctggccattgcatatatactacatggattgttaccccattcttggtctgaattgtcgagcccaagtttgtgagtgcatctacatggttattttctaatctaggaacttggataattgaaaatttggtaaagcattttaccttttctttgagtatctctaagtacgccatcatcttagaatcttttgcttggtatgatccattgaacttgttgactaccagtgtggagtctgagttgacttcaatattctttatgttgagctccttggctaggtccagt

SEQ ID NO: 107751 - DNA, 1124 bp, Cannabis sativa
ctatgggtgaggacattttattgtacttagattaagaatctaaaggtgataagagagtagggtacataaaagtaaatgtagaacttggtgtatgttaatttatctccttctcaatttttaataatattttactttgcataactttttcacctttatttttataaaaaaatactaaggaaaaaaaaactattttcacttttgattcggattttctttttatttttttttacttttacttattaattttacttgaaaaattctaatgtcccttcatactattatttattgttcttctaacactgaaaaaaaaaatacttgtttctttttttttttttaataacaattaagcctaaatatacattaaaaaataataaaataaaaactaataaaaaaatatatttatcaattgtactaaaaactaaaaaatatttattgtcaaatccatggaaattgcgtgagatcgaaaaaaattcttttttaatttaagttattaaaattctaacctaattcaaaaaataatgctatttttggtaacaaaataaaataaagtatttaatagtaaatatgacaattgacaagtaacatatatttttaatggtattcggagaaattattataaaaatatttataattatatcgattctcataatttaattagtaatcaaactaattattttctaacaaaaatagattttcattcgctttaaaattataacttctaagcattaaatgtgaaataatttaaagtaaatacataaattaaataatattatttttaataaaatatgtaaccaagcattaataatttctaactataaaaaatatgtgatattaaagatgaaagaaattattttaagaagcgaaaaattataagcatttatactgagaatcaacataaaaatatttatttaattatatacactaagtttcatcgtccaccttaatattaagggaacttagaacccataagaaaattaactaagaaaaagcggtaatctaacattgagcgcttagagtgttctctagatttctctgtttgaaactgtcttgaattctaaaaacctaagcttctatttatagaaaggtaaaaagactaatgcgcaattaaaacttataacaaattg

SEQ ID NO: 107752 - DNA, 814 bp, Cannabis sativa
gaaaaacgtttgggaatacccataagaggatgtacattataaacccaactttgggcgattacacgataatcaagagagctagtgacggttccattatgaagaatcacatcaatcaagaagggatgaagacaaatctcacctaaaacctaggcaacctattatgtaggttatgcatgccctattttgtatattttgggaacttgtgtgtgcctatagatagcacttgaagacaagtaaacccttttcttcttcccaccaatcgctataaatacccctcaataaaattagtgtggggatcggaaaaaaggaagacaacaaacattctctataagaaacacccacttattaataacggagactcgtgaactacgactcattaatgcctaaaccacataaatatattcgcattaattatccttaagctctaattattgcattaaatatttggttgctgaaaacctcggtcaacattttagtgctttcattgagagctataggaagcattgtccaaagaacgacaacaaaagatttagagtatgatggtggagacttgaaaccatacacgccagcctcgtcccccccaagatccttaaaaccctggggacgaagaagtagcctcacgagtaaacatggactctgaagagcgagacgagacaaatgacgaggagtacgaagaaaaccaagaagggtatgatgcttatgacgatggcagttataccgaactactggacctaaggcaaaaggcggctgatcacgaggctgaactggtcgcgcaaaaggaacaaaataggaggatgcaagagataatggtcgc

SEQ ID NO: 107753 - DNA, 722 bp, Cannabis sativa
  modified_base (139)..(139): a, c, t, g, unknown or other
tactaaccagcctagttcgatacagacctatttacaagagaaatgctaaaaggtatcagtagtgtcaattaccctcctacgtgttaatattgctattggtctaattaagtatcgaatctcatatagtttaatataatancttttagggagtatcgctagttaattgcaaggcgacacgtcttaaggatactaggcaccactggtacccaatagcaatactctatttacaactataatgttttaaatactattgatacattcattagctgctgctaggttgggatatgaaatactctttaaattttggtaagtacaacatatgaatttaatgaaacaccatttgactttgtttgttggattctccaccttaattaaggcgtttgaacttctttttatgccactcacattgaagttttgtagtttaccgacacataaactatttttgtccattacaatttcaagctgcagttactggtttcagtttcatgtacaattgtttttcaataaataagagtgtttatttggtacctttaactttatctacatatggtttcagtttcatgtacaattgttttttttaataaataagagtgttcgcttggtactttattttatctaaatattaggggtgttcaacaaaatttacaaaccgtccaaatcaaaccgaataaaccgacaaaaaatacaacctaaaatagtacaataaaaatccaaactgccca

SEQ ID NO: 107754 - DNA, 619 bp, Cannabis sativa
  modified_base (45)..(57): a, c, t, g, unknown or other
ttttttaaaaaaataaataatatttagttttttatattaagaatnnnnnnnnnnnnnataaaataaataaatgtaatgtatttgggccctttacgtgtctatatttattagttaataacggaagtggtagtaacggtgttagagaattgtaacattgggtatttttgccacaaaaaataaacattagctatttaagtgtataaaatcggaaatattaggtatttatgccgcaatttacccattttaaaaaatagtaatttgtactataaatacttaagtttaactctcaattagaaataaatacttaagtttaacttttgacgataatagtacttaagttatatatctagaacttctacaagtatatatgactattaactattaagtataagtcaatagacacataagagcttctgattaaatttttattttttattcaaaaatttatttacatatatcaataaaaaatgacacctagttgatgggttggagaagctacttaagttttaaaattataatttagttattattataaaaaattaaacttaaatatttacttacaattaaaaactaaacttcaatatttatgttaaataaaaaatgctttaccaatattttc

SEQ ID NO: 107755 - DNA, 594 bp, Cannabis sativa
tggctagagttggtgaagaattatgattgtgagatcctttatcaccctgggaaggccaacgtggttgccgatgccttgagtagaaagggccagagtcagataaatgcagtgaagcaaatctcgcatcagttatcaaatgaaatgacccaagctaaaatcgagttggttgtggggcaattggctaatattaccctacaatctactcttttggagcgaatcagagaagcacagttgcaagatccagagttagtgaaatcttgagatagggtttcagctagaaagactggtgaatttgaagtggatgatacgaaaatgctacgatttatgaatcgtgtttgtttgcctatagacgacgacattaaaagagagattatgaatgagtctcatatgactccttactcagttcatccagtgtcaacaaagatgtatcaagacctcaaagctatgttctggtggccaggagattgttaacgcccaaaattgtgacttccacaacagtggttgtagtatagatcgggcggtcgattccacagggaggtgattatgaacaaaaacgttagtagaaaaatgaaaacaaaaggttaataaagagtg

SEQ ID NO: 107756 - DNA, 716 bp, Cannabis sativa
ataaagtcaagttcttatcctgtggaagccaatgcaatggcaatggtcaaatgtctaggccatgtaatattaatctttatattaaattataaagtgatgtatagcgacttaacagagtcatgtacattgtacgatctcaaacacaatgtacatacattgtacctctttttcgagccaaacattgtacttaatccccttaagagcattggaaaatatggttcaaaaaaaaaaataaataataataataaagagcattgaaacaatctctactctataggtgccaaaaatatatacaaccaatttttttttttctagttcgtccagataagacacttttctttttggtagaaaaaagatattctaatgctaagcaactactaaggtttgtcaaaagtatacacatttattttattatattagacagatgttacgtgccaaatcacgtatattaattttattttagtttttagtttttttaatatcataattttaaaattaataatattcaatatagtgaaaatactcatctggttaaactatcaaaacattaaaaattaaattaaaataatatttaaaatttaactaattataaatatcaaaatttgaaaataatttttaataaaaaaataaacaatatgagcaaatttattattaattgcagattaattatatttaggtttaactaacacaacttctaataatttgttatttttttt

SEQ ID NO: 107757 - DNA, 876 bp, Cannabis sativa
atcccagtcatggtagtttaaaatggacattgaaatgaactgttctgcattgattatcagtacattgttttaatcagccacatgaaatctcacttttttaaaaaaaacaattttccaggatcttgaatacatcatgtctcctgggatgagaagctatgaaacttgtggattgatgagacaaatgaatccaagggaagttttagcgtctgatcaaaatcatcctgaaatttcttccaagacaatggctgcctttgaacccttattgttcggtaaggacgactatttttttcatgatgagaatgtcaagatgaagctatctcagtattgccatgttccagtaagtcaacaaaaaacaaaaaaaaaagaacttttttatactattgttcaaatcagttgaaatattaattaatactttgtatttgattttgttacagaaagataacatcatactctgtatgacgtttcaaacatttggcatattcctctgctcctaagggttagtgggtttttttctttctttctaatttcttcttatgtaccatgtaccctatgcaacttcaaatgatggttttattttgttctactcatgaattaggatcagaaggctcatgaagccatcttccaagttctgaaccttcaaatgtttgtttcaatgttttagcatcatcttttttgttcatgttagcaataattgccttacacacacaagaaatatatatgttggcctacggaagaaggtttttatggattgggttgcatccactgatttagaggatgcaacagctaaagaggtgactaattaaaacatgttcacttgtatttttgtttacattattactaatgttatgttcgtcattcataaccagaatcctgatg

SEQ ID NO: 107758 - DNA, 715 bp, Cannabis sativa
gagtattaatttagtagtattataatttctttgtgatatatagttttattactatggtatattaaattttaagaatacgatatatcaaatactattgtatatatttaatgatctaatatatttattcacttttattacaatatattaatatgcaatactacaaaatttatataacttaatttaattattatctaatttattttaaagaaattaatatgtaataaatataattttataattttattagctaatttattatatttgatcattttttaattaaaaaaaaaaagacatttactcacttagcttccaattttaagatcattttgcatcttagcccttgattacattgatgatcatttaatattttatcgagaatatataaaattattattatttattattttattatttaaataatagtaatatgaaaaataaagaatgtaaagtttattaaaagtcaattaatcataataattaatgacattatagtaaataaaaagttaacatttattgtggtttaaatttggcacagtactactatatcttgtgccaaatttgacataacttttagcatgtgccaaatttgacacaacttttaggatgtgccaaatttagcacaacttttagaacatcattggagcagtagttttttttaagtgtgctaaaatatagcaatataccacctttttgacactccattaaaaatgctctt

SEQ ID NO: 107759 - DNA, 565 bp, Cannabis sativa
gagtgttctcatagtgttgtagagggaatagtttgttgttgggcaaagtcctttgagacttgtctgggccttgagttttccggcaaaatccttttagaagtgaagcctttacgcatatattatgcttggaaaaagtcaagcacagcattacaaaagttttaccctagaatatgttcaaaagtagtatttaaaaaaataactaacaaacttttctggcaaggtacaaatcttgaatcaaatcaagtatactatattaagaaaatatatttataataagattatgtatttcaatatatatctaacttaatcttaaagttagcataaagcatgaagaaaataatgtgagagtgatagtttaattacattgtgcttagaagagattttgtctagacatatgatgtgagaaagaaaaatactcaataatctttaaataaataaataaattcaaagtaatatcattttaaacttttgtaaattatagtcaagtgaaaccttgacaaatctttcaaactgtaaaagatttagtaagaataacatctagctagggagataagactaaattacc

SEQ ID NO: 107760 - DNA, 984 bp, Cannabis sativa
aagcaatcataactaccataaaacgcgtattaaaaagaccactactgggcattaggtagttgttgggatgaactagcttctcttgccttttgcttcattctccgcttgttcctgttcacagttttagggtctggatttttcttggggggatgacccttcattttcttctcagtaggaggatcctgagacaagtaatttaaagggataggttatagttacaattcaagaaattacaattcaaatagaagtttaatttgaagaaatatacttgattgacttttttggttcttacaactagttttaatatgccctcgttgtttgcagtttaaacactggttggtttgtggcgttttcttcaatttagttgcacctactggaggttcatccctttctctgttccttgattttttttggcctcccaggcaatataagtttcaggtggaggaaggattggacttttccctttgttctcccattcatcaggactaggcattggtgcaataccctttgcatagatagctttgaaggcttccttcttgtagcaaggatccacaaattggtattcatcaagattagaaaaccatatacaagctatgccatgaccacatggtatacctgttagatcaaatgatctacatgtacatgttcttgtctccaaatcaacagataatacttggcctgttatgtaagtaacttgaaatgatccaccaattgactttgtgcaaatgcattgttgtgctacctttttgttcttctcaatgatatcaaagatcctctttccaacagaaaaattccatttagagacactatctctttgcttgcacatcctttccatcaaccagaaacgtattgactctaaaagagtgattatcattttgtctctgctatctaagattgctgaattgaagctctcacacagattgttaaggagcatatcacacttcactgaagtcctaaagtgtgattttgaccattctgtgggtg

SEQ ID NO: 107761 - DNA, 953 bp, Cannabis sativa
  modified_base (214)..(220): a, c, t, g, unknown or other
  modified_base (373)..(374): a, c, t, g, unknown or other
attttttattcatttatttccttccgaactcataatataatacttaatataaaacatagcatacgtgcatcgcacgtaacaatatactagtatatatataaatattttgtccaaacaaaaatattatatactgcttgttaattccattttttgcatactagtatgctttaatatcgtttcctattttgtgtattcaaacttggaaggaaagttnnnnnnntttcctatttttggaaaaaaggtaaaaatagtaagtttgcttacctttctttttttatctaaccagctgtataatctgatcctgtgttgagtttcccattttctcagatcaaattttttgaagagaaaaccggagctaaactttccttttctnnaaaaggaaagttgtagttactgtccacgattctgtaggtacaaaaatgaaaattcctggactgattgaagaattattttagggaagtttctagtgggctgaggtcttgttcagaccgaatgtaagttgtcaataagatgtatattcattataaatacatcttatatcagctaggttttggatctctttcaaacacttagaattgtattcatattttaaggaaagagtgtctttgtttagtacctcttttggtacctctcttgtatctttgaatttcattcatatctttagaaaagagagtctttgttatgtagagaagagctgttctactcttactctgtttatttgtagctgtattgtcttgagtgtgtattcaagtctacatcgaagaagaacatcagttcaaccttcgggagaaggtgttaacaagctttcgggagattgcttttgaagtcttgcatcgggaggatacaagcacaccatcgggacaagggtttttacaagctttcaggagattgcttttgaagtcttgcatcgggatgatacaagcacacaaccttcgggagatggttgtataggc

SEQ ID NO: 107762 - DNA, 842 bp, Cannabis sativa
atcttattattcagatagatttttgattgagtattttatttttttttttagggcctcttttgtatgagttttttcttcccttttctgatcttctttgtcactatttataattacatagtggaccaagaattacaaagttcacctaaatatgtttacaacaatcatccctaaagtcgagggatttgattacatatcacgtagtgtaaatgcagtttatgatttgaaaatcatacagctgtgattttaccgcttttactgggtcaaaactaacgtgtattaaacacgtctttaattgttgtatctggagatgtctcgatagaaacttggttataatgatcccaatagcgagctggggccattcttccttccgaggtcgacgatgtatatcttgtgtcgatcgcggttatttacaaagaattcttctgactcgccagggttgtaagcctcactctcattagctgaatgaagctataggaagtctttccatgatgagatggtcacctcgcttacttatttttttgagccgatatgacttttacacttagttttttcattgcacgctaaggactttcacggttgatacgtgtcgctttctctggtacctcgctattcgcatttagcgatatatggtttctcgctaatatactaagtgccagtttgtacattgattcctcgcttaagacctcacagttagcgggttacaaatatactctgactcttatgtaattaataagttattccataagagcaatcgcattgattcacattccctttatcctgacacgtgtccttcattgacgtggcatccaaattttgggtataacaatttccccttaaaaagt

SEQ ID NO: 107763 - DNA, 870 bp, Cannabis sativa
  modified_base (727)..(730): a, c, t, g, unknown or other
ttgattttctaagtatagaaaatcaaatttcccaattagttttccaattttaccataaataagatttattatttattctaacaataaataataattaattaattctcattaatctcttatttcacaagaattaaaataaagactattttctctaaaataatatatatctagctgattaatataatttaatctactaaaattaaatagttatacaatttataattgttataattattcaaaataataaataatttcatatattaattattattttttgtccttaagaatttatttctcatagaaattaagtctcactcaaagttactcatcaaataaaactttcccctatacagtgttgtatagaggtgactcgaggaccatggacctatatttcgaagctctaataaacacttgattattatcgatctcattgatagaataattcagtttattaattctattattactccactataaatataaaattacactctttgataatatagaattatatttagagaattcttaattgcaggtcattgataattaatacaagtagttcttcctcttattattagtttagtttattattagagttgctaaaaattactattttacccttctaattatcacttgactcattatgtaccattaattcaatgtgaacagttaatctataacttattatagatttggatctaactgttagcactcccagaattaacannnnaagggaactaatatttgatctattaggaaagcttggattccactattgtataacaaggtcgaagccactcgtgttattgtgcttccaaagcagaagttgaaagaatcatcttctttgagaaactttaatgagtgaatcaa

SEQ ID NO: 107764 - DNA, 545 bp, Cannabis sativa
  modified_base (288)..(289): a, c, t, g, unknown or other
agtttaataaaatttccaaaattgagaaattataactctaatgccatttctaaaaagtggggtccacaataaataaaaaatcatatataattataaaatatcaataattaatgctaattgcctttattaattcataatccaacatgcagtcattacaaaacatagttagtagatctagaataaaaaataaaaacagtctgagttattgcgagagctgaccgagagataacctgttaccactgaaggactggcttctgaattaacctgagttattgcaaacacccttgnnggagtgggtttcgctgcagtcttttgtgtctcagtcttgagttggggacaatcccttttgtaatgccctgacataccacactgaaagcatccctgccctctacactcccccagatgatgctttttacaactggggcactctgggtaagtgtatcgagttacagtgctactctggcaattgcctcgaccctagttccctcgaaacctcttattctgacctgagccactggatacagtaggtgcctttcttttttgat

SEQ ID NO: 107765 - DNA, 1112 bp, Cannabis sativa
tattttacttaggttggaaggaaaagaatttagaaagaaagaaacatctttctctctcttcacaactctctttctctcttttgatccttcaaggcagtagctaggattggaattgtttgagtgatctaaaggatttttggtggaatttgtgtgttgtgattcagggtatctctccctattctttctttcgttaatttttctttagcctaagttaggtttaatgtgtgaacttgggttttatgttgctgtatgaattaaggtagcttgttttggagtttgcttggtattgtttaagttaacttgggctggaattattagttgagttgaggtttgagcaaagtttgagtttgagaactcaaacctagctctcttaatagtgactttggatttttgtgctaattgttaggttctattgcttgatattggttttgtggagtatatacaggcattctggagagcattggagagtttggggttaaattgaattgtagggctcattttttgggttcccagcacataatcggttgaccagttctgagggacccgtagaaccggtcgaccggttggttcccatgaaccgggcttccggttgggaaccggtctgcaagttgcgctattttccaaaaccctagttttccccgttttgtgttgtttagggtgttagcatcttatttatcgatagggttatgcttaatttcaattttaaattctcgataagtgttttagcgtgtctctcatcgagttttgaacgttttgatttagggccctgtaaagcgtcgagctgcacttccactcaggctgaccagcacacttgagcacggaacgaggtaagatagcataataatatatatatgtgaatatatgcttgtgttaattgtttacactactgacactaattgtttatgtgattttaaggatgttagtatagtgtaggtttttagagtagttacagtgttaccaacacgagtactaaggggtacgtcgcgcatctggtacaacatttagtaacttttgggggtacaataatggctctaccaatacgagtacagggttggtactttagtgcatttggtacagtggtcgtacttcccttaataacgttcttaaccatt

SEQ ID NO: 107766 - DNA, 528 bp, Cannabis sativa
attataccccttaggttaatgtaattttttttttgatggacaagagaattgtattgctcaaaaactgattcttacatcaaatagcatcctcaattttaggacataaaacaatttaagttgtacatatatggttacaaagaataaaactaattagcatcctctaaactaactttcttcggccatactaatgcaattcgatttctaacttcctctttgactttctgtgttatattccttgtgttttccttctgtgcattataatatttgtcatttctagcatactaaatatgatacaccaagtttgccactgttgcagaaactacatatttcctaaattttgatagctttgcgctttcaattcaccttacaatttgttgcaaggaaactatttgagctctctaatttcacgacaagaaaagccatttttgccagcgcattgttgcgccggcaaaagtaccctaactgcgccggcaaagcttatctgggaagcttggtcggtaaaggagtttttaccggcgcgtagagtaa

SEQ ID NO: 107767 - DNA, 679 bp, Cannabis sativa
tactcccctaattaatcttatgaacccaccaggattatggtaggaaatatcatttggtgaaaatagttgattagggaaaataagcaagttggtaaggagttcaacaaagttttttcattaggaaaaaatggaatgaaggaggaggcatacatgactatggaatgatcaacaagataatcagaatcttcctctgctgtcttcatatagtagactcgatatgcacgagcaacactccggatctcatctggatctcctgttaaccctattaactttggatggaactctggtagtgaaagaaaataagaaattacataacagaaaaattaaccaatgagataagaataaacattgaacattcatatatggaaagaaaaagcacctttgacatattcagcaacttgctcgacggtatctctctcgggatcaacagagatgaacacaggtacaatttcaagccctgcttttttttctacacaggaatatttttattacagtaacattttatagtaaaatgttataactaagtctaacatggttacagagaaagaatatattttctcaaaagaaaaacaggagatttctaaaggcaaaggaggtgagaaaggagaagtcaagccttagatattcatccaaatcctaaagcatcataacataggaatgaatggaacacagatacata

SEQ ID NO: 107768 - DNA, 587 bp, Cannabis sativa
tctcgcagtcataatctttaaccaattccagccaccttctctgcctcatatttaaatctttctgggtgaaaaagtatttgagactcaatgatcagtgtaaatcttgcatttctcaccacaaagatagtgtcgccattttttagagcaaatactacagtagcaagctctaaatcatgcgttgggtagcgatactcatagtctttcagttgacgggaggcataggctataactttgtgagcttgcatcagaacacatcccaaaccctgtctggatgcatcacagtaaacaacaaacttttcttgattcaatggcaaagataacactggtgctattatcaatccctgtttcaactcctgaaaacttgcttcacatttgtctgaccatatgaactgttgattcttcttagttaactcggttagtggcatagagatcttagagaatccttcgacaaagcgtcgataataccctgctaaacagagaaaactttgaacttctgtcacagattctggcctcgaccaattcttcactgattcaatctttcccaggtcaaccataattccatcttccgacaatatgccctagaaaag

SEQ ID NO: 107769 - DNA, 545 bp, Cannabis sativa
gtattataataatgtagtgaaataggcggtattatgagagatgcaccacaaaaaagaggtgggtttttttccaaataaaaaaaataccgccaaatcaaaaagaatactattaatgtatattttctcactctcttatattttaataaaaaataaaaaatacatttcataaaattatatgccccccttggacacagattttttttccattacctgtaagaagaaattagtcaccaaagataaagcccaaataagtaaaggccaaaaaaaaaaaataaagcccaacaaaatggttgagagtagatgtgaaacaaatgacatttggggagtttacatatctataataataaagataaataatactaaatttgttagagaaaaattaatacacccaaatacaataataattattataaataacaaatttaatttatgtaataaaaaaatacaccttttctaacgtacaactataataactttctttaaataactttgtatgattctacaatgcacccctttaaaagggatgtactgatacacccttgact

SEQ ID NO: 107770 - DNA, 761 bp, Cannabis sativa
tgattgtgtgtaatattgatgtagataagcaacctagcttgtttgcatgttttggtccaaagttggctttccctagagttgactttaactttcaggttgacttttgactttaagcttttgaagtcctcttttggatagagtcttaaattcttgatctcttaatgaaacttttgctcttgtgaagtatgaagtagttgatatacttgttgaatccacttctttgattatgtttcactctaccgagtaaatatgaatgctttgtgaattgcttctaaattgatcaagaaaagattagtaacaaataataatcaaatagaataattcaattttttttttaaataaaatatcaacttcattgaaataattagcattttgagtacataagattttgtaattcaaccgaaatacgaaaaataaaaatgctacaattagtgttaaaacgggagtttctagcaatgtagtgtacaatccgatttgttgatcgtttaataaaaaataaattgacatatataaatgattatacttccataacttatcaaatgagtttaattcatgaaaaaagaaggtaaaagagaagaaatatatagaaaaaactttaaatatataagaaaaagaataggtaaatatttgaattttattatcagtacaataaattattaaaataaaatttagagatgattttaaataattataatatatataattataaaaattaaaagttaacatactttgtaataccaaaattgatagggaaggaaaaa

SEQ ID NO: 107771 - DNA, 780 bp, Cannabis sativa
  modified_base (534)..(538): a, c, t, g, unknown or other
acatcaaacaactgcaacaactatagagttcgaaaacctaaattcatgcaaaaactcttaacttgaaatccaagaaactaaggaggaagttgctagaggctttaccttgacttggattcccttgaaactagctataaaacacctttaattgctaaagaaaaataaaaatcaaaccaaccctagctgggttgggttctaattctaagagggttcgaaagagagagagagcttgtgggaaaaaatgtgatttttgttctcaattttaatttttcataaaaggaattaaaaatggttggttttatctaaaataatcagccaagtaattaaataaaattcagataaaatacttagcataatctcacaaaaagacaaaacacaaaaagccaaaaatgaccattttgcccttccatactaaaaaccacaaaaggtcactaaggggtattttgggaaattttaaaatccagactattctcgacattccaaacgtctaaattattgtcccactatactaaaaatactaggatgtgattctannnnncaaacaccgcgttccaatgttgtcgggcacataacatgcaaaatttatgaaatttctatatgtgacataaaaatgcattctgaattcaaataaatcattataaataactaattcaatattaacaaatgattttcataattaagccctaattatctgctaattcccaaattaaagctaagcagtctttacaattatccccccttaaaaggatttcgtcctcgaaatctaatctgaacaactct

SEQ ID NO: 107772 - DNA, 516 bp, Cannabis sativa
aacctcttccatatacatatatatgatttatgatgtataacaccaaggctctgaatgaaagcactaagctgttaacacagattttcgtcaactaaataaatagcctttttagtaataagtatactacaaaatttataacacgagatattttacatagttttgtagttaaaatttacatactccacgagtcattattaaggatattttttgaaatacagaatacaaatcttaatttttaaaataatagaatttctctctgttatacctgaaattctactgcaattcaaaaattgatacgtgtcctgcagtggaatatgaacaacatagtaaagtcatatcattaaatgcaacataaaataactcgttataaaggtttaatagaaaatatttataactcgctgactatatagtcttaagcgagataaggataaaatagtaggatttataaaacactctagaaatatatatatatatatatatcacagatctaaacatattcctaaaagtgctttaata

SEQ ID NO: 107773 - DNA, 621 bp, Cannabis sativa
ttgctagcaaaatcgaataggctcctatggagaatcctaccaagtttactgctttctctgtcctgacaaaagatttagaaactgtttacatggctactcaatcattagcgttgtacaagaagccgcacccatgaaaaaagacgtaagcaagagagacagaccaagttttgttgttttcatggggattattgccatgacaccaacggcaaaatctgaagcgaaattgaatttttgataagaaagagtaatccggatgtgcaaaaatatgtcaaggtcgatgaaaatgaaaggggcgataacaaccaagatttactaccaccaccagtagaaggacatctgcaagttattattggaggtccgtagatagctggagattcgggcaaagcccgggaaaggtatgcccgaacagtacagcatgagcaagaagaagtagttctggctgtcgaagagaggaaaccaaaaataccacgggcaggggagcccaccataacatttagtgatgaagatgctgtcaagattagttttccgttggtcatggaagtccagataggcaacaagatcgtggctcgaaccatgatagataatggtattgggttttgtgccctaaataaaacccattac

SEQ ID NO: 107774 - DNA, 601 bp, Cannabis sativa
attccagaaaaggtaatagggttgtcttataaagacaacaatactatatttttatgtcggattagggatgagggttatcttattagacaacaatgagattgattaccttctaaggtaacagatacgacttgttgtattagacaaatattaatatattattgaatgtttatatacttgtgaatatctgagtttaaattgatgggattgactatttgtgcattaattagtggtattatgttattacttttcttgttaagtccttgtaactcacaagtgctatgtggtgcagataaagattagaatacggttgggtagccatgagtcaaggttcttccccaacgaatgtacatatcagcttattcggcaagtggagccgagttgtgaggattcatattttatgatgttctagacttaaatgtgtattttgttaaaaaaaatatgtaatggcatcttttgtaatattttaaaagggaatccccgaactcaaaacggttatgccagtaaattttatgtttcaaattaattagcaagattttaattaaatcacaaatttttttgttagtttattattataaaataatttataaaagcacacatgtgg

SEQ ID NO: 107775 - DNA, 549 bp, Cannabis sativa
ggtatgggccaaaatatttctctcaccaaaaataaattgataagaaccaatattgcattaaaaaaaagactgtgtttggatatctccaacaatgaatcaagttcctttgttagaaaattgtatatcatattatgttaaaccaattaaatttggccaactcaactaatttaattttatattaaatatgctaatcctcattcctctaacaattaccccatctccaaaaataaacggcattaatttatagggagtacaaaaaatgtcacttttactaccacagttcgttactgtgctagtaaaagtaacttttaatagcacatttcgcaaactgtactgataaaaaaatcaaagttttaccagcgcacatttacagtggctaaaatctaacttttactagcgcatttacgcgttaggaaaaatcatttttgtcagtgctttttattattttgcatgtgctggcaaaagttctaataccaacgttaatttgccaacccttttgccaatacatcagagtaaattatattgtactagcgcaataccaaactttta

SEQ ID NO: 107776 - DNA, 899 bp, Cannabis sativa
ggtttcttgggagcaaaagtagcctctacccccatggaagcaaatattaaatcaagcaaagatgttggcactcctctttcggatccaaccatttatagaagacttatgggtaagctcatttatttgtccattactcgtccggacatctcctatgctgtcaacactttaagtcagtttttatatgagccacgcacccctcatttacatgatgcacataggattcttcaatatctcaaacgcacaccaggccaaggcctgaatttttatgctaattctaatcctcatttgtgtgcttttgctgaatctaacttcacaaatgcagaacaacaacttaaaaaaaattttagttgcagattggggctcttgagttgacacccatcggtccatcacagggtattgtgtcttccttggatagtccttggtctcatggaagtctaaaaagcagccaacacttttgaaatcttccgctgaagctgagtatcgagctatggctcaagctacttgcgaaatcacttggatccttgctctcttatcagactttggcattcattatcttatattgtgataatacagcagctatacacatcccgaaaaacccaattttccacgagcttatgaaacacattgatattaactgtcatattgtgagggaaaagcttcaacaaggtcatctcaaactcctacatgtctctacaaaggataacatcgtcgatatcttaaccaaacctttattctccaatcaatttcaatctcttgtacacaagatgaaagttcacaacatgtacacttcatcttgaggggggtgtattaggattgggcttatttcttattttatgttttgtgcttcttatttgggtttttcccactttgtatcaatactatatttttcctattattgg

SEQ ID NO: 107777 - DNA, 543 bp, Cannabis sativa
atctatattaataagtaaattttattatattgaaatgagttttatttagggcataaaactcaacgcaagcatcttaaggtcaaaattgaggatctgatacagtgtggatactgaaaggaaaaccaaagacctaataattttaataaacagttccaagtcgctagggatagaataattttaagaaacagttgcaggccgctagggatatctccgtgaataaccctaactcccgtaactagacaattcttaacttccactagctccaaaataggttttataacttccaaataccctaaaccaggtctcagaaacaccccgagtgaatattagattcaaggagaaaaccttagaatttccccctacagactgaccaatcgatcggttctgcaacaccagaaccaaccggtcgatcggttctggcaggcaggaagttctaagttttcatcctcaaaatcgagccaaaaccattccaaacctatccaactgctccagatcaaataatattataaacacaacatattcaaagcaccaaaccacaacaat

SEQ ID NO: 107778 - DNA, 513 bp, Cannabis sativa
actccaagtagggttcaggtccgggtccaggattttagttcgggtccacgtttgggatcaaggatttgggtccgagtcccaggtttgggtttggggtttgaggtccgggtccgtggtctgggtcctggcttggggttcagatctgatatgggtccaaggttagggttcggtctggttccgtcattcgggtatggcctgagtcccaggttgagtcctagtttgggatctgggtatggggtctaggtctgggtctgggttcgaggttcgaggtccggggttcaaggtccgggtctgaatcctaggtctgggtcagggtcctagtctcgggtccgagtcccaggtctcgaacttaggtctaggtccaggtccgggtcagagattggggttgacttcagattatttattgtaatagttaatacaatacattactttatccaaacaaagtgttatttattatttaatacattacgacccttatacgacctacccaacgagcttttatagtttatttta

SEQ ID NO: 107779 - DNA, 682 bp, Cannabis sativa
aagtaaatctgattatatgaaataagttttatttagggcataaaacccaacaattacctcacacacagactatgctatagctctatattctgattcagcactggctctagatacaacatactgtttcttactcttccaaccagatcgcccccaacaaatacacaatatcttgaagtggatcgtctatctaccttggagcctccctaatctacatcagagaaacgctcaatctgggtatgtccatgatccttgtaaattctacctcgtcttggtgctcctttcaagtaacataaaatttgctctagtgctgcccaatgatgaattgttggagaagagatgaactgactaattacactaactgggaatgcaatatctggacgagtcacagttagataattcaactttccaaccaatctgcgatatgtctcaggattttcaaatagttccccatcacgtgtaagatgcataactggattcattggagcattacaaggtttttctcccaattttcctgtctcagttaacaaatcaagtacatactttctttgagacagaaaaataacttatttacttcgagtaacttcaatacccaaaaaatacttgagctcccctaaatctttcgtgtgaaactgggtatgaatgaaagacttaagggattagatgccttcagtatcatttccag

SEQ ID NO: 107780 - DNA, 526 bp, Cannabis sativa
aataattaagttgattttattgaagatacttaattatttgtttctataccatgaaatttaattaaatagaaaatatatttaagttgaatattaattttaattagttttagatcaatttcaattagaatattttcttagacattaaactagagttcataattaagttgattttattcaagatacttaaatatttatttttattttaataaatttaattaaataaaaaattatatttaagttagaattttttttcaaatcaacttaaattagaataatttttagagtatattttattttattttaataatcattttcctacatgttaatttcgaaatacatttattataaatgtagatcttttgaaaattttttaattttcagaattagattaaagttgaaaattaatttgttaattaatttttgataaaattaaatcaagtaatttttagaaatgatttaattaaaataaatagactacgacatattatattttaattagaaaataaataattagtttatgaattat

SEQ ID NO: 107781 - DNA, 787 bp, Cannabis sativa
attcgagtatattactttaataatgtggtatattatttttatgttgggtggtatatgaagaacgaaagaggaaaaaatgtggaatagtagtttaagtttgagttatggctatattcattggagtattttttttattattattttctatggtatatgaaaaagaaaaggaaaaaaaattgtagaatattaaactaaatatttgatattattatttccttttgatgctatattaatttttaaatgtgattaggtcaaaaaaaatgtgatatatctactttgaatataagagtggtatatatttttatatgaataaaaaataaaaataaaaaaaatggtatatgtcttttatgaatattgagggaaagaataaaaaataaacttattaattaagtggtatattaatttaaaagattgctatatctattttatgtaatttagtatatcatgaaggaaataaaaaaattaagtgcattacttatattagttttgtggtatattcatattgttgtaaggtatatcacttttatgtgatataatatatattgagtgaaataaaaaaaaacgtcaaatattagtttaagtttgagatatatatatatatgttatatctgaaatttagcagtatttcagaaagtgacacacgtcaatctcgttgaatatgaaccaacagatttaatgataattatgtcattaaatgcaaaatagaataactcattaaatataaaataaatagagtttgtccataactcgctggctgaatagcattaagcaagacagggatatgcaa

SEQ ID NO: 107782 - DNA, 1226 bp, Cannabis sativa
tccatgcacaattctcctcctcacaccaacttccattgcatttgggagacttggtcaaacttaagcaacgaccaggtgagcctgtccgggcatacatcagtagattcatgacaaaggcaaccaaagtttcacgggtgattgaagatggaaagttatccatgatactgggcgacatcgaagtcctcggtgaactttggaaggatataaggaagaacaggctggtagactcaatgagtgattttcttgaccgtgccgaagacttcatcaagctcgaagatgccattcaacgagcggaaggtgagcaaaatcctggcaagtcaaaggatctttctactggaacatccgcccaacttccccactacccaagtaattcaagctgaagtggtaaacgttccaacaacaaccacaagcaagggaacaggaaaaaaggaaaattcaccggcaaatccgaacaaggtccccgggagaatcatgccaaatacactgcattaaatattctgactgaagatatagaaagtgtgtacatggcaactcagtcgctggccgcacgtaagaagcccgggcccatgaagaaagatgctggcaacagggacatgacaaagttttgtcggttccacggagactacggccacgacactaacaaatacaacaacttgaagcgagaaattgaattcctcataagcaaaaacaatccacacctgcataagtatgttaagaccaatcagggtcaaagagacgacaataaccaagatttgctacctctacctgtagatgggcatctacaagttattattggaggcccacacattgctggagattcgggcaaagcttgggaaaggtgtgcccgaacagcacaacacgagcaagaagaagttatcctggctgcggaagaaaggaagcccaaagtttagcgagcaggagagccaaccataaccttcaacgatgaagacgctgtcaaaattaaatttccgcataacgacccactggtcgtggaagtccagatagctattaaaatggtggccagaaccatgatccataatggagcctcttccaacatcttgttcaaaaccgcttatgaaaatatgggacttcaactcaaggatctaaccccatgcctccagcctgtctatggtttgtccggtcaaggagttgcacctctaggaaaaatccgcctacccctaactgttggacaagctcctttgagaatgactatcattgcacaattc

SEQ ID NO: 107783 - DNA, 1140 bp, Cannabis sativa
attttatgattagccaatatacttaaattaatttcatagaagcaatttaaaaaaactacaattatattacacaaatatttaaaataattctaagagttaacgagttaataaatctaattacaagttaacctaagaaataagctagggaagaaaaattcttatacatttcagcatcaatcgtccaagccttcattaattatatgtcttcttttccccaaactgtatgaagaagtaaaaattatattagtttatatatatatattattatttgttagtataataaatacgataattaataattaaaacttagagttttttaatcatgtatataacggttagggtttacacgtgcgacgatgtcagtcatgtatttcaaaacataaaaatcacattcttagtttttaggttatcttggataatttgctactgaaatttctggccacatcgcaagatacgcattagatgcccctataatctcatatgttttaaaaattatatcaatatttcaattcattaacataaatatatataacttaattaattaaatgatttgctacataaagagtaattaaattattacctttccaacattgcattaatttgtggggaaactttgtagccacatatagagtctaaatggataatttttcctgacgcaacgatctctagcatccactgcgcactaaaaaattatattaggatgtatgtaagatagtgtaaaaataatttcaagttataatatagaaaacaatgagcactaaaaaattaaattgtgtttactcgatattccagggaataaagaacatttagtgttggttattcatcgatgataactaatgaatcaatccttgtgatgcattaaacgttaatactgctcactgcgagaagttctgggtcgtaaaacttaaaaattcatctcaaattatttatgctctcccatatgtgcctgcattaaattgttaaatattagtgttttataataatttcagtagaatttgatatataaggttaattaaattaaagaagagtataagtcatttcaaaaagaattccctggttgtcgatgaagtcacacaacgccacctactgcaaatattctccagatattgtgatcagggtatgaggtgctatgaatccacg

SEQ ID NO: 107784 - DNA, 772 bp, Cannabis sativa
aagtagtgtgcaaggtgattgtccgaacaagcctcaaaagtccatcatcacctgacatgcctcttatttcggacataatggcattcctttttccgagtacgggaggaggtggccgagcaagagaaatgggctgcctgatgcgaattacatgttcgatacgcctgggctgggctggaagctttttcctccttttgagcggagtcacctgctcttcctcagcttcatcttcaggattcaatggctcctgagcatactgctttgcatctgcacctcccttcaacttagcttcgcgcttaagttgaatgagttcattcccctgatgagctcgttcagcccgtccagcaccagatttcctcttcctctccctcattggcttaggaatgaaatcctttggatagatcccgtagttcacaaaattatcctcggaagtcaacggatgatgtttcggtcttccatcggcagtcaagcaagcttatgagctctatccctaagagcaagagcgacgggagggcactgatatgttggaatctgctggaaccgactctcagtgatgcccgcgccatccaccaagaagtacttatcaacaaacgccctattttattgatggccgagtcatcggtgcctgttaaccacttgaagtctggttgagagaaataaaagtaccccgacctgccttgttttggggtggacttcaaatcaaagaaccaactgacctcgtggggagaaggcataccccacttaggagggaactgggccggcagaggccgaagaa

SEQ ID NO: 107785 - DNA, 1190 bp, Cannabis sativa
cattcttaaaaccaattatgaaaccaaaggtccatcttaaaattaattgtttctctatttgcaaatgttgagaatgtttaaagaaatttaaaattagtatgtaataatgttaatattgaatctaatagttaattgtgttttataatttatattgatatatatataattttatattaaattaacattaaattttatttaagttcataaatgagatttattgatgttgtgatttttttttttaaaatagttgatagtatttttttagttgtgtatgtaataatattatattattattacaccatgtaacatttagaatgtgtatatatgtgctctttttaggggattaaatcattttcttttcaacttatttctaattatgaaagtttgtgtcaattattgtttttataataataataataataattgatagttataataatcataatgaacttatattgttgctataaattgtatcaaaaatagggtcaaatccgcgcgaagcgcagcttagtgccctagttttatataaagatgagttcacaaatcttttttgagataaaaaataaataaaataaaaatatcaagtatcaatatatatccctctctaccatgaattcttaagaaaagctatgatattttgttaaatttaaaagaaaaaaaaaagagaaagaacttttaaataacataatatattaataattaatttaatttaattttttaatataaaaaaattaactttttaaattaaaaattaaacaaaaactactaaaatttaaaagaaaaaatttagaattatagaaccacattaaagtttttaacaatatatcaattaaatttataaattatatattatatagtaaaataataatatatttttaaagggtaaaaaaattacttagtttgtaatgaatattaaactcatttgtatttgtgctaattataaactatataaattcatcactaagactatattgtaaaaattataattaaccaagtataaatatattttttctattattacaaatgataaatattatttcaaaacgtgtatcacaaaagttattaatttgctacttcattttcttaaatgataatttattttataaattaaagggaggatttgaattgtttattttattaaaaaatagaatttaaatagtatttttaaaaaaaactacatcaccactcac

SEQ ID NO: 107786 - DNA, 1521 bp, Cannabis sativa
attttgtgcattgtttccttgagtggctctggctattgctgcctctctttccaactcagcattttgttggttagacttgactaagttttgttggagttgtcgattttccaattctactaatggtacatacctaatggggtcataagcatccttacttcttggtatataaccagtattaatattggtttcctcattccttctttctgggttttgatcatgaccaccttggctccttcttgaacgtgttattcctaaagtaggtagcctgtatgaatccattggttctttcccaggacgatgagtagtgtctttaggacgactattatcattttaattatgatcagccatggacaaatttttgttggttaggagggatttctctgaattttatcatgtgggttctcaatgaaagcaccaaactgttaacgcagatttttgttaacgaatatgagcctttttcgtaataaattaaatacagatatacatatacaagaaaaatttataagcataataactataataataacaccaagttttttacgaggttttgtaggtaaatctgcatactccacgagtctatcttattcaagatatttctgagtatttgacacaatattacagttagtgatatttttctctcaaagattttccgtccccttttttgtagaatctgcccctatttataagaatataggttggtagttatttacatttaaatttgaattatataactgtttcatgaaatgtgggctttgatcacgtttcatttaaatacgtgtagataacaatcgataactgcacaaccgcttatcattcttatcttctaggcagttgacgctgacgtgagtagaggcatctcgctttgcatatagatgaccaataataacttggtttaatcatatgccttccaacagtagcatgagccccagtgtactgagtaagcttaagaactgctctttgaccataaggcctcgtagactggacaatcatgtcctacatgtttccaagttgttacacttgttattatattgtggaaactacgctaagtgtttcaagagctgatttgtctcgtcaatatttccttatatgtagtgaggtggatgtctcgccatacattgcccgtagtttcctcaagattgtgccttctgagataagatggtctctcgtcaatacaagaattgatagtttgtgtattcttgtctcgccttagactatacagttatcgagttatgaatatactctattaatatctatatttaatgagtttttccattttgcattaaatgatataatcgttattatatttggtggttcatattccacttgattgacatgtgtcactctttgaagtacagccgaatttcgagtataacaggaagaataaaaaaaattgacgtcaaaaaggaaaaaagaaaaaaaaaagtatttttctaccttgggatgaagaattcttgaaggcttgatgaatgtgagattctgaaatgctctctaaaagttataggcatgtgggagataaagagg

SEQ ID NO: 107787 - DNA, 704 bp, Cannabis sativa
  modified_base (471)..(475): a, c, t, g, unknown or other
ttttctctcaccacgtttgacagttgcacttgattgcttttgatttcccatattcgcttttggggggaaccgaggcgtctgaggttttttgaaatgattaattcttttcattgtttgcctataaataccagtgagtatttgtatacaaactcattttcaccaaccttctttgctaagtaagttcagagcgaaaagagaggtttttagcttcaagtttgctgaagtgttttcacaaaaattgctcgtttagcttggcgtaacttgaatccagacgttcaatccttgagtaagttctcgatttatttttcatttactttgcacatttattttctaaatgcaactttaacttcgttgtagaagatatgtaggaaaccctaagttttagaaactctacgattttcctttgtaacgatctgtgtgacttcatcgctcataatgcttgccttttgaactgcataatgcctgtctttnnnnntgcttattctaagcttcatgaatatttttgccctaactcacgaaaatttcgaatttctgagttttgacttttcgtcgaatatttttattctttaatctgttgagtactcctggttggcatatttgtctgtttaatgttcgatatcccgaccaaacactcatctcgcgtgttgtctactacagataccatgataggaatgtgtatgcttgagtaaaccataggttgcctt

SEQ ID NO: 107788 - DNA, 532 bp, Cannabis sativa
  modified_base (479)..(487): a, c, t, g, unknown or other
aagttaaatccatgaaatagcataaaaaatcgaagaaaaacgaaaaaatatgcgagctgagggtgcacgaccgagaaaactcggcgctgagggacacctgcagcatatccgcgcacggatgaggggtttcaaacacccctgggcgtgttgctcggacaaaatcttgttcgaacacgcgcctgaccgaggatcactcggttccgcgcgggtgagtgagtgcttcatccgtatattttttgaaacttcaaaaaatcataactaattcaagttaaatcgaaattgagtcctgtgaaaaagtaaattgcttaattttttccatactattcaaaaaaaaaaaaattctagaaagagaatttcaattatttttcacaaaaattcacaaacatcaatcaatcatcatataacacaaaacaacatgaaagcatccaaaacacaaacaactcgttttaaagtctaaatttcttgcaagcaaatcaatnnnnnnnnntctgaggccagttattggaatttatttcaccacgatcttagatct

SEQ ID NO: 107789 - DNA, 679 bp, Cannabis sativa
  modified_base (33)..(38): a, c, t, g, unknown or other
  modified_base (451)..(451): a, c, t, g, unknown or other
  modified_base (616)..(641): a, c, t, g, unknown or other
aacaactagcctcagagtcatggtaatgatttnnnnnnatgaaatatggatttaaaacaatgtttgtgttgatttggatggtttatgtgcttaattaatgtaaatcacaatgtatgttgtaaatattttttgtttcattatggaaatatttttgctagaaagtagacaaaaaaattaatgtatttagacttttacagaactcaatttggattttttataaattagctatgatttttttttaaaattggatgaaaatatctgaaaccgagcaacacgacttcagacacgcctatgttcaaattcactcagacaagggctatcctaagcccctccttaccgaggtttgccccccataaggctgctagcagcccttcccttgttttggtgatatcttttgattcaaaaatcgtttttcattgacaaaagattcaaattttggtagaattttgtntagaatctgaattttcaattaaaaatctaattatcagaataaaactaatttttattaatttttttattaattaaaattagttttagatattagtagcctttgaacttaaaaatttgattttttctcaaaaatagccttatggtttgtaaagaccgcttagtttannnnnnnnnnnnnnnnnnnnnnnnnnttaattatggaaaattatttatactgttattgttgaat

SEQ ID NO: 107790 - DNA, 605 bp, Cannabis sativa
gacattcaaggtcaatagagttagtgataacgccatccggctaagactgttcccattctcactaagggaacgagccaaaagttagttagtatctttgccaatccactctatcaacacttgggaggaattgaccctaaaatttctttccaaattctttcctcctacgaagattgccaagctgagagctgacatcaacaacttcacccagcatgacaacgaatctctttatgaagcttgggaaagattcaaggacttattgaggaagtgcctgaaccatgagattgagaagtggttgcaagtgcataacttctatactggattattgagcaacacccgaacattgatagatgtcgcagctggtggagcttttatgaggaaaagtgctaatgatgcctttgaattacttgaaaagatggccataactaaccaacaatggtcaacagagagaggcccaactaaaaaggttacgggaatgtatgaagtcgatgccataactaagttaacaacctagcaaggctggccctaggcatagacggggctaggctcgttccgagggcccaaaataaaaaaaataaaaaaaattcagaatttataatttaatttaa

SEQ ID NO: 107791 - DNA, 1343 bp, Cannabis sativa
gatccccttgcctcagccccctctgagccattgaacattatagaaaatcttggagttctcacacagttcataatcaactgagtgaaagatagtggaaaattaaatgccctcaacatttcttccacaatgtcccactctatagtatcataagccttttgtaggtccagcttgatcaaacaattagcctttttggttttcctcccatagtgcttcaccaaatcctgacaaatcattatgttatggccgatgaatcgcccttgaatgaaccctccttggttttgagaaatcaaactaggaagaacaagtctaattctagaacacaaaagcttcgttgcaactttatatattacattgcaacaagcaattggtctaaaatctttggccaaggaaggacatttaactttaggaaccattgtgaggatagtggaattaatctccttgaggatcttccctaattccaagaatgaagtaactgcgttgtaaacatcatctcccacaaggtcccagttatcttggaaaaagaaactagaatatccatctggtctgggagctttatctccaagtatctcaaatactgcctttttaacttctttggtaaagttattgactagcatagctgcttgtgcatgatctagaaccggtccttcaagaatgatcctgttagagattttcattctgttgttcatctgagacccaagcaaggacttatagtagttgatgaacacctaagtaatttgattaggctcagtaacacgtactccgtcttctctaacaatagataaaatttggttttgcctctgtctctgtttgatgctcgcatgaaagagagctaagttgctgtcccctttttgtatccaagcagccttggctttctgttggagaaaggagagataattcttaacagcagtgttatacttctcccgggcacttgattctgcttcatgtaaatcaacattcaacggatcttgttgtagcttatcttgcagatcatttagatcagcttttgattgtttaaactgagcctggacatccgaaaagccttctctattgatctctttaagagtagcctttaactccttcaatttgctcatcaactgatacatcctagtccctctcttttccttttgccagacttccgaaaccttttcaatatacttaggatgagatgaccacatcctaaaatacttaaaaggttttttcccacttttccaactcgggtgcaaggataaaacagctggactgtgatctaaggtcccttcgttcaagtacattgcctcagcatttgggtatttatccaaccactcctgattggctaaaattctatcaatcttggaacatattct

SEQ ID NO: 107792 - DNA, 640 bp, Cannabis sativa
ttttttttttttttaagaaaatcatatttttgtaattttaaaaatttaaattcgtatttttgtaaataaaaactttattgtataattgataaaaaaaaatataaaaaccttaaaaaatgaattaatactattttagactttatgttctacaaaattactaatgagatcttttattttgttaaatgataaactgaaccatgtattttctaaaatagtataaataaaactctgagctcaatttttatcaattaattttttaatataattaacttgaagataatttctagcacaaattaatgtaaaaaaacaaaatcagctttttcataacacttctttattgagttattatttttattttacgaaaaaatcaattcaaagtattatttagtactattttaaaaaatacaaaattcaatttattatttaacaaaacaaaaaatctaattattaatttttgcaaattacattatccaaaataccccccttactttcacaaactacaaagtgtcatattattgttatcattggaattaaatatcaaaatctcacaaataaaggctaaccattcaccggtgccaacaagtgtttaaccttttaaacaaattttggactgtgctatgtcaagagattaatataaatt

SEQ ID NO: 107793 - DNA, 528 bp, Cannabis sativa
ctgaggatggccccacagtgctcggatcacacacgtccccggagaactaaacccgacgttggtcttagtacgaggacaacgcgctcgaggacaagtcagtgtgggaatggtcagaatcccgagacaagggatgaagagttcaaccatggaggtgcccaatctgtaagagagggaacttatgaaacagaaagtgatcgcctgagacgccaactggaagaggagcaacgtctaaacgctgagtcagggcggcgcaagggacgaatgctcaaaatcaacctaaacctagagtgagaagaccacgaggcagacctcgtagctcacgaaccaggagacaggaaaaggcccgagaagaacaacccggggaaaatgagacacgccctgagaatcaggatgaacaggcagaaaggagacagccagaaactaatgaacgagaaatccctcatgaaaatgaggaggatcttggaactcagccgggagaatagagatcacaagctaggaatcaccagcattcttctcaaacccatagag

SEQ ID NO: 107794 - DNA, 850 bp, Cannabis sativa
gtaggggtaatactagtttctctagagggctttaagtttgactatgttttgagatttcaattcaacgcatcaaacaacgaggctaagtatgaagctttggtcgctggtttgaggataactgaggtattgaaagctagaaatctcatatttcatagtgattcacagcttatagtaaatcaagttctaggggaatactaggctaagggtttaaaaatggccatgtatctggagaaagtttgaaagaacttggaaaagtttgattatttcaaaatcgagcaaatcccaagagaacaaaactctaatgatgatgccttagcaaaactggcctcgcaaaatgatttggatgaattgaactaggttccggtggaaatgttaaatgaataaagtatatttgaaaaggaagatgtcgagatggtagatagttcacccacgtggatgactcccataatcaaatatctactaaacggacaacttccaactgacaaaatgaggcatgaaaactcctgtattcagtgcctcgctacacgatagtaaaggccaaattgtatagaaagggctattacatgcctctcctacgatgtgttcttcccatagaagcaaacgagatcatcaaagaaatccatgaaggcttttgtggggatcatgcaggttggcaaagtctatcaaaaaagattattagacaaggatattactgaccaaccaaaaacaaggacacccatgaatttgtcaagaagtgtgataagtgttagagattttcgcatatacctcgcgtaccaccaacagaactgagaatgatgacctcgccttacccatttgcagtatgggtgattaatttgattggggcactttc

SEQ ID NO: 107795 - DNA, 857 bp, Cannabis sativa
  modified_base (580)..(580): a, c, t, g, unknown or other
tactcttgtatacacagaaaacaatttcacaaaatcatttctccaaagaaaaacctccataagggtacacattttttcttcttcttaattaatatcatacttattttgtcctactatataaatatatttattaattaattaataataggcaaatggtgaaattgaagctgatggggtctgatggcagtgttgaatttaatctgatgaaaagtggaaggacaatttggagatttgtaaggccatatacagccaaaggagtattgtttaactctgcgtaagaactcttctttattaatcttgtatatacatatagatagatacatttgaggattgttattaggcgtttagcctttctcgatatgttgcgttgcggttggctagcgatatgccctataaattaatatattaaattatatgagacttgatacttagtggtgctagcaccacaggtaccctttagcatttctcatatatatatatataaatttatagatattaaacttggctgttattaattaataactataaattggtttaattattaattaatatctcttatatatatatatatctattctanataaagtgtgcctatataattgaatttttaatttataagaaatttataggtggcattttatttatatataataaaataataaagtattatttatatataataaaataaaaaaaataaaaataaaataaatcccattaatacgaaacgcagtcgtgatagattcgaactgatatatattaaaacaaatctggattaagtttttagtaaagataatattttgcattttaaatttgatgtcatttttctccattaaaaatatgcaagaatgggacagcaa

SEQ ID NO: 107796 - DNA, 793 bp, Cannabis sativa
ttcttcagaaagaggtgttcttggtagagttgatagaatctattgcaatgtcaaaagagtccatgtctcatctcaaagccatttacttccttcgacccacctcagaaaatatccagcagttgcggcgtcagttggctactccaagatttggagagtaccatctatgtaagtttttctaattttgttgggaaaattgaatttagttgcatgaattcagttgggaagagtaacttatttcttgaatccttttcttacgccataccgtatggaaggaagaaataatggcatttatggtttcccaaaaggctttgttctaaccactccaaataagtgatcacgactttcttcatgagccctacagatcaagcactctttcactgtaatctctctggtatgcagcctccacacagctaaccacactataaactctttttttggaaggctatacatgatccatattccataataccacttctcctcatgctaagtaaaaagtactttagagctcatatcttttatattgtagcatatatgaatcaaatctgtttggcagctattgtctctgtcgaaacaaaagaagattagaatccaccgatgagtattattatttttcttatctacaatttttagacagaggttatcttcaattatcaataatttaaagattgatttttaattttcttttttatcttacacacatttaatttgtgtttccttaagtatttgaacatcaatttttagttcatttttggattattttaagatcataatatattacagttaaattataaaa

SEQ ID NO: 107797 - DNA, 541 bp, Cannabis sativa
tttttattctagcttcagttgcatatagaaaccctaaaatttgttatcttcatcatcggagggaagaaagccagcagaaaatgctccatccgttccccatctccaattatcaatgggcctgagtctttttctcgatcatctaaaaaggcaatgactgctgggaattatgccctaaaagcaagtaattaatagataatatattagagaatacatgaaatacaattataagataaataatacattaattataagagtataatgattaaatatgtgaaaattcattattcatatggagagggtataatcttgtaaggatgtacaagagaattaagagtatatgatatgaataaaacaagctggtagtgtattaaagttctgtgaatctttaatatggaattgctaagtacggtttactatgcactatagtacttctagtgtgtgtgattttgattcgaatgacatatgtagatagacatgtagtaaatgtactacgtataatcagattatgcataactaaaccaatatgtaataaacatctttc

SEQ ID NO: 107798 - DNA, 961 bp, Cannabis sativa
ataccaacaagccaatggaagcgtacccattaaactctagcggcattgttagatgcactattaggtcggcccaatagtgtccacgagtattctaactcctggagatgtatgagtcacctagtggtcctcatattcctgccctactagtcccactgactagtagtagctcacttagcactaaggtaccaaggggtagtggagagctgacactaggtactcccccttaaagagcattcttaggttttagccttctaccaagaacatacatgattatggctctgtagacatatggccaaaccatataccaaatcacagagtctctcaaatccgattgcaccattaccaagtcccttcccaatctgaacaatattgaagatatttacaaaaattccactgccatacaatctaagcatcaacatgccaccagcatgcacaacaacatgcgccaccacttgaccaccacttggcctatggatgagggtatcaaaagagagatcatgaatgagtctcatacgactccttactcagttcatccaaggtcaacgaagatgtatcaagacctaaaagccatgttatggtggccaggcatgatgaattacattgctgagtatattgcaaagtgtcttacctgtcagcaagtaaaggctgagcatcagcgacatgcagggttgctacagccactgaacataccagagtggaaatgggaagatattgctaaggacttcgtggtaggttttcctacaaccacgagacaatttgactctgtgtgggtcatagtggacaggtttacaaagtcagtgtacttcttaccttatatgtcagagaaattgctcgtcttcatggtgtcccgaagtctattatttctgatagagatccgaagtttacatcgagattctaggagagtctacatcaagctatgggtactcagttaaagttaagcacaacatttcatcctcagacg

SEQ ID NO: 107799 - DNA, 881 bp, Cannabis sativa
tatttgaaacatacctctttttacgtgtattgtacctaaaataccctgacataacagagtcacatggaaagtatcttgaagtgacaggggtaaatttggtataatgtttaaaaaaaggtaaaaatgatagactttaaaaaagatggtaaaaataaaagaggaaaatataaaaagggtatagagtgtaatttcctctaatttttttgaactcagtattttgtaaaagttattgattggacattttgttttattaaatgacaaattaaatcatgtattttccaaaatgctactaaatagtacacttaactgatttttggttaaaataaaacttaatagtaactcgatttagatgtgtttttgataaaactagttatgttttctgcatttattcgtgttgggaattatcttcaagttagttatattaaaaaattattgaaaattgagctcagtatcctatttatactattttaaaaaatgcacggacaattttatcatttaacaaaatagagagtctaattagtaacttttgtaaaatataacaactaaaatagtattaacccttgaaccaatattagtgagtgcaagggtctatgtccattggctctaactatgtaaataaaaatattaagcaaataaataaaaaaaatagattgaaatttaatatactcacaactttgttaatattccttttaaaaaagaaaacttttaatattaatatttaacaacgtcaaacaaattattttttaaaaataaaaataaaaatttccattaataaacagaaatcatacaaaatccattacataaaaatagatgtagttcatagattaaaatcaacaataataataaacataccaaactattaatcaaactattgatcacac

SEQ ID NO: 107800 - DNA, 1257 bp, Cannabis sativa
cacgcctacaccattacaggtgtatgtgagataataccctaatctcattatagtgtctcttgagttgagtacacactataatacataaatctgttcatccaataagatctaaatagcacactatattcttgagtgctgaggctggcttgaaagatcaaggtgtggattcttcaatcaagttcttggatttgatgtctgatcgttatacgaaaagaaataatataggcatcaagaggttattgaatttctttcagtagttagatttaatctacatacattatgttgagatccttgggcttatggttcatattggataaaaattattttatcaaaattttgcttccacttttatagctctaatatagactataaaaactaacaatcacttaggcatcaaaacatacaactttgggacattttagcactcacctagcatctaaattgacgtcagaatgtcaacagagcgctaggtgtcaacatgggcgttgggttactaacctggccgcagggtgctgaacaacatttagtaaaacagtcataactcacacaatattaatccaattcatgtgattcaacttgtgtttcaactacatttcaaagatctatcaagttttgtctcacattcacatcgcaatttgaaaaaatttgagtatcatcctcaacaaagttgcaattttttgagcaaataacccaaaaataatccgacggacgagattcaaagtacaaaaattgacgattttcaccattggatcatcatgaattagcatcactagctaagatcagcccaaaagatttttttttcattttttattttcatttattattttaataagatctccttccctataaaaggagagctcatcttgctcattttttacattctaaaaagtccccataaggtctaagcatctctctttactttttttctcaagaatttcgcacctcacacttagcccattctttgtgattcttgtgaggaataaaaacttaaaatagatgtagctctattaccatcgcgtcacggagagtgaactactataaatttattgtgtctctcttacttatacttaactctcattatattctcgccaatctaacgagcggggtggccagatatctgtgtctaaatttctgtgtcaacataacatgtcacatatgtcacacttattttaatctaatattatattatgtgttgatgaaaaaataatattgtaacgtccccgcttcaagcctcaattgggcccttacacccacgga

SEQ ID NO: 107801 - DNA, 889 bp, Cannabis sativa
tttttcttggttaggagggatttttttgagcttttatcacgtaggctctcaatgaaagtaccaaactattaacgcagattttcgttaacgattaatgagcctatttcataattaaacacaaatataagaaatttaataagtagaataatgagaatgacaccaagttttttacgtagttttaattgcagttaactctgcattgtccatgagtctatcttattcaagatatttctggatacaagattacagtttgtgatctctctctcaaagatttttcgtacctttttctgtagaaatctactcctatttataggaatataggttggcagttatttatatttgaatttgaattacatataactgttttcacgaaacgtaagctttgaccacattccattttaacacgtgtagaactataaatctgcataaccgtttatcattcttatcttcaaggtagtggatgctgacgtgggataagagcatctcgctagaggcatctccctttgtacatagatgaccaataatgacttggtatattcatatgtcttccagtaatggcatgagcaccaatgtattgagcaaacttaagaaatgctctttgaccataaggcctcacagactggacaatcatgtcctacatgctcccaagttgttacacttaattattataatgtggattatacgctaagtgtttcaacaaccgattcgcctcgtcaatacttccttacatgtagtgaggtagatgtctcgctatgcattgtccgtagttcccttgagattatgtctttcgatgcaagatagtttctcatcaatacatgaattgatagtttgtgtatccttgtctcgcctaagactacacagtcagcgagttatgaatatactctattaa

SEQ ID NO: 107802 - DNA, 524 bp, Cannabis sativa
  modified_base (124)..(129): a, c, t, g, unknown or other
tttagggtataaaacccaacaccaccgtcatgttgagtcctcctggaacgggtggtgcgtcttgacagcgggttggtagacctcctggagcccatgggctctttcccagaacgatgattagttnnnnnntgtggggtgttaacattttctggattttcagccttgaaggaggtggtttttcttcaaaagaaaggagggtttctttgagatttttcacagaagctctcaatgaaaacaccaaactgttaacgcagattttctttaactaaatttgagcctcacagtagtgatttcacacagaaaaagtaaaagctgtaaaaataaaaatatgaacatagggtttgttacgtggttttgcagttaaaattctgcatagtctacgagtcaatcttattaagatttctgattattttttatagcctctcttgtatgagttttttcgtcccttttttgatcttctttgtcactatttataattacatagtggacagttaattacaaagttgaccgtaatatgtttacaa

SEQ ID NO: 107803 - DNA, 726 bp, Cannabis sativa
aaagaagatttcagtagagttggctgaagatatgtctatagggggaattgaatgtgtggtcaaaaaacttgctaacattaccttgcagtctgatatgttggaaagaattagagtggcccaacaaaatgatcctgagttacaggggcacaaggtgaagttagaggccagatcggaaaaagacttttcacttacatctgatgggttattacaatacaagaacagaatttgtgtaccaaccaacaaaaatatcagacaagagatttttgatgagtctcatactacatcgtactccttacacccggggacaactaaaatgtatcatgatgtattgtggtggtggccaggtatgatgaaaagagtgatattgttgaatatgtgtcaagatgcttaacctaccagcaaatcaaggcaaaacatcaaaggatggcaggtttgcttcagcctctaaagattcccgagtggaaatgggaagacaccaccatgtattttgtggtgggatgaccaagaacaatagggtactatgattctatttgggtgattgtggattgatatacgaagtttgcacactttttaccagtatgaacaacgtatacagcggatcagtatgctgatttatacattaaggagatagttcggcttcatggtgccatgaagtcaatagttttggatcgagatccaaaatctacatctaagttctaggagagcttacagcgagcaatgggtacc

SEQ ID NO: 107804 - DNA, 856 bp, Cannabis sativa
attcacaacaggccagcatacaaccaagaacaaactcgattaccttcactcagatttgtggggtgcatcaagaaccaaaaccttaggaggagcaagctacttcatgagtatcattgattactactcaagaaaggtgtaggtattcttgttaaaaagaaaagacctggcttttgagacatttgtcaattggaagaaactgattgaaaatcaaacaaacagaaaggtaaagaaactcagaactgacaatgggttagaattttgctctgatatgtttgcaagatactgtaggaaagaaggtattgccaggcatcacacagtggtcaagaaccctcagcaaaatggccttgctgagagaatgaacagaaccctgctggaaagagtaaggtgtatgctcataggggctgggttggccaagcatttttggggagaagccctgaaaactgcttgctacttaataaatagatgtccatctacagctttaaacttcaaaactcctcaagaattctggactggcaaagcacccagctatgaacatctcaaggtctttggttgcaccgcctatgctcacattaggcaagataagttgcaaccaagagcacttaaatgcttatttcttggctaccctgatggaatcaagggctacaaactctggtgcttggaggaagggtacaagaaatgtataattagcagagatgtcatcttcagagaagatgaaatgccactaaaactcaccagagaaatccccattagctcaaatgctgttcccaggagtgttcaagtggaacttgaacaaagaactgagaatttgaatcaagcttctacagatcaggagatagaaacagagacaacaagtaac

SEQ ID NO: 107805 - DNA, 751 bp, Cannabis sativa
cataagctataactcggtcagcttgcatcagaatacatccgagaccctgtctgggtgcatcacaataaacaataaacttttcttgatctgatggcaaagctagcatcggtgctgtatcaatcgttgtttcaaatcctgaaaaactcacttcacacttgtcagaccatacgaaccgttggttcttcttacttaactcggttagtggcatagagatcttagagaatccttcgacaaaaacatcggttaataccccctgctaaatcctgagaaaactttgcacttccgtcacagtgcttgacctcagccaattttttactgactcgaacttccccaagtcaaccatgattccgtcttttctgacaatgtgccctagaaaacacacctctgacaactagaattcacactttttgaattttgcatacaacttgtattctttaagttaggggtgttcataaaatagctgatccaatctaatccgcacgatccaatccaatccaatccgcaaagtgcggatatccgcacttttgcggattggattggattggaaaattcaaaattcaaaatccacaaagatgactatcctgattcattaaaaaaaaaaaagaagaagatggactatccgaacattcgccaaccttgcccaattttctctattcactaactatgttatttcttttttgcttaattacattaggtctttattttattattattcgaaaccagagtgagaactcattattgttgtgagcta

SEQ ID NO: 107806 - DNA, 963 bp, Cannabis sativa
gtgcatctgggtattatgagtctgtgaggataaacttctgaactcagaagagacatattggcataaaggaagtaatccattctgaaaatggatttcactaaagagcaagaaggtttgtgaaaaatgacaagcttgagcaacccttttatacccaaagttcagtgacaagaaagccaaagattgagaaatctaatggccgggaatcgtgcagaatatgaataggaaattcgtaatgatcttcaaaaccatacaaccgccagaatcaaaggaggcgtcctttccaagaaaggattttgatgaaaatgccctccgtaattattaaaaacctctttttactaaaaaagaactaaggggcaattgttatacccgaaattcggctggaggacacttgtcaacataaaggagaatagcgatgcaacggagaagagtaacacataccttaagtttacaataggcaaactaagtgtaaaagtcagattggcttaaagaacaagaatgcgagatgaccatctcgctacaaggaaacttcctatagtttcctccaactaatggaagcgagactcatatcgctgccatgttagaagatttccatgtacccgcaatcgatgtaaaacatatcaagtcgaccttggaaaaaaggatggttccagcttgccattgggatcactacaatcaagtttctgtcaagacatctctagattcaacaattaaagacgtgtttaatacacgatatttctgacctagtaaaatcagggtaataacagctaaatgattttcaaaatcatacaccgcatttacatttcataatatgtaatcagatcccacgatttaagggataatgactctaattacatgtcggtcagccttgtaactaactaccactacacaattttaaatagcggcaaacaatctcaaaatagggacgaaaaaactcttatgcaagaggccctaaaaaaatactca

SEQ ID NO: 107807 - DNA, 604 bp, Cannabis sativa
tactcatgttaagcgatctgctaataaggccgccaatttgtttggctcgtgactcttgttattggtctgatcgtagtttctcgaagagtactctttctagtaccctcaaatcttttgtaattgcagatttgaattgctaataaaattatccattcgcattcaaaaaaaaaaaatatatgattgttgttgaatttcaaattcaatagtggtacttttaatattttgattagtcatcactgaacttattatattgactgatggtgaacatttgtaaattgcttggtaaaccattgagttttacgttgttggattagatctattaatgaaaattatctaaagtttgttttcaataaaaataaatctttagttggaatggataacaaagtttaacaaaatatgatccaaaaatatctgtaaatatatatacaatggattctaaacccagtaaataggtaatcttttgcttaaaaatgtggatacatttctttaaaacaaagccaaaaaaaaaaaagaagcccccatttgcgtgagaatttagtcctgtcatatagtacaagaatatatccaaaaaaataaaaaattatataactagtgtagggactca

SEQ ID NO: 107808 - DNA, 872 bp, Cannabis sativa
aatagaaaatattgaaataaaataataatcacattctcatcaataaaaatcatatcaaggcttatcaattctctattctttttagtattaagagactctcacactctacaaactattaagagactctcacattgtacaaactctaatctttatgcttcaattatctgtatcactatttaagtcggtaagaaaataacacttcttcatgagagaagaagagagaatataagagaaaaagagagaaaatatgtagtaaattgaaatatgaaattaagagaaataagttagaatatatatagagatttgggatagaaaaaaattataaaaaataaagtaaaaaaatgtttaaaaaaacgtgataattgttataaaataatatatgataatataaaatagataagaagaaaagaagaggaagaagatgaagagagaaagagaaactgaatgagaatttctcagttgttattccaatggggtgaacccctatttatacaaatgtattgactaaaggaatgggaaactaaattaatatgtaataaaggaaaatacaatcaagcattaatggtgataattaatttggtgatttggacattcataaataatatttcataacactcccccttagatgtccataaaaattgtctcattaaaaactttgttgaaaaacttgatcaaaagaaaaagagtatagtgtaaactaactcccccttatttaggcattcgtggagatcttctaatcaacgaattttgatctcgtctgccatctactcaaatgttgatgttggtaataactttgtgaataagtttgtaagattgacacttgattgaatttgttgaacaccaatatgtattttcttgaaatgtataaagaa

SEQ ID NO: 107809 - DNA, 664 bp, Cannabis sativa
  modified_base (114)..(114): a, c, t, g, unknown or other
aaactttcgaacatatattcaagattatatgccactgtgctggcaacactataatcattaacaaatacatatcttctggacttaattgcatttatacattatatataatcatgnaataaatcttgtgaaccatgcaacgtaaaatattatttctatctttattaataagtaaatctgattatatatttaaatgggttttatttagggcacgaaacccaacaagtggaagaagctataattgtttgtttaacacttttccaggatatagctcttctatccaacaagaaaatgtagcttgatgaagaccttctgctatcttggcatccagcaaaattagaatcaaaataccccgtgacctccaaatgatctgatttcatgtatgtgagcatgtaatcttttgttctctgaagatacctcataaccctcttggctggtatccaatgtctatacaagggttggttaaacatctgcctgacatcccaacaatgtacgcaatatctggacgcgtacatacttgaagatacattagacttcctacaactgatgcatagggaatctttctcatttcctgactttcaaggctacttttagggcattgactaagactaaatttgtctcatttagcaataggggtatcacttggtctacaatcttgcatgccaaa

SEQ ID NO: 107810 - DNA, 910 bp, Cannabis sativa
tgctggtgatcaaatcctaaaaaaaaaaggagtgaggatgcctatgatcctatcagatacgtaccactggtaaaattagagaataggcaacttcgacaatgcttaggtgaatcaaactgatgaaacactgagttagagcaagaagacctaacaataatctcccttttgcatcttttcctttgcgttcttcacaacaccaagtccccaattgttgtattttttacaagcaccattacctcacacatataccaaggaagagagaccattctctaatttttgtttccattagtttattgttcccaagaatattacaaccaccacccttatcaggtttatgaatattcagtctcccatgagccttgtgttcataagtttcgatacaaatttcgcctagagatctcattttgtactattatccatacactcttgagaacataactctagtgtatcgaatctaattaataaaattaaaatagtcgtagccccattactatcacaacatgggaggtgaatcattataaattaccggtgtcctttttcatttattgcaattatatttagtcaaatttttttattgcagtcctcttagttattacgatcttgttagatcagttgacgaaaaattgtatcaacatgtatatatttatatataagaaaaatataatttaaattaaactaatcaaaactttttacatataattctttttttcttttatgttttatttatttattttaatttattgttggagatataaaacaataataatttgtttaattgaatttttttgttgcatatgtgaaaataatttatattttaataaatattaaaaaagttaccaatccacaacaaatccaagagaaatttaaagggagttttaagttttcggtgtaagaatggtgtgtaaagaca

SEQ ID NO: 107811 - DNA, 864 bp, Cannabis sativa
tatgatcaacatataaaccaacaaaaaatttattaatagtaaaataaaaaagtagttgaaaagtatcattgatagcttcttcttcttatcttatggaaacataaatacgctgacaacaaacaaaagatgaaatattgttatttcattgttttattatttgttaataattgaatcatattactttgtagtgttattttttgttaaatggtttctagtgttattatttgttaatggttatttgagctattaaatgtaatgtgtgtgtatattgtttcggttaatattaataaaaaaacttaatctttcattgctttgtgtatgatttaaaatagtacattgcttgggtaaaattacattgcttttggaaatataaaaaaaggcattaaaatatttattatctttcctgaaataaatctcatcaattatttggaactaggttagattttagttaattttgattttaaaaagtctctcttacatgtaaatcaactcttcggcctcgtaaaatggattttatgaataaatggtgtagaaaagattattaagacgttagaatacacaatatatattaataatttttaatagtttatcgactcccaagttgtcttgatagttgagctcaatcaaactatcattttttaaaatatatttttcatttaagcacaaagtattttcataagataggaattttttcacttaattaagtataatttcaaagcattagttgtgaaacaagttaatgaaacaacaacaaatcaaaaatatatattatgaacaatctaatgaaccacacttaatcaaagtaaattataatttttacacaatgaagaacgaagtgaaaatatgtgctaacaatccaaaata

SEQ ID NO: 107812 - DNA, 520 bp, Cannabis sativa
atcaatttttcgtatttgagaataatattagaatatttttttacatttttttatggcagtgttcgttataattacaatattattttgtaaatttttaaaaaatttcgaataatttcaataccgaaaataaattttacgtttttaaacacgtattagactcgatcttcactacgaaaaaaattaaaaaaaatattttgtcatataatttcaaacaaaaaattaactaagagattataatcagtattattcatacatttattcacacattcaattgcattaacatattttctttacagattctcatcctaactgggacagaaagcacagctgttacactaacatggacaatctcattactacttaaccacccaaatgttttgaaagctgcccaagaagaattagacactcatgtaggaagagaaagatgggtacaagaatctgatattcccaatctcaaatttcttcaatctattgtgaaagaaactttacgcttgtacccaccgggcccattaacaggccc

SEQ ID NO: 107813 - DNA, 646 bp, Cannabis sativa
ttgtaccaaatttaacacacatttgtgtcaaattaaagataaattaattttattttttgataaaattaatttatcatcaatgcattagaacaaaattataaaatttaagctaaatataacattgacttatttcttaagccaaattaagttcaaaatttataccatttattggaaatggtcttataagttgcaaaattacataactgagaagccataacaaaattacaaccctaaaccctaaaccctaaaccctaaatatgtattgatgaaactggacaaaaattacagttttactaacattgagtactaatattattaaacaaaaatcaccatgctaattacaaattcaaaactttagatacttatgccacaaatatttttttgaaaatatggtggtgtttggtttaccgaaatgtaattgtaatagtaataggaatagtaatggtaatagtaatgggaatactattaccatgtttggtttattttgtaatgaacattgtaattagaattgaattgataaaaatatccttgctttatttatttatttatattttcaaagtgagaaagagaaagggtaaaattatatttttattatttagttgttattgtaatcctcattcacgaggtgtaagagtgtaatgagaat

SEQ ID NO: 107814 - DNA, 527 bp, Cannabis sativa
catatctgagcaaaatacatgatttgctcgcagaattctctatgctctcaagcaaattcgaagggaagaaaaaacaactgttgatgcattagctcgacttgcgagcatcaacataaatgagaaagcaaatttggttcctatccagtttctcgaaaaacctagtatcaccggcacaaaagaggttaaaagttactgatacgtccccaaactggatgacgccaatagcagcctacctcaacgctagggagctcctagataacagaaccaaagctcggaaaatgaggagaaaggttgcacggtacatcattatagagggagttatgtatagaagaggattctctatgccactactcaggtgtgtaacacaagaagaagctgcgcaacttttgtcagaagtccatgacggatattgtggcaaccacagagtcgggcagtgtttatccaagaaaattctaaggcaaggttatttctggccaacaatgattgaggactccaaggactatttaagaaatgtgataaatgccaaa

SEQ ID NO: 107815 - DNA, 700 bp, Cannabis sativa
ggagcttccccacgatcttgattttttttttcttctcttcgccgtgttcttctctccagcaaaggttctttctacttctctgaagtttttgttctgaacttcatctctttctttcgtttctcgatcagtgtttctttcctgatttgttttcgtttccgccatggaaaccgacaatcaagctgggatccaaggaactaatgacgatggtatttccgctactgttgaagaagttactggaccacatactcaaagcaaccatgcgcaacaaaggaatccccttgatgatccttcaaatccctactatttggaccatggagacaacccaggtaatatccttgtgtctcaacctctcactggacaggacaattacatgtcctggagtagggctatgcaattggctacttctgtcaaaaacaagattggattcttggatggtactattcctaaacctcactcttcaaattcggttatgtacaatgcttggtatagaaacaacaatattgttatttcttggattctaaattcagtctctaaggaaatttcttctagtctcttgtatgatgaatcggctgctgcaatttggactgaccttaaggttagattccaccaaaaaaatgggccacacatatacaatttaagaaaaaacctgatgaaccaaaggcaggagaaccaaactgtgagcatgtatttcactaggctc

SEQ ID NO: 107816 - DNA, 859 bp, Cannabis sativa
tatgagaaaatgataataagtttttttgcacatattttgtaattaattaaaataatgtatacaaaattgtaaaatgccctatatttaattataccaataactaggggtgttcatcaaatccaatctgcactattttgctcatagtgtatctgattcgcactgagtgcggattttattttttgaatccaatctaatccgcacaatagctcaaatccaacccaatctaattcgcaaaagtgcggattggatcgggtattttgaattggttactttttaatatcaaattatttaatatttatgaaaaaaaatatattttttacataactagcaacaaaataaaataaattacagttattttatgtctctaacaacaaattaaaataaataaaataacaaatgataaattcaaaggaaaaaaattgtatgtacaaataaatatttaattttgttataaattgtatgtaaaaaaaattatatataataatagaatacacatttgatctattaagttttaaaatataattgtattacatgtattagatttttaaattactattttttttacattaaaatagtatttgtatatataattttttaatttttttataagtatgtgcggattggattggatcggatcggttacttttacatgtcaatcaacatccaatcctcacaagtacggattttgaattttttaatccaatctaatctgcacaaatgcgggtatctttgcggattggattggattggaccgtatggattggattggctattttatgaacacctctgccaatagcagtatgacaccgaaaaaagtactagtcaccaatgatactttttaacaattctctatatgtaa

SEQ ID NO: 107817 - DNA, 907 bp, Cannabis sativa
atagaagaattggcagaacttcatagtctacatggagagctttccattaagaagttagaaaatgtggtcaatatcaccaaagcactagatcaagttattgtactagagaagaagcaacttgagaaattgaggttggaatggagtgttaatgatgtaaatgttgatctaaaacatggagagagtgtgcttgaaatgctttcacctaacagaacgttgaaggagctcgagattatttactatccatgcaaaatatttccaaattgggttgggaatgattcgtttagcagcattggtgaagtaactctctatggatgtaagcattgctcctatttgccaccctttgggcaacttcctttgctaaaatatctttccatctcaagatgcaattcggtagtgacggtgggtgctgagttttaccggaattgttctgtgagaaagccattttcatcattggaaacattaaggttcagccacatgtcatcatgggagcaatggcattcaatgcaaactgaagaggcaacaacatatgggaagctcaaaacacttgagattaataattgtcctaagttcgagggagatttgcctcgctttcttccttcattgataagtattgaaagtacaggtaacaaggagtgtccattattaagtctcccaagattaccatgtgtcacaaatatgagcattgataacttggagaattcggagtctttgtatgaggcaataaagccaaggaatccttgttccactctcactccactctaccattaccctcctcttcaagagcttcatttggagtcttgtggatcatcgtttagatccctccatttggatttatttcccaatctcataactcttcacattgaatccagcaactactttgaagctatctcagtgtcagatgggaaat

SEQ ID NO: 107818 - DNA, 978 bp, Cannabis sativa
  modified_base (794)..(810): a, c, t, g, unknown or other
agatatgaattatttcaccctacataggaaacgtttattgttaggctatttttagcctaagtttcgggtcgatttcataagtgttttcttagttaatgttgccttttagaatagttttacgcttgattttccttgttttaggtccccgaggcattaaagttcaaattgtatcaattgttgaaaagacgaggtattctggagaaaaatctactgaagctgtcaaattagcttcagtagttgcgactggactcacccatggtcgcgacccttttctatggtcacgacttgggtcgcgactaggaggccaggcagagagcatggatttttcaatttgcctatggtcacgactaggttttatgtagtcgcgaccatgggcgaaacacagaatttttagccagttttaaaattttgccattcagaggtagcaaccctaatttctatttaagggactcgggttttatgatgaggatcatcagagattagtcccgaaaagtgaaagaaggaggagaggaatctattgtgacgatccagagcgcaatcaccaactagttctttcttaactcttgatttttttatgttaatttctgtttaagatttgattatggatgttggatgttaatatgggttttatgaactaaactctcgattggggaagacgatgaatgttgattgacgtttttcttagttaatgataattgctattctttttgtcttgtttgtgaaattatccatatttgtatgtatttccatgtttaagattgatcaccttctacatgttctatgatctcaattcnnnnnnnnnnnnnnnnnaattgagaatgctaaaattggatattctaggttttttgtgaaacgaaagtattggcataacctgtttgatatttagattattacttaaagctgattacatgttattctaattcagagattgattagagaacatgtgatttagggcctaaaagatctgaaaaagagtta

SEQ ID NO: 107819 - DNA, 547 bp, Cannabis sativa
  modified_base (315)..(323): a, c, t, g, unknown or other
gaaactaccaggtggacatcaattttgacaatcttagcaattatcttcttgagtgattccttttaatttgagatactgtgaaatcatgtcaacactaaaatgttaacaccaactttgatctttagctattttcttagcattagttctcttgtcacacaacttgtttaactatagatgtagtctttgttccttcccaggttgcatctttggaggtctttagcattctctaggttgtgcttacaaggaaggtaatcttgatcatctccttgacttttgatgagtccatatttgtcttataaatatgatcaatttatnnnnnnnnnttcttaaattgattctttaaattattaattagtgtgcttttaatttgttaggctattttaaagactattcatgcatttagagtcttttggagggatttttagcatattttggtagaaaatagtggaagtcggggagctcagttttacaaggcagaattcaattgaaaattaggacaatcttagaagcagaactgaacttggagctcaacatgaaagttttagat

SEQ ID NO: 107820 - DNA, 1729 bp, Cannabis sativa
  modified_base (64)..(68): a, c, t, g, unknown or other
  modified_base (542)..(554): a, c, t, g, unknown or other
  modified_base (1365)..(1366): a, c, t, g, unknown or other
tattttaaaattagtttaaattttgaaattttgaagagatatttaaggttgtttttaacaaccnnnnnttttcaaaatttagttggttagtaataataatttaattatatatatcttacatcacaatttgttacagggacattgtttgtttatttaaattgtttatttaaaatatctttttaacaaacctattatttatttgatctaaattgttatgattaacttgttgatagatctaatgatctgattttaatcatagtccaatgtcaatagatcttataaataatttgtaacagataaagtttgtatttctttcatctgtgtaaacctaaaattatgataagactcatccaaatcaatttgacctgtatgagcctatatgtttacttttgggcttatatgcttataggaagcccatttatttctagataaaaaaatggactaggttgctagaataacatatcacctaatgatagtttcatttatgtccaattagtattagacttattcaatgaataacaattatttaatttaaggttaannnnnnnnnnnnngggccttatgtgagagttagggggccattagtagtgagtacgacatattgaacctagccctccctcacatgaataactccaattgtgaaggcccatttgccttatttaaataattgtattagactaattatactagtttaacctaagaaaattgaattagcaatataatttattttgaaataaataaaattaattttttattggattattttgaaattaatttaaaaaacacacttaatttaaagaaaagattctagaaagaaatttctagtaactaattaatgttttctaatatttaattaagtagaagaatatatttaagttgaaaattagtttgttagttgattttagaccaacttaaattagaatatttttcttagaatttaaatagaattaataattaagataattttatactttagtatttgtttatctttcatgaaatttaattaattagtaaaatatatttaagttgaaaattaatatatttaattttggaccaacttaaattagatttttttttttttcaaaacttaaattaatattaatttaaattgattttattctagatacttaattatatctattttaatgaatttaattaaatagaaaattgtatttaagctggaaattttttcaattttagatcaacttgaattagaataattttcagaatatattttattttattttaagaatcatttcccacaaatttctaaatacattttaaatgtagatattttgaaaattttcaattttgaaaattagattaagttaaaaattaattttgttaattaattttagatcaacnnaaatcaagtaattttcattaatgatttaattataataggaaaattatatttatgttgaaaattaatttatttaatttaagatcaacataaattagaattattttttcagttttattttcattttattttaagtgatttcaaaaatatatttttatacattgaattttgaattcaattatatatatttgtagaaaaataaatttgagttgaaaattaatgatttaattttggaccaacttgaattaaattaagtaattttcataacatttattagaaaattaatactaaggatggaaactatttttttatttttcagatcttactagggcataattttaaaattattaaattaaaatttatatt

SEQ ID NO: 107821 - DNA, 587 bp, Cannabis sativa
atattccaagcaacagaagtaagaaaaatacttaaaatcaaaatatgccattaaaggcctaagtttgagttgccaaactcaaacttgtttaattccatcacaacatatcaaaaccaacatccagaactcaatatcaacttaaaatggacttaaaaaccgaaccataatctaatcaaaccataacagcccctattctctaaaatcacaagtcaaaaccaactaaaaccttgagaaattcataacgaatagtgtctagggcttaccttggttagaacctcctcaatttcttgctgaaaacacaaaaatcagcaacaaatccccatggttcttgcaggtttgaagagagagaagggaaagagagggtttatttgattttttggcttttctttgttttttcctctaaatgaaataaggtttaataaattaaacccttgctgaaaataaattaactaggtgtcactctcctaggcagccaccaaatcccttacttgacaaattactaaaatgcccttttacttataacttaagcaaaataaagtctaggggtaaaatggtcaaaaacaataaccccgctcaaactcggtatt

SEQ ID NO: 107822 - DNA, 798 bp, Cannabis sativa
tagctagtatgattcagatttcacctcagttagcagaggacatggtcagatctagcattgagtttgtcgtaggcaagcttcacaacttgacgttgcaatttgatatgttagaaagaattaaaatcgctcagatgactgatccagagttagtaaaaatcagagaagaggtttcagctggtcaagctagagatttttcagtgtcagacagtatttaaagccagggtttatgttccaaacagtgtggaacttagaaaaaaaattctcgaggaggctcatacaactctatattccctacatcccggcaccaccaaaatgtatcaggatcttaaaccttactttcggtggagcagaatgaagaagaatttggtagaattagtatcgagatgcctaacctatcagcagatcaaggctgaacatcagagaccagcagggttgttccagcctctaaccctacctgaatggaagtgggaggacatcacgatggattttgtggttcggttacctagtaccacaggattgttagattctatttgggtggtggtggatcgattcacgaagtctgctcattttttgtctgttaaaacaacctatttagtggatcagttagcatagttgtacgttaaagaaatagtaacgcttcatggggtaccaaagtctatagtttcggatagagatccgaagttcacctccaagttttggcagagttttgcaacaagccatgtgtacgaaactaaaatttagtacagcattccatcctcaaacagatgggcagtatgaaaggacaattcagatattgga

SEQ ID NO: 107823 - DNA, 884 bp, Cannabis sativa
  modified_base (27)..(30): a, c, t, g, unknown or other
  modified_base (57)..(60): a, c, t, g, unknown or other
  modified_base (842)..(843): a, c, t, g, unknown or other
accgcgaagaatttcaaaccgcatttnnnnaaccgcattttttttgcggtgcgggcnnnntgagcggtttgatgtacacccttaacaaatactatggagagtggagactactttataaaaacgaattaattttataaaaaatgtacacaaaaaatatattttattcaaattgagataaaatgtggtgtgagggattttttttttgaaaagagtgctgtcgtagattttattaaatactttttatttaataatgtataaaaaataatattatatcctgtttggtgaattaaattgaaattacatgtacacttattactattgtattattattttgattatatatctagattataattaaataaattaattaaaatagaatgaaaaatagtaatcataaaatagttatatatataatttaaggggattttttttttaaaaatacccaaaaataacaaaaattttaagttttttacaaaattcttattttttttacattttattttgttttggaaaagactgttgtttacacgttgccaaaatatagcataattttatggcaacttgaaaacaacgttgttttccctctaaaaaaatacaaatctgtaaaaatttgaaaaaaaaaaaaatcgtaaaattttttgttgctttttgtagttgttttgttgttttacagttattttcatgttgttgtctaggtgttgaataattgttttctagttgctttagttgttctttagtttatttattttttttttttactgaacacattatttattatagttgttctttaatttttgttgttttatagtttatttagttgatttatagttgtcgtgaggttnntttctcattatttttagtttttttttttcttattttctgtt

SEQ ID NO: 107824 - DNA, 1082 bp, Cannabis sativa
  modified_base (614)..(617): a, c, t, g, unknown or other
ttaaataatcaaactgggaatattaaaatacggaatttcagaaacttataataaaacacggtaaaaaagtaaaaaataccgcctagcagtatttttataaaaaattagcaaaagttagtatacattgtaaatttccctaaaatgatcacttatgatagattttatttaggcccaattagtatttgggccaattaacttaataacagttgttcatttaaggttaaatttctctcttttgggccttgtgtgaaagttagggggccatagaagtgggtatgacatactgaacctagccctccctcacttgaacaaccccaattgtgaaggcccatttgcctcatttgaatgactataataggttaattgattagcaacacaattaatttcgaaatatatgaaattattttttcatttgaatattttgaaattcatttaagaaaaacgcacttaatttaatgaaacctattcaagataaactttatgtatttttcttatgtttaattaaataaaaaaaattataactaattagattcttctagatacttaattatttaatatttcataaaatatatttaagttgaaaatcagctatttataactaattttggatcaannnnaatttgaatatttttgaaattcataatgaagctaagattttctaggaaattagttattgagatattctttaaatattgtttttaagttaaaaatttgttaattttggatcaacttaaaatggaatatttttcaaattaaggtagtgattagttcaagatagttaatttgttatttaattaatttttttttaaaaaaaaataatttaagttcaaaattttgttattttagaacaaattaagttagatatttttttcaaatatttattttattatattttatatattttttcgaaattttatatatttttatgtataatttttgaaaattgaagttgaaaattaattttttatttattttggtccaactttaaattaagcaattttcattattaaaatatatagattaaaataaatgattaaataaaaatacattttttttaaataatgagctttaatcaagagata

SEQ ID NO: 107825 - DNA, 1668 bp, Cannabis sativa
tgttgatgacatactcattgtgggcaaaaacagaacagaaattgacaatctgaaagcaaaactcaatgatgaattcgacatgaaagacctaggggaagctaagaagattctaggcattgacatacaaagacaaagaccaaataccatcactctatctcagaaacaatacctggaaaaggtgattgagaaatatggtatgagtgattctaaacctgtgcagacacctctagccccacacttcaaactgaccaaagatcagtctcccacaactgatgaagaaagggcattcatggacaacattccctatgctaatggggttggtagtcttatgtatgccatggtgtgtactaggcctgacttggcctattctttaagtgtagtcagcagatttattgctgatcctggacaagaacattggtcagccttgaaatggattctaaggtatgtcaagggctctcttgacataggacttacctttggaaataagtcaaactcacaagaagaactgactgggtttgtcgattcagaatgctggtagcattgacaccagaaagtctctcacaggatatgctttcacagttttgggaggctgtgtaagctggaaatccaaccttcaaaaggttgtggctctctcatccactgaagctgagtatatggcagcaactgaggctgtcaaagaagccatttggctcaaaggactcgctaaagaactggggtttaacacagatgatgtcactgtcaactgtgatgaccagagtgttctgcacttaatgagaaaccccatgtttcatgagagatccaaacacatagacatcgaacttcattttatcagggatgttgttgcaaggaaagaagtaaccatgaagaaaatcaatactgcacacaaccctgctgacatgctaaccaagtgtgtcactcaagccaagttcagacattgtctaaacttggtgaatttaatggctactgaacacttgtattctcaagcctttaacctctgctgagtttcaacttatctctcttctcaaagtggtcaaaacaaggtggaattgttggtgttttaactactttgaagagccaaacagaattaactgtttttctttgacaactcagcatacggttggtgacttgttcaactgtcacaactatataaacctcctctctccaactcgacatgacacaaaaagagaacaatgcctacaccagtctaagttagttgtgtccaggttttgagaaagagagagattctgtgtaaggaaagaaaccagaaagaacaaggaaacaccattgtctttgctgaattctcagctggttttttgagtggattgagggttgtaaatggagattgctcactcttgaagtgacttctctcagtgtgagatttcatttgtaattcttgtattcaacattggtgattaaagttgtactctttcctttctcagatattcaattcaattctatgacatttctgcttttgttcatcttcagttttttagctcaatgtttcattaagtttctggttcagtattaattcttgtgtcattgtcattgttgtccttaaatttgttgttatggtgatcttgatcaggtttttaatccgcaacttaatatatattattcacataacaataatatatattaccacattttaatctacatattattatatta

SEQ ID NO: 107826 - DNA, 656 bp, Cannabis sativa
gatatcgtgtctccgcccctatcacgcgcttcctgacatagtacacggggtgttgggttttttcctcttcccgaactaaggctgcgctgaccacattctcggagacagctaagaataataacaagtcctctccaagaacgggttttgacaggatcggaggtctggccatgtgttcttttaattttctgaatgcctcctcacattcttccgtccattcgaatttttggcatttcttcagaatgttgaagaagggaatgcacttgtctatggatcaggaaataaaccggctgagggcagcaaccttttcggttaggctttgcatgtctttgtgtttcttgggagaaggcatgttcaggagggcttgaattttttccgagtttgcctctatcccccattggctgacgataaatcccaaaaactttcctgatttaaccccgaacgtgcaattcttcaggttaagtttcattccatatctccggaccacttcaaagcattcctcgaggtcgtctgcatgacttgcacatgcctttgatttgaccaacatgtcttccacgtacactttcatgttccgtcccaaaaggccattaaacatccggttaaccattctttgataggttgctccagcttttttagtccgaaaggcatgactaggtagc

SEQ ID NO: 107827 - DNA, 930 bp, Cannabis sativa
atgtcattctttcaaccaatacctcactttctttcctggaaatctttttagcacaaattggaaccccctagtatgtgaatgggagctcatgtctcataaaccctgacagttgcaggatcttatccacacacccctgttgcatattaatgcagtatatagtagttttagtggtattaggttgtaagcctgaggttaatgagaagagctttagagcctgtaacatgtataccacacttttgaaatctccatgactgaatagtaagacatcatcaacaaaagccagatgatttaatttgaggcccgagcacctgtcatgaaagtgaaagtcttccttctctccaatcttccccattagcctagagaagtattccatacccaatacaaacaatagaggggacatggggtccccttgccttagacctctcctagattcaaagaagccatgtaaggttccattgaacataagagagaactttggagtagagatgcagttcattgttagttgtatgaaactgctagggaatttgagaccaattagaacctcctccagaaattccctatcaatggtgtcataagctttttggagatcaagcttgattatacaacttggtttgtctgctttcctgcagtagtgtcttaccaaatcttggcaaatcattatattatgccctacgaatcttcctttaataaatcccccttgtgagtggaaaattatttcaagatggatgttactgattctagagctcaaaaattttgttgcaatcttataaataacattgcaacaagctattgatctaaatcgcattgcaacaaattatgtttagcacaataattacttgattttttttacgcggtgatcaaaatcacatatgattaacaatgcagcaattcataattgacggcggtactttctcgaactaagatagctca

SEQ ID NO: 107828 - DNA, 971 bp, Cannabis sativa
ttagttgtgagattttttgtcacgtatggctgcaaaattaggaatggtattgaaagctgttaaagatatatgttgtgacaataaatcaattaggctacattttagtaaaaacatgaactctaaaaggtcaaaagcacattaacttagagctaattgttattaaaataaggttcagaataataaggtgtctatagaacataataaggacaaactctatattttgtgtaattcgaatcactaaggatataccatttaaggtttttcaggagcttgttgctcaaatatggatatggtattatttaagattgtactggtttaatgagagtgtatcggaatgttctatctagctgacacatatttatggtttgattctgcaaataaagtatggatttaagttttgagtttctgaatgttttctttctattgaggtttaagtataaggttagaaagaattcataaaggactgatctcaattaaggaggaccagttggagatagacatgctaagatcatatatgcatgtaattttcatgctacgcatccatgattgatctatgtcatttggttctattgatatacgtgaccattgatgggtttagctacgttaaatgttgcgaaagtcgctttgatcctatgttagtataatcaatggacgagattattttgaaatacctagaattatgatagcaaaagtttaagcacttataagggtacacactatcagaaaatatatgtagcccaagtaggagattgttgaattaaaatcatcaatatgggctcatatgtatattagtgtattgctatttgaagtttgacccaaaataaagtgatcattttagtaattgtgggtcattgggtattaaagtatcatggactatatgtgttgataccctaagcgatatttctaatttattaaggggctaaattagaaatacttaaaattaataacctagctatgaggttataaattgg

SEQ ID NO: 107829 - DNA, 920 bp, Cannabis sativa
aattcagccctagcaaagtcttgaactacaatgctagcttcgtcatccccaagaaagctgtccgaggggagaaaccagctggaggacaaatgggctaaatggtccaggggaataggtgtcggaggtctagagctcatccgagaccgacccaagaaatggcccaaatgggaaaagtagtattccttggcgtgattcccccaccgggtggaaggcattctaaacttacaaaggcgctcatcgaatcctatgggcctacactgggtatactctcggacaaaggggacatggcgaataactaaagaagacttatcagaacctgttccctcctgaagaggtacttctggtaccggtcctccgccgaggcgattatgtccacccggagcgccctttccgcagctggagtccttacattcgggtagatgaccttggaaagattgaagtcatccaccgactgactctcggatatcagcttggcctttcgacaattctctgtcgtgactaagtccccaacattgagggccttcctgtcgtaagtggagaaagtcttagcccgctggaggaatacttgagtaggtgcggtccgcatgtaaggagggatcctaacccactccgtaagaagctccgggcggtgcatggcttggaagccggaggaaaagaagaagcggtgacggtactcctcacgtgcttctggtggttaaaagggaccggccctcattcaaagggtgggaccgcagtccgtaaaatccatctttaaatttgtcccccttcttggggacggatacaagttcataaaaatataaaatttcagccggactgggtgagcccaagctccgggcagcatacaaaataaataagcctgaaagcaggcggtatgcttgaggaattagttggtacggcgcgaggccaacaaaaactaaaaa

SEQ ID NO: 107830 - DNA, 849 bp, Cannabis sativa
tttccctctaatttcaagccacaagaccaaaaactctgagttataactgtctagtctagggcttttggaactaaggatgttgagcatggctgattcgatctcctttactgtaaaaagctgaatgaggccaagctgctggttcaaatcaagtgtattttccatcttcaaacattcatagtcaattcgattagtggctgggctagcagtccccatataggtcttgaaatgatcaagaaaatggttcacaacatctacgtaaatatcaaccaattgcccttggtcattaatgaaactaataattctatttttctcccttatcttttttaaacatgcatagaaataggttgtaatatcatcaccctttttcaaccaagtgatcttactctcctgaatcaagaagcttcttagaagattttcctgaagacaaaacacatcaataacatctccaacccacgaagccgtgctacggttgtcacagagcaatgcaccccgaccccctatggggtggtctcagggtgatacaccctgacccccacatggtggtcacggggttggtgtaatccccagcctcgggccacgcacacattgtcctcattaaagatagtttataaacaacatgctatccacactcggggtaaactcttgacctcagggtggagtaccccgacccccaagtggtggtctcagggtaccacccctaacccactatcgacccaacttcagtccaagaaaaagggggcatgcttcaagctcgtggtgtaccctgacccccaaccaccacggggtgacttcggggcggtgtaccccaacccccatatggtggtcttggggtaacacccccaacctcca

SEQ ID NO: 107831 - DNA, 768 bp, Cannabis sativa
  modified_base (708)..(722): a, c, t, g, unknown or other
accagatgctggggtaagtttcctcttctgatctgtggtggaatcaccaccatccctaccatagtcaagagtaggaaaagtgggggttccaccaacattcagagtcacacgaggcttctaaaggaatttcatagcaccctcggctctcaaagctttttcaaccatttcagcataagtggttgcttcattggtagtgatcaccagatcatgcctaatcttcacattcaaaccggccacgtacttttctttcttactgaagtcagttggcacgatacccacggggagcttggccaaacggtcaaactttgtagtatactcaataaccgacatcccctcagtttgcactaattcagtgaactctctccgcttagcacagcggacggcttcattataatatttggcgttaaataattcctgcaattcttcccaggtcataacagtgacgtcccgagtgagagttatcaactcccaccacacgagagcatcctcctgaaactgaaatgtggcgcggtcccacaatcatttccaaccacccccataaaatttagaattcgttcaattactgtgagccattgctcagcctcattacatcaggacctcccagaaacactggaggtgcttgcttgcgaaacctttcgtataacggctccatacggttgccagcaacatgttgttctgctagtgtaatgttggaatatattttaccannnnnnnnnnnnnnntcacaagtatgttgtttaaacatcttaaatatgaactttctaaaac

SEQ ID NO: 107832 - DNA, 535 bp, Cannabis sativa
aataaaaaataaaaaatttaaatattatttattttaaatatttttctctcaatttttttaattttttataatatataataaatcattaaataaatttttagtacaaaataatttattatagagtcttttaagtaaaactgtttttttctaaaagttgggttgtaccatctttagtttttagctacagcttctctataaattcttcaataagctgtgttttaactgtttaccaaacacctttttatcacaactttttaaaaaatcaacttttaacttttgcaaaaactcggccaaacgggccctaaacctatgggcattagcgacaagataattggtgaaagagcaacattatatatttgtatttatctaggcttgaacaaaattctcaatagagaacttgtgcaaagttagcaatgaaggtttctctattaaagtgtttacaaggtcatactttaaagagagtttagtttcttcaatgccgactatggcagagatatcttttgcaacagccatagcttgctgattgcagcgaagc

SEQ ID NO: 107833 - DNA, 870 bp, Cannabis sativa
gtatttttcttaataacttagtttctttctgtccaacatattccttaatagggtctagaatgattaaaagaataaaggaaaagaaagagaagcatgtgtggtcggttcaaatcatgaatgaacttcttaaacatgcctctatgtacgagtacgaaaacactggagcgagtccacaggcagtagtgccaccccacaaagaagacggtgagaccgagccttatgagattgctgaggatggagatgccacttttgctgctgataccataatcggttcaaccacttcttctattgatgatgatacttctctcaaactaaataacccaaatgggaatgataaaggaaccaacgttaatgctacagatgaggagaatgaaacagctatattaattgcagctaaaaatggtgtgactgaattggtggagaaaatccttgagctttttccagtggctatccacgacacgaatgctgagaaaaagaatatagtattactagcagtggagcatcgacaaccgcacgtgtacaagatgttgttgaagaggaaaatcttgaaagacagtgtgtttcaacaagtggacaacaaagggaacagtgcgttgcatctcgctgccatgttgggagactataaaccttggctaatcccaggcgctgctcttcaaatgcaatgggaaatcaaatggtatgaggtaagttttcgatcaagtactcctctgttggagtgtgttgagaatgatgggcttccatctcaaaatcaattggcaatgagtggagtaggccatgttcttatatatggctcaatattcttacatttgattggtggctatttttgctcaccaatcttgaatcaccttgtcataagtaatgctatttgct

SEQ ID NO: 107834 - DNA, 639 bp, Cannabis sativa
aacactttctttttggtggcgggacctattattattagttttttttttttctaaaaaaaaaaaaagaaaaacaacacctttctatttggaacgatactttttgcatcaattaattggtcgcctatttttaaaatgagatatatacaaatttcttggaaattatatgggatgctgacatttatatataataatatagtattatattattttctgtcaccaatcgtttcacagaagaatagagcgagtgaaaaagatgaaactttaaccatatactcttttttagaagaaaaattccaataaatcacattttagagcaacaaacccaaaaggagggaaggggtaagatcatttattgatcaacagtatcagcaataataatattttgaatacaatttgaataactagactactaaactttgttagtgacaacagataaagctagtgaaagaatgtaattccttgatgttttcattgattgaattgtaaatatatataatagggtgactatttaatagacacatttttattgtaacatgataattactctttttttagaattaaattaatcataattaacagttttgctataataattaggctaattagtaatttttcctatcgaactttgacatatactaa

SEQ ID NO: 107835 - DNA, 697 bp, Cannabis sativa
gtaaaataatttccaatagttattaccgtcagtttgtaaaggggttctctaaaatttctacgcccttaactgagctcactaaaaagaatcaatagtttgcgtggacagacaagtgtgaagcaagctttcaggagctaaaatagaggttgattaccgctccagtattagcgctaccgtcagataaagaaaagtttgtagtctactgtgatgcatcaagattgggtctggggtgtgtactgatggaggttgatcaggttattgtctcccgttagttgaaagaatatgaacagtgatacccgactcatgatttagaacttgtcgcggtggtgttttctttgaagatttggcggcattatctctacggagagaaatgtgaaatttatactaaccataagaacctcaaatatttctttactcagaaagatttgaatatgagagagaggcattggttagagttggttaaggattatgactttgaaatcctttaccatcctgggaaggccaatgtagtggctgatgccctgagcaggaatggtcccaggcaggtaactagtatgattaagatttcacctcatttagcagaagacatggttagatcaagcatcccatttgttgtgggaaaacttcataacttgacgctacaatctgatctgttggaacaaattaaagctgatcagttagttgatccagagttagt

SEQ ID NO: 107836 - DNA, 685 bp, Cannabis sativa
  modified_base (130)..(133): a, c, t, g, unknown or other
aaaccgtcgcctatagtataggcgacagttttaaaccgtcggatataagggcccattaaaaaatcttcacctacctacatttaccacgtgccctcttacttttttttttatttcccacatgcccacctannnnttctccatctcccacaccctaaaacgaaaatcttaactctcaaaaactccacacatgcctccgcaccatcgccctcctttctcgccgtattcctccctctctcgatctccctttcttctcgtctccctggtccatcgatctccacccactcctcctccgtcggtctccctctcatctctgtcgcatacgtcggaccaccaccacctcccgtcgatgttcctctcatctctgtctcaaacgtcggaccaccaccacctctcgtccatctccctctctctttttctctctctctgagctcggtataaatgcatttatttaattaatatactttttatttattatatatatttattttgttattgtataaatttaatgtgtttaaagttagttgttattgttataaaattaattagttgtttattttaatttaggtaaaattataaaattaatgcaggacaaaaattagagaaaatacagatttttctaccattaatggcagaaaaatatttctttttttttttacattctcgacggttttaaaccgtcaggaag

SEQ ID NO: 107837 - DNA, 1000 bp, Cannabis sativa
atgtcgaacacttttattcgtgatcggaaacaattcaatatattttatctataaaacgaaggtgtaggtggcagcagtacaaaccagctattatccttggtggctcactctaggcggaggggtagagatgacattgctttcaatgatagtaatcggagaagtggaggtggcagagcataggaggacgatggttgtaggcggttgattagccggacgaagtccatgcatgtgatagaattaaatggtggagaaaattaagctaagtaattaccttctatattttaattcattaaaatttgtattcattttaaataattttacattaaattatccttttttgttatcaattaggttttttatttaataatttacagattgatttgtgtgtcaattatgtctttgtaataattgtattaaatatttcattcacattttcaaaatcttaaataattttaagtcaatcttaccttttatattttattaattatttcttttaaaaattctttatattattgacagtcaactagcatttttaattatattaacaataatttatgtatataatattttttaaatttggtttttacaagtttatagttttgaaaggtgaatttcttttatgattttttggtatttatttagaacatgtacacaattaattatatttgtaattgatttatttatgtatatttttatatgaattaattttttaatttatttataaatcaattaacaaattttagttaatattttttactttaattcatatgaatttacattatttttttcttacgtgccttttatggcttttgtagcttgttcctatttgtttagggtaattttgtggtatgctcaatttgcaagaggaatgatttctttttgtactcatgacttctacttcaacgactttttcactttaaacagataagtatttcaattttatgtccttatatttaaaatagattgatttatcattgttctttcacattatcttttttca

SEQ ID NO: 107838 - DNA, 547 bp, Cannabis sativa
  modified_base (115)..(118): a, c, t, g, unknown or other
aaattattttatttttaataataacccattttatttttaatataaataagaagtcacccatgaatttctcataaaccaagaattcggttatataagcacactttatatagaatannnntatatatatatatatactaggcatctagaacgtgccatttaaacttgtggattataattacatatatcttactttcattaattatatttaaagaatagttaaaagaaattatgtttaaacaacatagtgtggtataggttctttttgaaactaagatattaatcatcctgtctaaatgtaagtccatgtgatttgttatattattatatagtaataagtaaaatttagaaaataaaataaaataataattaacaaaaatctatataaaaaaaaaagaagaatataacagcataaaaaatgattaatatcatttgtatgcttgcacagtcttctacactattgtatatttactaataaaaaaaataaaaagaaaaataaaaaaataagtaataaaattgaaaaaagaaacagctgaaaaaagataataaa

SEQ ID NO: 107839 - DNA, 1245 bp, Cannabis sativa
  modified_base (1072)..(1072): a, c, t, g, unknown or other
acccaaacccaaaaaaatacacataacgagaccaaaacccaaactgcaattaggacccagacccaaacctagatcttgacccaaacccagaccagaaccgagacgtggaccaagaatctggatacagacctaggcaacagaactaggaccgggatccaagagccgactccagacccggacttgaacataggacccagctcgtgacccgacacctgaaatggaacgagatcgagacctaagatcgggatctagatctagactcggggcttggaccgaacccgtagtcggtgtttggatataggacccaacctcgaacctgaacccagagcaggaaccaaactcagacccaaacccaaaccctatcctagacacaaacatggacccgaacctgtaccctgtgaccaaaaattggaactgaaaccacaagtagattgagacctgggaacgggaccagaacaaggacttggacctcgaaccgtaaccaaacatagacctagacctaaaaccgtaactggaccaggacccggactccaacccagacctaggcccgaaccaggatcccaagccatacctcgactcggtgctgaacctggacccgaactaagacccaaacatggaacctgacttgggacatagaattggggtcgggaactagaaccgcaccccagtctcgatcctgaagccaaactcagaactgggtcccatgacctgaactggaaccagatccggacaagtgacagggatccagatctgggactcagaccaggacccgaacccgaaccaggttcaaaacctgaaccctgaacaagaaccgccagaccaggacccttgaacaagactaggagcgtgacgaggacccagacccattcctagaaacgaactcagacctacccccaaacccaaatcgagacaagaactcaagcccagacatggtcgtgtacccagatcggaaccgagacccgaacctggacctggacctagacttgggacacgatctctagcccaaacttggacctagataggtatccgaatacaaacctggactcaaacccagaccgagatcaaaactcgngacctagatccggacagagaccctatcccaaaaccagacctagacccgcacctgggacccaaacccagaccttgacccgaacaaagacccacaccgggatttgtacctaaactaagacccagacccaaacttagaccaggactcagacctcgacccagactcagacccaaacc

SEQ ID NO: 107840 - DNA, 766 bp, Cannabis sativa
cttcagacacttcactttcagacccgatatcatcagcagagggttgttctttgggcacaaactctttacttgaatcagacacaccctctgattcttgattctccttcgtctcttcttcaggtttagaatccgatgaagaaacaaaaggggaattttctgtgagacttttagcctttgaagatgaagccaccatcttttttcctttggaggctcctttgggtagaaccacttcggggttctttggtgtggataccttggacctggttcgagaactcaccgtgggcaagggcaatattgctttctcgacatttggagcaccattcgaagaagaagacttcgacaatgagtgattagattaatgagattcatcatgatcaccaagcccaggctttggggtagcaatcagagagacaatgatcagaggagaactgagattgtaagtcgactttcgagcttgggattttgacttctcgacagtttttgtaggagcagacgaagacccaagaattccggtcactagaacaggtggcgcaggtggggtgatcggagaagcagaggcagaaccatgagaaggcctcttggaaggttgagcattttttgtcttggccatttttctttgaaaccctagaaagcaaacacactctcaaacttgaagaaggttagacttttgaaaaaaaaaatgagagaggagtgaatagtggtgatcgtgggaaaggtgggtagttgagcatatataactctttgagaataaatacccaaaaatcag

SEQ ID NO: 107841 - DNA, 1040 bp, Cannabis sativa
agccaacttacgaatttctgactgaattagttgagttttttttttagtttcaactaatattatatattttaattaatgttttatatgcactttgtcttaataatttttattttatataaaatatatatttttaattatattaattttttttattttttttcttccaattcatattcataagatatacttattaaacaaaaataaattatatttcatatattataaaaaaaagtttaaaaatatatatgaattaaataatatagaaaataaaataaaaaataatatgagaattttttttaagaaaatttaagagccattttaaaaaattataagcttaatttttttaaatattaaagtgtactttttattttgtatggtacaaattaaatttctcttttaattttagttaatttagatgcaggagaaaatagaggaaggcaactataaattactgtatcaaagtattattgcgaacaatatagtttataatcaaaatacaataacaagattctaccaggaaaaaaaaaattacaataacaaagaagaaacaaacattgtgaatgctagtttaataattgtgtaaaatagttaagacattgtgtattatcatgtctttaatgtgcttaatttacatatttctgagaaggaaaaggatgactgtgttatttttaaatttatggacaactatatctccatggaaattaaatatttttaaattaaaatattctaattggtaaaataatgaaaaataatgaaaaatcatgtgagtcaacccgctgtcctacaagtcgggttgaaatcggttgccccaaatttattctttgaacatattatatactgtggaaacaagttatataaccgattattagaggttaaaatgacaaaaaatgacattttctgtgtgtcacacatctaaaagaaatgaggtactaaataactacccttaattataatattttttgaaacttaaaaatgttaatatgggttgggaaatttacacagtgtactgtattttcccattttctttcttttatactgtt

SEQ ID NO: 107842 - DNA, 1014 bp, Cannabis sativa
tttatgtatttaatattttttatagattacttgttaggcattttttttatgtatgtagttactctattatatagctaactttatattttgtttgttaacggtgtacatatggctaacttaggttcaggctcagattcaaacccagaagcagagtgtcctaggccaatacctacactagaagctacttagatgaatgaaatatccaagttgatggaccaaggaaaaagagtggcactcaaagtgaatgacaaaggacaatactgtggcaacaactactccaagctagtatcgaatttaggagttagatgccgtcagacgatagggttgtcctataaaaattggaaagaagtcaaccctacactaaaaaataaagtttggaaagatatatgggtaagcagttatttgtgagaattttgatatgtttttgattaattcagatgttaactctaatcatgtttgttttccttcaaactagacgaggtttatagtgtcggatgatttcaaacatgattttctgatccttgttggaaagttaatgaacgatttcaagaacagaatgacaaaagatgttattatgcccgcattagaagaaaaatatgtgcaacgactggcacaagtccctaaaaggcatctggaaattgaccttacttattggttgaaatttgttaaaagtcgactaactcctgaatttcaagtgctaattatatttgtactaagataaaatcttaaatacaagtactagtctcaaacagagcatacaaatatataggggcatcaaatgcgtatcttggcccttggccatgaatttcactagtaaattgtccaagacaacctaaaaacaaagaatgtggtttttatgttttgaaatacatgattgacttcgttgcacgtgcaaaccccaaccgttacatacaagatcaaaacactgtaagtttaaattattgattatagtatttattacaataacaaataataataataatatatataaactaatataaatttttacttttt

SEQ ID NO: 107843 - DNA, 1156 bp, Cannabis sativa
  modified_base (82)..(84): a, c, t, g, unknown or other
gtaataccggcggaatgccttttctgccggtaataaccccattaataccggcggtttggctccgccggtattacttccgccnnnactgagtaaaaatgttgtagtgttggaggaggaggaggagtcggcgcctgagaggatttggatgttagggagagcctcgccgtcactagactgagccaactgcctgagaagaagaaggagatgagaatctgagatggtggactggtagggagatgagatgaagcttagagaggaggtgggttaaaccgttaaagttttaagggaagtaaaaaacagtattatattattcacctttaaagttgtcagtattattatattatatttaatagataataatttaatattattttaaaatgtaataaaaaaagaaaaaaaaaactatttttagttatttgggtttagaattacaacccaacaattataattttttttttaaaacccaaacccgatatctgtgtggcccatttttgggttggacccgaccggatcctatgggtttttaattttttagctttttttggcaacaagtcggggcgggtgggcagtttttcgagtttttgggtctaaatgttcagttctagtaagaactccttttgaaattatgatggaaaagaaattaatctaattaatcctttttaagcttccccaaaaataagacgtttccactttttgtttatttagtatatttaaattaaaaccataaagattttatttgattaaatatttaaattcaaaataattattaaatcatatttatttgaataaatatttataacttgatttgttatagatatttatttcctataactgattgagagaatctctcaactacttgagagaatatctcaaccacttagagagaatctctcaactactttgagggaatatctcaaccaacttaaatatctataactattttttaaattcaaattcaaatatatatatttatcttttgaattaattaattaaccccaaaaacatccctaaataggggcaccttcaccgtgtcctaacacagtgcatgtggcgtcacctatatcttaccaagacattaatgatatcttttattcacacaacttttgtcttttccctaatttatttaattaataaatttgaaaattatttatttatt

SEQ ID NO: 107844 - DNA, 1402 bp, Cannabis sativa
attctccctctcccagggggagcttgtgttcggtcggttttgccagtgaactttcccttcttccaattcctttgtctattgttgttgctggaacatttacaatttgaacttgaattgctctagtaatgggggagttgggcggatgttacagtggaaggagctttaggcttgccaggtttttgctcaccttctgctcgctgaatagcctcttcaagtttgatgaagccttcagcatgatcgagaaaattgctcaacgagtctaccagaccgttcttccttatgtccttccaaagctcaccaaggacttcaatccccccagtattgcggacaactttccaccttcagtcatccgtgagactttggtcccctccatcatgaatctgctgatataggctcgaagaggcacgcctggtcttttcttgacttcgaccagatctccgaggtgcaatggaagttggcgagaggaggagaattgtgcatggaattcttaggagaaagctttccaggagttgaactttcaaggtgccagcttgaaataccattgctgggcggcttccaagaggctagtaggaaaaattctgcaacaaacgtctcctcgtattccctgcaaatccattttcatctcgaaatacttgaggtgggaaagacgatcttctttccgagtgtgcatcttccaagttgacattttaaacttgttgggtaacgccaggagattgatctcgggggagaaaggggttccacgtgctcgatccaactcgagatcattgtttctctgaccgcccatgccttggaacataatctttagttcgtctagctatgcctgcacggttggactaacttgttcggcattttggccgatctgagtaaagtcagtatctttctgagcgagagtttgagcatgggttctgggctgcatgtttggcgtgtcaagctgatcgtctactcctctcctcctatttgaatcgtttttgagatcatgagtcgttcccaacttgtcgaatacagaagcgcctggctatctcagtgattgattggcttggctaataggtggattagcaccattaacctggttggaattgttgggtatgacttctcctgatgaattactagacaaggtctgcccacctgctccttggcccacaggtggaacctgtgactggagatttggcggctgaccatttatagtctgagaagtattcattgctggatcttttcgtctgtttcacccaagtgggatgacattcgggggttgctgcctgacatattgataagcttttcgtatcaattcagtggcttgccgactagatagtcaatgactgcatgatgagcctgttgggaattattttaccaggatcttagatctattcacaagtatgtttattaacatcctaaataagaactt

SEQ ID NO: 107845 - DNA, 885 bp, Cannabis sativa
ttttggtgtgaacacttgaattattctaaaaaaaagtataattagaccttagcaaagtcatatgggtaagttttatgtaaaaacttttagagtatattggtgaaagtatctttaatgataacattttaaaaaatgtttaataaagtagaaaatttaggtactgaaatataaaaatgttatattattaaagatgaaagaatattatttgtattgatgtcacacaatgatattgatagtatatttttaaaaaaacaaaaaaattaaaaattaaaagtgtaatatttatatactgatttaattaaaaaaaaatacatctatagaagtaagagtgctaaaaataatgtagaaaaaaaataaaataaaatattatatctttggatgatataaaaatatttagcacatttaaaaatgttagggatgctatcaattttaaggtgtcacttaggaccaatctaattacaagtttacaatcgatcaatccaatcctaacagatctaatataatcggatatacaattataattggatcagatcgaatgtaaattttgaaaatctaatcaaatcggatcggatcgattgttggatggaatatctgatccaataaataatcgaatcgaactgatccaattatcatctaatgattatcaattatatttatatattttaaaatatatttataattttatatatttaatatatttcatttaaaaaaatatatattaattaattcaatatatatttaacacgtgagattaaagaaaaaaaatcttaaatctaaaatattaattctcatttttttaaacgcgaataaaattgttattaagtattgaataaatttcatttttttcaattttattatggaattatgataattaagttagattaa

SEQ ID NO: 107846 - DNA, 809 bp, Cannabis sativa
  modified_base (427)..(429): a, c, t, g, unknown or other
agctcttgatctctatcatcaaagagatccttaattacctcttcatcccactctcgtgaattcattttgaaaaggctgcttaaagtctgattaacaagtacagaatgtgaagaaataacatagccattcgtgttgtgtggaagccaaggaagggtcacataaaattgaagtatgttcacccgtgcctatcgtacaggttaccccagcctgaatcagaccttttgtttcaagaataatcctccatacaaatcttggattgtcacccaattcagctgaaagaagagttctgttggcatagtatttagctttaaaaactttaatcaccaaggacgtatcgttaaccgacaacctctagcactgtttccccaatagggccatattcaagtctcgcagacttcgaaaacccaaacctccaacatgtttgtgnnnactcaatcgatcccaactcatccaactaacatgtcctgttctacgaaagtccggtttgccaccagaacttagccatgagacgctccaactctctgcaagtatccaaaggtaacagattaacactcattgcatagctaggaattgattgcgcaatagatttccgcaacacctccttccccgcacgagacaatatccttcccatccttgaattttcttctttattatatttttaagaaaaccgaggagagcatttttattctttcccactgaatatggaagtcccggccaaatacgacccattctcatcagcctcataaatatctaacagctcacaaatgatatgcctttgagaggtactagtattgtgactgtagaacact

SEQ ID NO: 107847 - DNA, 976 bp, Cannabis sativa
  modified_base (40)..(40): a, c, t, g, unknown or other
caaaatggtcatttttccccatttatgttttgtcctttantggacttagtaattggaaatttgatgttatattatgtttctcttggcggaagtaaaggtttattatgtgcatgtactctctttttattcaagttagaaaattagaaaatttaagagaaattcaagctcttttcctctctctctctctctctcggcttggtgtggattgctaaggctgagagttcttcttaatttttcaagctttatcaatcaatctaggtgtagttcaagttgttggtaagtccttaaactttttctttgttttttcttagaattttgatgaaatgatggtgaattgcatgcttaacttgaggtgttgttgctgctgtgtttgtgagatgatttcagaggtttaatcttgtttatttgagtagaataaagttgcttgtgatgcatgatagttatgttgtttaaagttgtggaattttagctaaaaaccttagtattcaaagaaaaaatgaagaatctgttgctgttgtttttgttgatgcttgttgttgttttctgaggttattatatgcatatttaggtagatttgagctggtttggatgcatgtcagtaatgtttaaccaagtttgagttttgaacacaaagcttggagctttaatggtgatttttgattctgtgttttctgggctgtgttgatgctttagaattgttctttggagtatttagaacaggtctggaaggtttggtatgattttggttggatttgattgagttatggaattttgggtgtttcctgcgaggaactggaattccggttgtgcaagtggaattccggatggggttcaggaattccgagaaccggaattctggttgcagaaccggtctactggttgggggatttgcaggaggcctagtttttctcgtttttatattatttggggtatttccatcttttttatcgatagggaaacttttagtttctagttt

SEQ ID NO: 107848 - DNA, 1536 bp, Cannabis sativa
  modified_base (68)..(71): a, c, t, g, unknown or other
taggtttcttacttattgtttgctgtatcgggcaacgatagtgacatatgtagctcgtggttaacgannnntaagggtactttatgaagtaccgaaattaggtgcttacgatgttgtgaaatggatcaagtgtattattatgtgatgagttgtaattgaatacatttctgttatggtatggttgaatgaatgttatattgcttatgaaattggtcactttttttgcagtctcagtggcctagggatgtaagaatacatgtttttaatgatgcatgattagagttctttatgaagcactgaaattgtgtggatatgctaatgtgtgaactagagtgctttatgaagcattgaaaataagtatttataataaagtatgattaaggtgtttaatgaaacattggagatgttgattatgtatagttacgaatactctttattttttaataagtttattcgtatagatgttgaattgaataagtatgttgaaagagtatgacctattggtatgtataatctgttgtaatgaaatctgctttcaccttccatgatttttctttatctagtatcttttcttgctaagtaaccgtgactcacggatgctttgtggtgcaggttagaagtataacaaatgtgttcagccatgagccagaggtcatccagcattgtacgtatcagccgtggtgtcttggcttctgggaatcaggattgaccctttctttttattttttgaaatgtaaccttgattttgtaataactgtattgtaaactagttgtaaatgaactatagtttatagggatcccgatattacaaccgtatttataatgaaagtttttactttaaattaaaccaaaggttttaaatttaaccacacccttttcctaaactaatagattagtgataataagtttgtaaaagcacacagtggcgtcccagagagtcagggcgttacaacgagtcaatcttattcagacttttctgatacagaactagggttctttcacaaacggtgtattctcttttttctctaaagtttttcttccctattttctgtatattctacccctatttttaataacataggtttctagttaattacatttaatttcaaatcatctaacgatatttcctgaaatcgtgggcttaatttatgccccttgtaagtatatacagttattatttgaaaatcacacatctgtaatttttatcatgttgaaggaagtcaacgttgatgtgaattaggacacgctatagagtgtaccttgctgagatgtcacgccttgtgtatagacgaaggacttagtgtacacgcattccagcaatggcatgagcactaatgtactaagcaaactaaagaaccgctctttgaccgtaagccttttagactggacaatcatgtcctgggagttctcaatagcaacaataaccctgacagcgagctggagtttaccaggagtatttcttcctatagcgagatggatagctcgctattcatttgttgggttttatgccctaaataaaactctgtttcaatgtaa

SEQ ID NO: 107849 - DNA, 839 bp, Cannabis sativa
aaaggtgaaaatgtctcaagcacaaaagtacctactacaagaattattgtcattagccgcagaatttcattggtggacaaaaattgccactaatatagtgggggttttagcggaaaaaattagatttcgctgttaatattttgtgatttattaaaaaagaaataaataaaaaaactattagcggtgggctccacggttattgcccaccactaataactaggcaggaaattttcttgcccaacttgtttgagttattattagcagcggggcattagcagtgggacctgtcgctaataatcctatatattagcgacaggttaagagactgttggtttattcgggaggttaagtatcctatttgacttgcaaacatcatcattgtgatgaagaaaaatgggcaactccgcatatgcgtggattacagagatcttaattgggcttgcccaaaagatgaattcccactccccatcactcaggggcggagccaggagaaaatattaggggggccattaatttattcttgtgtaaaaattctatatcaaatacatttttcatttaattataaaatagttttaatacaaaaatatgttaagcaattaaatttaactgttagaaattcaatgtcatgcaataaataataataataatatcataaattatatatataattcttgtaaaaaaaatcttaaaatgaagaaatataatatcttaattttttttattaaataacaaaaattgatcacaaattacaatttataaaagtttaaatatttaataacgctcttattgttttaataatatatacactataaaaaatcttacttttaattataacaaaa

SEQ ID NO: 107850 - DNA, 710 bp, Cannabis sativa
tggtcaaaaatgtaacgacaataaagtatggattgaattggaaattatatcaggctagtttggagtgttaggttgtttgcttggcagattaattagaattaccaaaatacccctagtgtaacaccctaatgctaaggcacgctatagcaatttttcaagtacagtgctatctttgctaatcaaagaactttctcgaaaagtgtgttaaattaaagtttttatactaaatattaaactttataaactttacaaaatcattaaatagtaccatgatcccgtttctaaactttttgcaaaatacacaaaatacataacccaagtcgcacaacgactacaaaataacaaccccaaatgtgcagagaccgaacactccaggttacgtcgccataacatgtacaacctcatcccagttcagactcactcctgttcagctttcgcctttcctttaccgacacatgaaagtagaactgtgagttgacagactcagtaagaaaagaatataacatgtcatataataccgacttgtatctaggtgcccatacacctatttacaaggcttaaccaatgagtaggaacgttccatactaagatacaaccactgtaccacatccactatgtacctcattgtacgagtgttggtagggtttttttcgtacccagagtaccacttagtgatataccacacacaccctgtactttcccgtacatgt

SEQ ID NO: 107851 - DNA, 828 bp, Cannabis sativa
ccatcggaccatcggagaccaagctagctggaaccaatcggaccgagcttcttccccagatctgattggccacacagtcctattttcaccattttcacagtccgaatcaatttttcacggatccgaatcccattttcacaataaaattcttaaatctaaacaataatatctcacaaacaatcccaaacaaaataaatctttaaaccctttctaaaaaaaaaaaaaaccacatacctttgacattttcggagtgggtcggggttgcgagcgttggggttgcgagttggtccgagtgtgtgcgagttgatccgagtgtgtgttgagagttggtccgagtgtgtgctgagcgttggggttttttcttttgggtttggggtttgttcagctgagagagacaaagagagaggaagagagaggctgatggtttcaaatgagaggggtagtttaggaaaattggtaaaatggtcatatattaccaattttaataactttgcatttaggggaaaaattattgggtaatgtaagtataggaattcaaatttccctattataattgtatccaactgatatatatatatatatgtgtgtgcatattacataatgtatataatagtatatggtctataattttctattgagtgaaaaatataatttacaataaaaaatttttaaaaaataatataaaaatatgatgcttacctcctatacccaaagctatacgaatatatatattatcaaatattgcataacaatagaatctctctaattttatagaagcatatatataggtatatataataggtatgagattagttattaagtaaatat

SEQ ID NO: 107852 - DNA, 832 bp, Cannabis sativa
  modified_base (145)..(146): a, c, t, g, unknown or other
tagaattagagaatggtcgtatacctagtttacattattacagaatctaggggtgccctgctcatgtcttacgtaagaaagaagacaagttagaaatgcgaactgaggtttgcatgtttttaggcaattctaaagagactagggnnggactattttatagtcacaagaataataaagtgtttgtttctacaaatgccacattccttgaagatgactatattaaaaacttcaagccacaaaacaaagtagtattggaggaaatgctttcgaaattaactccaacaaatgttccatcatcttttactcaattaaaggataatcccactccctcggttgagccaatgcaagttaacacaatcaaggaaactaccactaatgttcttattcaaaagatcacggctcctctacaaagacatcttgttatggcttgtatggtgaaatcaatatggttattggtgacggtattgatgatgacccattaacttataaacagataatggcaagtccataacagaaacaatggtcagtcggcatggattcaaagatggattccatgaagaaaaacaaagtctgataatatgtagatgcagctgatgattatcatccaattgggtgtaaatgggtctacaagaagaaaagaggtgctggtggaaaagttgaaatttttaaagctagacttgtagcaaagggttatacccaaagagaaggtgttgactatgaggaaactttttgtccagttgccttgcttaaatccatcaaaatacttctctccatagcagccacttttgattatgaaatttggcaaatagatgttaagacaactttccttaac

SEQ ID NO: 107853 - DNA, 1129 bp, Cannabis sativa
cacttttagcatttttcttgtttaatgagttcagagcatgaacatctttctctctcaaatccttcgaagaatttccagaaagtgtcgattagcgtcatccgagcaacctcaaaacttcaaacaatgagtaagtttctcgtctttttctcctttaatatttgaatcttcaattttttgggtttcctttgtagaaaattcagtagtgttgaacttgttctaggaaaactgtagagaatctagttttagaagtgtgaaacttcaattgtgattgatcatataacttgactgtggtggcattccaactttaacttcacgatattcggttctcactttgcccattcggggttagtgaagattaacccttaatttgaggttttaaaattctaggttatgaacctaattcacgcgaaattttcttctttttaatcttttgattggacctagtcagtatactttgcttctttttgttcaatatcctggccaaataatcatcttgtgtcctatcttttatagatgaaccctgatgagttttggggaggagaacatcatatcgactaggaccttctccaactcttgtacgaggaccaacctcggctttgcgctagtccatcctcctcaagtgacggactttctaatttgagtttcgaggactgggaagtgatcagtgagggtacatcttccccagaacccgaggtgcagcaccatttctattccgagcagatcgcaggtgaaggctacgggcattttatttgggaactcgagaaggggtggagatgatacttgccgtccaactggacatatatcgtccgaccagacgtagttgataccatccctgtgggctgtccaaggataggatgatggccgcagaaaacaaactatgcggaagattgctgcgactgactctcacgtggctcagcttgccacaatgcagagcgctgaacaggcccgacctgctgccaaggaggaggatgatgagggggacgttgaagtctaagaagcaaaggattagggcgaggtccgtcctgatagtccctctaaggccgaggaggaaggagctgctcgaccattgcgcttcggaggttataatgaggcagggaaccggtgtctgccctaaataaaactcatttca

SEQ ID NO: 107854 - DNA, 705 bp, Cannabis sativa
aagccaccacctttccttcatttcagttacttcccatttcttgccaactttgctcaagtttcccagagagaaaaaattctcagaccaagaaaacactgttgaaaacttagcaattttcccagtccatcttcgttcactactgtcaatccttcttatctctgtttgatctacagcagaacccccagtctcaatacttcactgtaagtttcttgcaccccttgctttactgttaatgtacatggcatgctttacttatctgttcatttttctgggtttggtatttgaagtttctgggaaggcactcttttagatttttcatgtaataagtctagattcaccatttctgatgttaggactacttttgtcacgtattcattattattttttgcaaagaaccatacgttcttcgtatactggtcgtctagggcatagacagagactgcttttttctcgattttctgccctttctttttcttttatgcgcaatgttgtcttctgcgagtttattgcacccgacttttgtccaggaaatcatcctagggttttctgtttgatagatgtccggagggggcctctttcaagcggttaagggacccccattccctttttcttggtttagggtttggtatagggcctaactgctggaatcttaactctttcttcagaatcaaacatgtgtgcatctggctcaaagtcgtccaagaa

SEQ ID NO: 107855 - DNA, 602 bp, Cannabis sativa
ctcttgaatgcaaaaagcaacaattgaaaagtcttttttctctaagtactcaaatttctggatccctttcccaagtcatggttgaccctttatataggagaaaaggtcggtgcttctcgctttaagagacgcgaccaaagtggagctatcttaactgtctccttagtttttggaggtggttaaaattcgattctcatggtagtatctagctatttttgcaggttcataaccatcttttaacttcttgagggatttgaataaatgaactaatcattgacgatgaggatcccccaagggtgtagtatcatcattagccccctttaggggtagaagctaatacttaaaggtgacaaccccaagaccacgtgaaggggtgatagttgtcatatcggggtggtacccccgagaccccttccacttaaccttcgatgttgtgtgggtagcgccttggtatcgtgaagatgcactatattaaccatgtctcatgttggtggaatgtgtgacttggaccatgaaagtggtagggggtatacccctaaactaaccctttagggggtaaggggtgtgtaatgaccgctctagtaatgtggattagaaaaggc

SEQ ID NO: 107856 - DNA, 559 bp, Cannabis sativa
acccctgatttagggcgaacctctgtaatctatgtgttctctctctctctctctctctctctctcgattttctctcttttattgtttgtgtgtgttgatctatgtgtttgtgtgtttatggtgttgcttgatcatggattctgggtaagatcgatctattgatcgaggtagatctctggttctagggtttgagaaccagagagaaagagagagagtttgaagaactctcgaaggttcgaatgtgtgaaatgagctagggttagctatgattgcacttggttttgttcaaggaagaacgaccaatcgttttgtgcaaacgatctgtcgtgcaggaaggaaacgacaagtttctttgtcgtttgaatattttgtttaattgacttttctgggacaattatgtccctgtcgttttgattaattgcttgagttggtgtagggagagtcttggaaattcacaagaaaatcctacatatcactctgtatatatatacataaaatccaattttataagttggaaaattttgtggtgcacctacatagaccctaattatatatagaa

SEQ ID NO: 107857 - DNA, 774 bp, Cannabis sativa
attaaatatttttaattaaaatatgtatataattaaagtcataaaaatatttaattaaattaattttacatacacaatttaaggcttaaattatacaaatttaggcttttatcaactgggtaaccggttcttgcaactgggattctcaaaaaattcaggttgtcgattcgtgctagtttcaggttttttgttggttatttcctggctagtttagggtattgccatgttaacttatagtagataggtttttggtttaaaacctaagtcctggttgtgatttagcgtatcacttatccatgttgttatcgatgtgatttaggagcctataattcgccgagtagttgttccactcaggttggccgacacaccttaatttgaaattgaggtaagattagtatagtttcatgcatatgttattatttgtttagcatacatgttgtttatgcttgttagattacattgataacagtaatagtatacttagagttgtactaattaccaataaatgtatgttggctaaaatattgatcgatgctatcacatcaatatggctagattatgactagcatattgagtataggctgacattatggtcgatagtattgtcgtataaatgttctagactcagtaccgtgtgggacacggggataaggttatgaacaggtgtatgggcgccaagttataaccttggatattagtatgttttatgttatgcttttcttactgagtctgtcgactcacagtgctatttccatgtgtaggtaagggcaaagc

SEQ ID NO: 107858 - DNA, 741 bp, Cannabis sativa
tctctctctctctctctcaaccccttaggaaaaaccagcagaaaagctagggtttttagctgctcttttcttggtgtcttattagcagcaagattttagtgattctaatccaaggtaaaactcccaaactcttttctctttgttttcttaggttgtaagttaagcttgtggcttgttttcttaaattaggttactgtgcaaattgtttaagtttgttggagtttttttatgtttgtttggataaatttaatgagtttaagataaattgaatgcttgttgtggggtttgagcaaagtttgagctttagagctcaaacttttctctctcttggtgttttgtgtttttgagacttttgttcagttcttttgcatgtattatgttcttttagataaatataggtggtctggagagttatacacaatttggggttgaattaaggtgtttttggggatttttattgtacctgcactaaactggtcgaccggttcagtttggtactatagaaccgatctttcggttcctccccaagcaaccccacagaatcagttccagttggggcaatttatgtaccctagattttcatgtttttgcgatatttaaggtcttgccacattatcctatgatagggaaactcttacttttgattttaagtccccaaaaagtgatttagcatgtcactcatcagttttacaaataatttgacataggggcctgtaaatcgtctgttgggttttatgccct

SEQ ID NO: 107859 - DNA, 594 bp, Cannabis sativa
aaaaaatgctaactatcttttaaatttcatgttatttataaataaatattctataaaataaaaggataatttattatcgtttttctgattttataatttaataactatctcaaaccactcgcattgttattttcttctttgtcatccgcttggggataacttttctcgttcttcttatacttgttgaatttccctcgtttgattaattcttctatttcgtccagcaaaaaccaacattccagggtaatgtgaccaatatccttgtggtacttacaaatttttttcgggtctctcttatcgcggtttccccttattgggggaggctttttgaagattccgttcttttcttcaatggcatagatatggtcctgaggaaccgccaattgtgtgtaattgacaaaacgtggaccacttttcctcttgggagatgactccttcttcggaggggatttggccaacttcagacttcgctgtctttgcagactgcgtcttctagggctcctctccctggaacttttccttctaggactgcaggatcgtgatcgcggtactggagactcgtgtttatcctttactttctctagttcggctaga

SEQ ID NO: 107860 - DNA, 550 bp, Cannabis sativa
ttttcaactgaggttgtactttactttgaaattaaatttcgagacgaaatttctataaggaggggagaatgtaatacctcagtttgaccgagtcaaaaagtatatatatataatatatagtaaaaaaaaaaaaaaatagtgagaccccctttatcactcactccctcgtcctcttcttcactcactctctctttttcttctcttcaaaacacaaaaagaaaaaccctcaaaccaccaacacaaccacactccggcgacccacctccggccaccgaccaaccccacgcaccggacaaatcgaaagcccaagcgtcggcgacctcaccccctaagcggagccgctccttttgctgtcgttagcttgggatcccaagtcaaagtttgggggttcaaactttgaacggattttctggtcacctccggtgtctgtttgacaagctgtcttaaccactagactcagctcgtcaaggagaacaatctacactaagctatttcgcccagcttgctactttttccggtgacattttcatagcttcggcccttttcggtg

SEQ ID NO: 107861 - DNA, 661 bp, Cannabis sativa
tattacatttccccaccatgccttcattaaaacagattttgagagaagtagtaggtatacactgatgtactcacttgcataacaaatgtggagctttgaagctttagaggatatgatcaatgaattgctaactcagtttatcataaggccttaacaagatcaattattaagttaatttaatattatttgtgtcataaatactatatgtgcatacaataaataacccgacttggcgtttctattgtggtatttttgcaagcaggactcctcaaataaatgttttcatctcataaaaaaacatgttcattttgcatttttccttcttctcagcacttggaataatgtgaattctgtaataccaaaagttgggtggggaattggttgtttttgacgagggatttttattttggttgaataaaaagggatcacgtggtgcagattttttctttacctctttaatcaattttgagaatcacgtgtcaactataggaaccttatagttcagtctactttaattaggtcattggtagtcacctcaaaaattcccattacactcaagaattcccatcacacagatgtcaccacctccaacaagaaccaagtcttgcttgaatctctttaatctctttcaagaggagttagggtgaatttcgaaccttga

SEQ ID NO: 107862 - DNA, 613 bp, Cannabis sativa
tgcaagagattgtaaataccagtttagaagccaattagggcattcccaacactgccgtgccggccgtaacaaatgttcgagcaaccattggagatgacacagagatccagaacctccatgctactttgggaatcatgcaaggtcatactaacaccctcgtcttgatcaggaggaactccgtgctgcggtgaatctcacaattgaagaggaaatgcgcatattggagggataaagagatggaaagaatgagggttcagcaagcagccattgacgaccgaaccagaaggccactatgttgattcgaaaagcctattaggctaccagtcaacagcctacaaccgtcattcccctgggcaagacaaaccaagatcccgctgtgaacacctctcaaactctaaattgtcagccgtccaatcctcggtcacagtttccacctgtgagccaagtggtaggcgggaagactctatctagcaattcattaagagaagttatacctaaaaattccactcaagttaatggtgtcgccaaattgattggccaaaccaaccagccatagagacaaccgggtgtttctatatttaatcgattgggaacggttcatgatcttagagat

SEQ ID NO: 107863 - DNA, 871 bp, Cannabis sativa
  modified_base (693)..(699): a, c, t, g, unknown or other
tttcatatattcaaaattctcattccataaactttctactaatatttttcaatcaatgaaacgaaaagacaaactttaactcctgtatgaaaaatcgaactttcaataccaatgatcaatataaacaacatcaaattttaagttctcaaaatctataaatataactaaaaaaataaataatcaaataaaaacagatctcataaacacaaattcaaacattagaactccagtacaatactaaaactcaaacattaaaaacacacataataaaattcgaaacgagaacttaacaaacacaataaaattcgaaccaagaacttaaaacacacattagaataaaaatctatatatatataaaggagaagtatgagccggtgacatggcactctaaaaacactccaattaactctatttattctctcatttaaagtaataaaataatactctaaaatcactttttatctaatttttaatttttaattatttttatatataataattgaataattaataagaaatatatttatacaattcaaaaaaatttcaaactaagtaaaattaatactaatcgtatacatatatcattttttaattttttttttaatatttatctgttttttcctaattttttaaaaattattaatctatatatatttatatatttgattttaagtatctattctatataaagtnnnnnnntataactgaattcttggtttataagaaattcatgggtaactttttcttaaaataattttctattcaaaaataatattttttttattaagatgtattttaatattaattttaaaataaattaatattacttttaacagagactagagaaggttagcattattattatctaaat

SEQ ID NO: 107864 - DNA, 877 bp, Cannabis sativa
atgtcgggttagcctttcttttctgattagtggtggaatcaccaccatccctaccatagacaggagtaggaagagtgggggtcccaccaacactcggactcacacggggctcctgatgaaacttaactggaccctcaactcgaagagccttctcagccatctttgcataagatgtcacctcatttgtagtaatcaccaggtcatgtctaatttttacattcagccatgcgagatatttctctttcttgatgaagtctataagcacaatacccgaggctagcttgcccagacggtcaaactttgttgtgtactcagttactgacataccctcagtgtgcaccaactcagtgaattctttccacttagcactacagactgcctcattaaaatacttagcattgaacaaatctcagaactcttcccaagtcgttacagtgatgtctcgggtgagggacacaaattctcaccacacgagagcgtcttccaagaattgaaaagtggcgtaggtcacccgatcagttccaactacccccatgaaattcaaaattctttgtatcactgtgagccactactaatcctccatcacatttggacctcccaaaaacaccggaggtgcttgcttgtgaaacctctcatataacggctccatacggttgccatcaacaggttgttctgctggcactgctggaactacaacgacctgagcttgcagtagaggcattgtaggaggaccctgctgccttagtctcagaatttcttcatcttgctattagatactgttatccaaattttcgcaatctgacgtggcatcacataatggtgacacgtggaataaacttggagtatctactcagagggtacagtccaaaccagatac

SEQ ID NO: 107865 - DNA, 1019 bp, Cannabis sativa
ttatagttaaatttatttagtaaccattcataggtaatacccattaaaaagtgttctatatatatagtcattttagagctttaccaaattctatatgatgtatatataattatttaattaaaatatattttgaaatttttgttttgctatgtacacgatatgataagtacacttaacatatgcataaaaaattaatatattatataaatgagaaatatgaagcggtaatatagcggtctaaaaacaatagaaagtattatttcttttttctcatttttttctattcttttattaaaattaattattttaaataaataaaattccacaaaataaagaatatataagatttaattatatacatgtgatacttaaatttctttttcaataaaatctaattcctaaattttctctatttttatcttattttgaatttaattaaaaataaataaaattccacataataagaaatatatatacggtttaattatatacatgtgatattaaatttctttttcaataaaatctaattaatgaattttctttatttttatcttattttaaatattaaaaatagtaaaatattcttacgtattctcatttttttaatatcaattttctatacatatatatttatagaaaaaaaagttgaagataaaaaaaatagtagtgaagaaaccaaaaaatttcatgaagaagcttcaaacacatactttaaagaaaaatgtatcatttataatttcatgtgtaactaatttatttatttatttggatgattttagtctatatatctcaaattatatacctattaatttttataattctcgccttcaattctttccataaattatataaatctctctactacttcaattcttgatcatgagtattctttttaatcaagtttgtagaattagtaagtctagatatgattttattgatgagaaagttgtgataattttatacttatgtgtcatatattttttttcaattattactttttttatttgtcaatcatgcca

SEQ ID NO: 107866 - DNA, 670 bp, Cannabis sativa
gagaacattaacactttctcaagtaaattatatcgataaggtgctaaaaagattctcaatggagaatttcaagaaaggacagttattgtctagacattgaattactctatgtaaggatcaatgtccaaagactcctcaagaggaagaggacatgaaaaagtacccttatgcatctgtaggaaatcaagctagctgtaaattagttataaatttatatttattgtatttttcatttactctagtattactaggtgttcacattatattatatatactctttgtatatactaaaatatatcatcagacataaaaaaaataaaaacatttttctctcatttgcttcatggtatcagagcatttgaagcttctcaagcatattgtttttctcactccttcctttcttaaaattagggtttggaggcgttatcctagaagattaattaaaagtagttttctattctcacctttgacccagggagcttgtcccacctccgatcgacaaaacccaatagtctggcgtccaaactcaattccaaacaaacatctaattgttaaagaccgacaatgctcgtgacttcttcaattctgtacttggatcatatttgcaatccaatgggattgttcatcaaagttcttgcatagacacaccacaacaaaatggtgtggctga

SEQ ID NO: 107867 - DNA, 534 bp, Cannabis sativa
aggagacttggtcctttgaagagtaatgccaaacacgaagaacccagtgcatggggtcttcggggacaattgggaaggaccatatcttatcgcagaaagggttagtgacacaacataccgactcgcagaactcgatggtactgcgattcgaagggcctggaatggcgagagcttaaaattttattatcaatagtacttgtattgtatagtttatactcgctatgtatttatacttagtcattttttataaaaaaatcctaagtatgggggttttataccactatgtactattgattagtaaagttatgaaagttatgaaatttctcaagtttctgaaattttctaccttaatacttattacaccaagctgtagttaaggtcgcaatcaagatattataaatatagcaaaacgcgagtacccgtgtactgcgagaatgttatagatagatgcccccgagaggatataaagtcgtttaaaagaaacataaacgtaaatttgttcaagtacaaagcgcgagtacccttgtaccgcat

SEQ ID NO: 107868 - DNA, 994 bp, Cannabis sativa
  modified_base (139)..(139): a, c, t, g, unknown or other
tatgtcttatttatgaattttactaagcaatgacttaattgttaagaaaagagattttagagttatttgttaattcagagactttttggagtctaattaataaataatataaataataattttatttgataattaattntaattattaaataaataattttgtcatttacaggattaaaattagaaaatatggtatttgtgaaataatagataaatggttgaaaaatggcaaaagtataattagtggggcccatatatatggtcgaccactcaatcctaatttttgctattattttatttattttaattccatataattcaatcctaaccctacgtgaaatagtataaaaagaataggatggtctcattatccaataacttgatataacctggtttgtatttagtcagacaactagtgttttgggacctcaataataataaatccccatgccccatgtttccccagcccccagcattcttcaaaccaaaaggcatgactttataacaataaagctccatgttggttataaaatttgtatgctcttgatcagcgacatgcattttaatttggttatatccagaatatgcgtctatgaatgtcattagctcgtgtccagcagttgcatccaccaactgctggatcctttgtagtggaaaccaatcctatggacatgttttgtttaaatctgagaagtcaatagttctcccacttttgtttggttttgggacaaggagatgattagatatccacgagggatagaatacctcgcgtataaagtcgttagtcaacaacttatccacttcctacttgagtgccccttgtatttcagaatccaagagtcgtcttttttgtctcttggctgggtaatttgagtcgatatttaagtggtggcaaataactttagggtcaatccctatcatatctgaattgctccaggcgaactgatcctagtttgcctttacaaaactaattagttgctattttagtttttca

SEQ ID NO: 107869 - DNA, 571 bp, Cannabis sativa
ccagccagcacgtacgatcgtccttcccagcgagtacgtacgaccggtcatcctccccagcagccgcgttgaacgtcgtccgctcccagcagtcgccggtgtacgtcatccgctccgagaagtccccatcgcacgtcgtccatcccagcacgtcgcccgttcagcagtcgtccttgtggtcgtaggctccggaatgttcctggtcttttgaacgtctgagagtttctccggtggacctgcacactccggccatcccttcatggttgtccttgcacaccaacatatgtaggggttgaataagtcttttagcagagacgctttacaaataaaaaaagggaaaaagtcagcagtcggtaagttgtttcgcaggttaggtcttgtcgtatgacatggtttctttgtttcttttgttctatgttgttttgttaatgctcaggtgttaaggttgtgtggtgatagttcggaggtttctaagttgccaggtttcttaattgtcgggtttcgtggttgttggttctttgtgttttttagcgttgtggggcacttgtggtggcgttgttggttcaggttt

SEQ ID NO: 107870 - DNA, 688 bp, Cannabis sativa
aaatgtctttctcaattttcactttaattttggactctttggattaatgttgacaagattacatgttatttttattcaagttaattagtcaatgcctatacgtattataggtaggttgcatgtgttattgacaataaataacattttttatgtgtgtggatatatgaaatacttgcatcaaattaaatgaatttttttgaatggtatagtaaatataagaatcacttatgtcaataatatttatgtagccagttgcgtaaatgattcctcatgaaaaaacaagtagtgtacgatggttaatttaaaaaaaaaaatagtattttctcagctaaaaatgagtgaggtaaatgcattagtttatatagccaaaagactaagatacagaaaatcacaagggccattacgataacaacacgtgtaaagtttgttacaacaaatgaaaaaagaactgaattcaacatggcacataaataaaggaataaagtcgttaccaaatatcttggaaaatttggtaaaagactaagacccttagtccattttcttcatttcttacctccactccacaagcaataggatgattctatcagtccaaacttgtcgattagaaatttaaatctaccatgtgaaagtccttttgttaggcaaactgtaatttgatcgtgcaaaggagtgtattgaacatcaagtt

SEQ ID NO: 107871 - DNA, 574 bp, Cannabis sativa
cagatgatgatatgtttgacaaaagttgacttacaaaaattatatacaaattaattagtttgaaattttaatttttttcacttataatttaaaattttatgtaatataattgttagatccaaattaatgatgagggactattgttcagcgggaaaatatatagtaacaaaactaaataactatcaattgccatttaaaaaaaaaaattagtgtccaattttggccactaaataattatactccaaaactaaatatatattatataatgaacaattttgtagtaaataatgcaattttttttatttttctttaattaaaaattatttgaaaattacaaggagccttgagagagagagaaaaaattaagagtatatagtatggaatacgtacgtttttctttttttttttctttaaaggaacacatgagtatagtatacgtacaatgaattagttaatataaatttaaaatgggaaaaaaacaaaaaaatacaaaaaaggaaaaaaaattacaaaaatactttgggccggcccattaaacatttatacagtccacatacaaatatttataaaaata

SEQ ID NO: 107872 - DNA, 616 bp, Cannabis sativa
taatttaattttaaaatataattaatcttaagtaaaattttataagaaaataaattattatgtgaccatcaggttataagttaattattatttatttttatttaatttttaaattaatcacaattatttaatagtaatccaatagctaaaaaaatgtaattatgatggttatatatttgatgtaaccattaaaatctcctcctttaaattaaaaatcaataaactataatttcaaatcgatgttttcataattttaatattttaaaattatttaaaatatcaaaaattatttttaaaattctttaaaagcaaattatttttcttaaaaaaaatacataaactaaacaagaatataaaaaaacacgtgcaaaataaagcgttgctgttttttttttaaaaataaaataattatatacatttatataactaagtgactaaatcaatatatttatatttacatataactagttggaacaacacgtgcacacgtgctatgcacgtataattttaatgtaccatgtaatatacttaatagtaaaataaatttcacttagcatattcaatataaaatataattatcatgtggtcattagtatggcactcacacgataatgat

SEQ ID NO: 107873 - DNA, 672 bp, Cannabis sativa
ggccaggcagtgctataatgttgcttgcctgtgctgatggtccgtgagtgggttgaccaagagttgggggaagaagatgagttggatccccccgtgggatctgaaaaaggcgtagaacctatggaggacatcgaagaagtacgagtgtgcgacctcgaccctaccaagatcctccgcctggggaaaaacctagagccgatgtagaaaaacaagattattaaaacattaagggcgaccacagatgttttcgagtagtgccaaggagacatgaccgacataagcccgcatctgattacccatgtcctaaatgttagcccagatatgccgccaatacagcagaagcggcgcccccttgacccagtaaaagtggacgccctagaaaaagaagtagacaagctgctaaccaatggcctgatccgagatgtgtactacccggaatggctggccaatcttgtactggtgccaaagctgaatgggacatggcgggtatgtatagacttcactgacctcaacaaggcctgccctaaagactgcttccctttacctcggattgaccacatggtagatgccatctctcggttcaagctactgtctttcatggatgcctactccggctacaaccagattaagatgcatattgcagatcaagagtgcactagcttcatgaccgat

SEQ ID NO: 107874 - DNA, 842 bp, Cannabis sativa
  modified_base (469)..(473): a, c, t, g, unknown or other
ggccttccacccggatcggcacccaaaaccggacccaacctcaaaccctaaccgagaccgaaacacggacctaaacgtcgccccgaacccaaataagaactagaacccaaacacagacccaaaatcgaaccgaactcgtaccccgtgacttgaactacaaccaaaaccagaaggagatcgggaccgagaaacaagactagtactaggacctgaacccatacacaaaactgcaaccagaccaggacccggactcggacacagacccaccctatgattgggtcccaaacttgaatccaaacctgaactgggacttgggacccaaacccagacctgaactcaaacccaagcatggaacaggacttgtgaatcacaattaggatcgagacccaaaaatgcacccaagtctcggtcttagagctagaccaagacccatatcaggacctgggacatgaactgaaaccagactggnnnnngtgaatgggatccagatcttgtcctgggatctgggaaccggggcttggacaatacccatagtcagtgtcttgatcggggactcaaagaaggacccgaagctggagcaggacctggacccagacccaaacttgggacccaaaaccgaaacctgaaccaaaacgttatcaggaccatggaacatgatcgggatagtgaccaggatctggaccaagactgggacccaaaactagaccacaacctagcccctaaactcgtgctcgaactcagtccggacccagactaagattgagacttgaacctgaactcgaactcgaactcgggactcgatcctggacctagaccaagcccctaacctcaactgggattca

SEQ ID NO: 107875 - DNA, 891 bp, Cannabis sativa
taatgagttttatttaaagcacaaaatctcaacaaaaggcttatttaataattttaagctacttaaaatccagtttattggcattaaatatacaattagtagctctaagaatgcaaatacatactcttataatttattattagactgctaattatatatgtattttttgtctaaactcttatattaggctagattaacgttatgttgatgttatgtctgcaaattatttaaataaattgctagaatgcaattacaggggacatttgcaataatttttatagtttaaggagaatttttgcaacaaagaaaagtttaagggtcaaaactctactagagtcatagttcaggtggataaatcctataagagcatctccaatggtgcataatttcaccgaaatgatacttcacactatttcactccaatggcactccaatttatgcaccaaattctacaccattaatggtgttggactttgaatctacaccaatttggtataaaactttttctttacattctaacctattaagctttgttgtaaggtgtagtatttgttgagttagttacaatttctgttagagctagagttagttggttaggttgttaggttgttcttatctctttgaaccagtgtatataaatacactttgtattgctctattttgggttaatgaagtttgtaacaacttcttttcctctctctctttctcacttctttaaaactaaaatggtatcagagccaaccgattggtgagctctttcttccgcttattttcttctttgttctctctgcttccccatagctcgaggaggaggaactcaaactcgaagcaacagtaataatagagcagctttgaatgaaagtaactagtttcctactattgatccacgaa

SEQ ID NO: 107876 - DNA, 827 bp, Cannabis sativa
tactcaaagttttatgtttataagaggcataactcaatgtttatttttagcggcatatgtatcaaatgtttgtaatactgtaattttttttcaatttcgtctgtacagactttgtttttgaatttattaaaagaacatttggaagtaactgatactatatatttctatttagatccaataatcaagaatttaagtcttatatgtgtcctgtttaagacaataacagagtctgtcttgacaaaattagaaaaaaattacagttttacaaacattagatacttatgctactaaaaataaacatttaatttatgacacttacaaacataaaactttaagtacttatgcaactatttacccttttataaatatacaaaactacaaattttataattttgtggatatgtttttccgttatatttgaaaaatattgttttgatgtttgccactacagaaaagtaacctgatttgtttttaggcagcttgtttttataattataaagagtattttatattaccgttttttcaaaaaaaaaattattttgagtctttgaaattacttttaccgaaaatgtgaaagtaatattttttttttttatttttttttttcaaaaaaaatgaaaggcagttaaaacaaatcttataaaatataaataaaaaaattagtaaaaatattttaaaaaaaaatctgtaaaattgtaaaacagaattcaatttgaagtgtattgcgtaaattttctagtggaaatactattttggatcctgtgttttgtaaaagttaccgattggatcctgtattttattaaataacaaaatagaccctgtatttt

SEQ ID NO: 107877 - DNA, 557 bp, Cannabis sativa
gccccgatgggtccaaaaaaatggccacttttaattagtttcgatggggcccgattgagggtccgatttttgttccaacatgggttttgggacattaattttaatgggatccgatataggtccgattaggcccgatgggtggtccgattatcgttgaaatatggattttgataccattaattttgattggtccgatataggtccgattgggctcgatgggagtccgattattgttgaaatatggattttgatgccattaattttgatgggtctgatataggcccgattgggcccgatggtggtacgattattgttgaaatatgggttttaaagccattaatgtttatggctccgatataggcccgattgggcccgatggtgatctgatttgggctagatttattgcattttctagaatttgcaatatttttctatgagatttttgttttatattgtaattgtattttttttaatgtatgtgagaggttcaactgttaatgcatttgttatgtataatggtgtttgggagcttgagggtggagattgggtttataacc

SEQ ID NO: 107878 - DNA, 563 bp, Cannabis sativa
  modified_base (213)..(220): a, c, t, g, unknown or other
  modified_base (376)..(379): a, c, t, g, unknown or other
agaccactcaagatattttgtgacaataaatcagcagtgttgtattccaataacaatagaagctcatccaagtcaaagcatattgacatgatgatcctagttgtgaaagaaagagtgcagagtggacagatatccatagagcacattgggacaaactccatgatcgtggatccgctcacaaaacgattaccacccaaggtctttcatgggcannnnnnnnatatgggtgtagtattgcttgaggatatcatgatttagtaggattttgcattttctttgctttatgtttgtttaagacatttatgtatttggttattttctgatctctgttttgttatgtttaagtctgacctcactttagtttaaggaggaccannnngaaataggcatgttcagttcacattgcatgtaatttccatgctacacatttatgattgatttatgccatttggctatatttatatatgtgaccactgatgggtttagtcatgattgatatgacgaaaatcgctttgatcctatatgggtatagttaatgaatgagattgttgtgaataccttta

SEQ ID NO: 107879 - DNA, 524 bp, Cannabis sativa
aattcttttcttgaagtcggaggttaagcttctcccccaatcgccaagatgtttactgcatatgttgatcttttcttgaagtggcagatgcgtattcgagtcccaacaggattgaacaatttgagcacacataggttcccttgtccaggcattttcaaaacgaaagagatgaacaggaacagtcgaaatagcaggggcaggctcaagaaatataggtgtgtgatcagaagaagagacatcaccatttgtaaggattgcattcggaaatttgtcaagccagggatgagtgaccagtgccttgtcgagacgaatctcaacccagttttcagatcccttgccacgttcccaggtgtagggatgaccattaagctccatatccaccaaatcacaactttgtaaaacatgttgaaagccttctatgagcgaagaagggtaaggtctgcctcctcttttttcattttgattaccaacattatttatatcgcctatgatacaccaaggaagttgagattcagtagagagag

SEQ ID NO: 107880 - DNA, 536 bp, Cannabis sativa
tatccaaccggaatagcagggtatgtacccggagcccagctccagtgaactctaccaacagctactccaccaatgagcagcatacaattttctgctacttgggatataatcagaatcaggcattgactcttgcatcttctcattatgggaatccttctggggtaagtggacaagtcctgtctcactctgctcctactgcaagcctagcaggtccttctcaaggctctcggagcaagaggtcctcaaagggtagcaactggacagaagacaagcggcagaaaagggggtacactccctaatacacccagtacacggaacagacggactgccaagagcgtgtatacttcgtcaccaggcaaaatacacactaccggagacctcctcctctgtacagagacagctcccgaagggatcccaacaaaaggtgcgagtatcataacgacattggatacagcactaatgaatgcaaaaaccttaaagatgagattgaaaacttgattcgattgggtcatctttatgagtggataaagaaccgg

SEQ ID NO: 107881 - DNA, 1138 bp, Cannabis sativa
aagtatacgtatcgttttaacaagtaatactcaagtaagtgagattgttcccacgaggactgtagctaagtaccaatcaattgaattattgtttttatttgacaatcgaatagaaaaattgtgaaactaaataaactaataaaaaataaataaaataaacaaaaataagaggtttaacaatggatgtgaaattagggatatgatttcaattgtatctatctattatggtctaacatgattcaattcctattaccaaattctatgcaatagtaggtttacttaagtaatttatgtcttctcaaatgtataaatctcaattacatgcaaattttctattctcgtgataaattaaacatgtaaaagacattaaataaaaaaatcctataagttatccaaaccacatatgtaccctcgtcttatatcaaaatttgttcctacttcactatagcataattgatactcacttctcagatttcgtatcaaaattataaacaattaagtgatggtcagacaattagaagaaataagtatgaatggaataaaacacatagaaaattgggaaagaatcaaatcatattaaaaccataaatagatgacaaatcatatccatcaatgccctaataactatctagctactcatagccattgtgaacaattgataaaaactaattaagaacatgaaaaataaagtaaaagaaagaactcgtggaaaaaataattttgaaagtctccagagccgccttctgttgctaattttcgtactcctaaagttgtctgctaattaatagtttttgaatttattttagttttgaaaatcctcctaaaaacactaataataatatgtttatataggctaacaaagttacctaaaagatactaaaaagatttaaaatttaaactttaaaaaaaaaaaaaaatcgcaactctacttggaaagctttttttttcttgctatctttttatattttttagaaattttctattgggatgactaatagtattttggtcataactctctcgatattgctcaaaattggatgattcaatatgtttcagaaatctgaaagagagatctagaacttttatgttttgactttctccaaaatctgatcagaacatagtctaatttaggcttgaa

SEQ ID NO: 107882 - DNA, 1165 bp, Cannabis sativa
  modified_base (656)..(656): a, c, t, g, unknown or other
  modified_base (882)..(882): a, c, t, g, unknown or other
  modified_base (1092)..(1116): a, c, t, g, unknown or other
ttttagccaacgacaatgagcttaattgtgagcgataagtgatataatttagatgtaatatgataagataaataaagaacacagagtttttaaagaggttctgcctcgagtagttcgataatagcctacgccccttgatttgtattgacttaagaacaaagaacacaatgattcatctcttagagttcttacaataaaatctctgagcatcctctcttagataattctctcgaccaccttgcccagtgagaataaatcactatttatagggctatgtgcttgagggaaggtttcccttttatttacaatgactataataggtaagattacacattaaatatatagaatgcactgattgagggatttggacagctggccatatctctgtgatatgatcccagatttatagagattgcttctgtgattcacgatgcaagtgatgaagttgctaagtgtcgatatgctattcggattgtccactgctcggctaggaagaccttgtctgtgtaggtatatgtggtgttctgtttggcatctctccttcgggcagatatggggagtcgattccacgtgtcacaagcatgtgatgccatgttagagtgcaaaaattgggataacatcccgtttaggcaagagtcaaggtcattctatcttangagcttccactattgtttcataccttgtaagtctttctcttagcagccgttcttaggttggacgttactaagaataaaatacttacaaataatatttatctttcaagattctacgacgttaaatttctaatgaacattcatccaatagggaagattactcactaaaataaaaactatgtagaaccaacaatggagatcgaatgtccttataactaaagctcattantttaaagagttgtattttcttttaatactttttttaatctatttattttaatatatatatatatgtatatttgattaaaattaataatttagataactctaaatataaattttaatttaatatttataaaattataccctaggaagatttgaaaaataaaaatttattttccatcctcgctattcattttccaataaatattatgaaaannnnnnnnnnnnnnnnnnnnnnnnnttaattaaattaattttcaactcaaatttaattttttctaaatatatat

SEQ ID NO: 107883 - DNA, 670 bp, Cannabis sativa
tatggggccctccagagatcatagacactcttccattgggtctcgatggcaggccaggagtctggtgggggtctcccgagggagcgactggtgctaacgctccaagcgcaccccctggcgttccttagggcaaaggtcctcctaccggaaccgggttgagatggggcagccggttcttgatccactcatagagatgacccaatcaaatcaagttctcgatctcatccttaaggtttttgcattcattggtgatatgtccgatgtcattgtggtactcgcatcttttgttgggatcccttcgagagctatctctatacagaggaggcggtctccggtagtgcgtatttttcctggtggcgaaatacacacgttcttgggagtccgttagctctgtgtactgggtgtattggggagtatacccccttttctgtcgcttgtcctccgtccggttgctacctttcgaggacctcttgctccgggagcctttagaaggtccggctaggcttgcagcaggagcggagtgagacgggacctgttcgctcatccctaaaggattcccatagtgagaagatgcgggagccaatgctgtctctgattatatcctggggtagtggagaattgtataccgctcattggtggagtagctgaaggtagggttaccgagagttgg

SEQ ID NO: 107884 - DNA, 1261 bp, Cannabis sativa
  modified_base (149)..(153): a, c, t, g, unknown or other
  modified_base (1214)..(1231): a, c, t, g, unknown or other
gcataccttggtgcttgatcattagtcaagtcttgcaccaagcacctcattagggtggggaaacttttggtggttacctttcttcttataattctattcacatatgtatagagagctataatcatatattgtaacaccctactagtttnnnnntgttatcgtgattttatattaactatgcaacctgttgttaatcaacgggttagttgaaaatcgtgattaatcaaaactttacttaattacccttaaattgaaagtaaataatttctttataaaccgggtcccgtatttaaaattttaacaactgtaatacaaaatatttgatacaaaagttgtcgcctaatgactactcaaaatacaacttgatgtcccaaagatcgtacgctctaggtctaacttccccaacatgtacaatctttatctgctcgcactcactattattcaaccttagctttgcccttacctacacatgtaaacagtaactgtgagtcaacagactcagtaagaagagtataaatatatcataaacataaactaaattataattaggcacccatacacccaatcgtaaccctatctcgtgtcccacgcatactgagtctaaaacattcgtacgacagtactattgaccataatatcagcctatactcgctactctagtcgtaccgatgtgatagtgttaatgagtacttatgccaatcatacattcattggtatccaatataactctatatataccggtaccgctatttcaatgtaacctaataggcaatcataaacatgcatactaaacatgtaatcacatatgcaaataattatactaatcttacctagtttcctgattcaagtgtgtcggtcaacctgaatgaaaattcacgtgctgaacagaggccctatgtcacaatgtaaaatggataagtgtttactctaaaacactactctaatgcccgaatagatactagggttattctactgaactataaagtgaaaagacccttataaaaaaaatacatagttcgcctctaacttatatcccatatggtaaagcttatcacaagctttaaaacggtatatagaatgtccaaaacagacatccgagtgtaaagttgtggccaaaatacaaaaattgattccttggtaaagtcccattatggaagctcctccggtcatggaagttctccgatcatggaagtgttgaaaatattttaccaggnnnnnnnnnnnnnnnnnngtatgtttcattaacatcctattatgaatt

SEQ ID NO: 107885 - DNA, 637 bp, Cannabis sativa
ggaaaagctactggaaaagtcgacagcaccggaaaagttagtgtcgctgtaaaagtcaccggaaaaatcaccggaaaagtcactttcgtcaaaaagtcactggaaaagtcacaagaagtaaatgtctcagatatgactaaaaatataaccggttctgtaaataaaaactaataactcaaactggttataattgaaatataaccggttctataacataataaataaaaataaataacataaaaataactcaaattagttataattaaaatagaaccggttccataacagtgttataatgaataaaaaccaataacacgaaataactcaaaaattggttataactaaaatagaaccgattatataacataatgaatacaaacaagtaacacataataattcaaaccgattacaattaaaaaataaagtgaaaatcagttcctaaaaccctaaaacataaattaaaaacaaaactagttctataataaaacacctcataacacataatacctcataaaactaattataattttttttagaaaaaatagagatcaatttcagaaaatattgaggcataaatatgaaaagaactagttccataacaaaataaataaatacaaataatagcatacaataactc

SEQ ID NO: 107886 - DNA, 723 bp, Cannabis sativa
  modified_base (661)..(683): a, c, t, g, unknown or other
ggtcatgtgttgagaacgagaattaaactttataagatctaacctcctgttgttcctcagtagctcagtggtagagtggtcgactgttagcggattgctcgtaggtttgaatcctacttggggagatttgattcattccgaattctttaattcagaatgaaacgattcactttgaccgttaagagagtaggtaacccgttccctgtgtctttgtttctattgcattctatctcatcgtatcacatagtgttcagcgatatttgagaatcgccatcaatccctcgacgtaggtctgagatataataacaaaaacaacctacccatataacaaaaatggatcaagtgaggacactaaagtctggcttgggcatggactaggcacaaacaattcgtgcttatagaccatgatgggcttgaaaacatgggtcatgctggacatattattatataggacgtgttgagcttttattataaaataaaattttgtaaatacaagtcaagtctatctacacttaacttctcataatatttaaaaaaaaattatataaaaattaacaaaattaaaatttcatacaatttttatgtttagttatcattttataaaatatctaatttattttaggctgattaggaattttacctcctgaactttgacatgtannnnnnnnnnnnnnnnnnnnnnntaaggtcgttaaaaatgcctcctgaactattgagattgtt

SEQ ID NO: 107887 - DNA, 533 bp, Cannabis sativa
  modified_base (491)..(507): a, c, t, g, unknown or other
aaatttagtatacgtgccttgcacgtagctttttgctagtatatatatatattttgttaaaaaaaatataaccataatcaaaagcaatttcttaggttttatttataatttattaatagaaaagtaaccgaacattcaatttaaacaaaattcaatatatctacttacatgttattataaaaatatctcttaattaatgaaactaattgatatcttaaagttgaacattatataattaattttattataaaattttcaatttaagtaacaatatgttgcatttttgtttaagatacttttaagttattttttttaataatattaaaattaccttcaaaatctatttgagaataaaaaaaagcaacatcatcatccccaagaaagattatcataatcaaaagctacattttagtttcttttatatcttattaagtgataaaacaactaaattttaaaatatacaaaattttatatagggtaaataccatttnnnnnnnnnnnnnnnnnaaaagttacagattggaccctgtgtt

SEQ ID NO: 107888 - DNA, 733 bp, Cannabis sativa
gatcttttaggacccatctcactcaaattttctaacactcaagattttttaaaaatttcggcagcacttccccttaaaaatccacttcccaggaattaacccaatcacaaacaaaccaaatcctaatcacaacaactatattgaacaatgcaaaaaatccaaaattctccaacaatccacaaatttttcaataaaaattgtatagagagtcttagaattattacctcaatgaaaatccacctttagtcaacctccattgtaggaaaacttgaagttcttgagaaggaagaagatgaataggggtttttgaaattttgggtgaggttttggggatttgggatggattttgagaggaaaagaatgattgatgaagggaataatggtttagaaggatttgggatgaagatttatggttagatttgaatgagaaaggttttgaatgggatttgaagaagaaaaatggtgtagaagaggggtattcggcgtggaggtggttagggttgagaaaaggttgagttttgaaatgtttggaatttttgccttttaaatcccgtgtgactcctctcgccgcggccaaatatagcctcgccgcggccagatatcacgaaaaaacatacctctctgtaactcttatatggccgcagcggcactacccctcgtcgcggccagataacctcgaaaaataggccattctgtaaggcccatctagccgcggcggcactacatctggccg

SEQ ID NO: 107889 - DNA, 1157 bp, Cannabis sativa
atccaccttcatctcgcgttcgcccgtcatgggtatgagtttgggttgatttgctatgcccgcgggtccttgactttgatccacttggatttgtactcgaaccaatatatatcttgtgacttttcttgcattagccttctccttcggaaaagattcgacacacgacccctactcgagcaagtgtgtgaactatctctattgttacaattaggcctttgtagatgccttaggttcaacttgtcccatgctaatttccaccattttcttgcatcatgctccaaaatttcttggtttctaggtcgtgtctgcctggtatttgtattcatgcaagaagactctggcacatcaggtttttcattccattattttgcaaatccatgggaagttcatagattatcattttgagtctcttgatttcttgtgtttctaggattttatgggttttctccttccattgggatatctttcacatttctaggttgttcttcctgagtgtttgagggatttccttaattattcccttgtctcgtggttttagaaccttgaggcgtcccacttggtcgtcttgtagatggattaggtcgattttgaggggccactccttatgtagcccttgctgtcgtcacttcgcactctaactcggcattcctccagtttgatttagctaggtgttgctaaagttaccaatttgccagttccatcaatggaacgtatctagttggatcataagcatccttacttcacctttctggaatctatatattcaccagtttgattaaaatctctaatgtttcttcaaggatggggagtttcaacagcgttagttctttgcgaagcctaaggctcctttcccggacggtgggctgtcttttcttgctgattctcttcattacgccgagtatcgctgccatgagtacaaatttagagttgtatttttgaggagggtatttttctaagttttattacaaatgctctcaatgaaagaaataaattgttaacacatatttttgttaactaaaatattagcctttttataataaataaattgcagaattgattatatagcaattaattatctaataaataataaataacaaaaaagaagattggtcgtcccttttaccctgggttttgtccctatttatagatgcacgggg

SEQ ID NO: 107890 - DNA, 726 bp, Cannabis sativa
  modified_base (416)..(420): a, c, t, g, unknown or other
atttcgtgggtgtaagagcccaatggaggcttgaagcggggacgttataacgaaagctttcaaggaagcgatatggcttcacataatactctatgaattaatacaaatcaaaggaggagtgactatgtattcagatagccaatcatccatctatttttaaaagaatccaatttatcatgaaaagagttagcatatagatataagactctataggattagatagaagatagaagaagggctggttgatttagataaggtcagaactgaagataatcttactgatattgggactaaattcttaaccttaaacaagttcaagcattgcttgaactacttgatcaatctcaaaagttagtatactgagattcttggaacaccaaccaatgatggctgcattctttcttcatcatcgtcannnnnttaatttgaagtaactaggtggaatttgtggtataatcctctaaataaaaagtctctgtaaacgtcatttttggaaagttgttcactcgcggttgccagtcttagaaggagtcttgtagaatgatagtctggatgactatcatgtccactccaagttcagtcttcaggatagctagccttctcttgaaaagaagttccagctagctaattgtcactcctagagtgttagatctggatagtcgactccagtagactcaatcctattcggaagcgtcttcagtgagtgtccttggtccgtgagttcga

SEQ ID NO: 107891 - DNA, 689 bp, Cannabis sativa
tggttacattttgaattatggttgtgtttattttgttgtgactgcaatttataaccaaaaaaataccatatcttgaaatagtcacttgctagttcaatcttagagttttatattgcttctgaatgtaacctgatactttacagttgaataagactgtgtttgttgtgttggaaagaaacatgttattttaaatttcttataaagtaacttgttaaattgatttttattttttctttttgtttcaggaagtgacctggtacttgtaattttcttggagaatgaattttattaaagcattaattcattatagaggagagtagaatgaaagttaactactactcaaattacaaagtaactggtgtacatattctagaaaattgttcattattacagaaaaggctaaattgctatgagttttgttctgcttactacaaaactaaaacaatgaaagcaacttatgcagaaacagtttatcctttgccacatgaggatgaatggagtctaccagaagaattggacatacttgtcctacctccaaaaggaaaaactcctcctggtagaccaaggaggagaagaataagagcacggggagagccaaaagtggttatgaagtgtggacgatgtgacaaatcaggtcataataggaaacatgtagaaacccaccgatggagaagccacacaacccaaca

SEQ ID NO: 107892 - DNA, 544 bp, Cannabis sativa
  modified_base (207)..(207): a, c, t, g, unknown or other
ctgatggaacctggggtttcatcccagcttccgcgtcatgacttgggcatgccgcggcccacctgtgagttttttgacagttttaagtttgaactttgaaaattcataacttttgtttccgaacttcgatttgggagttctttatatcattgggaagctcattccgagctctttatgattatttgaatttgtgtgactaggattacnggcacctgatcaggagcacccgagaattcggaatctctgtcagttgtgggacaacaagtaagatagtgattagcacatagagtattcgtagtggcgcttatattgaaaatgatatgtatgattgtttggtaaccgggattagggttattaccctaatatgagcggttgatgaactagggttattaccctagtgatatatgtgtataaatgccatgccatgttaaatgtaatgagatttacgaattatgcactcaaggcataatcaggttggactcggtaaccataaccgagatgaactattctaaggccttattgtatttagacgtgtgagagaaac

SEQ ID NO: 107893 - DNA, 627 bp, Cannabis sativa
cccgaactcaaacacccacacctagaatcagacaaaaagcaagagtcggaccctgacccaactcgaacccagaccaggatcagaacaaaggacttagacccagaactgaatccagactcagatcgggattggaactttggagtccgacccaacctaggcacagacccaggacgcgaacccacacctggcgcctgatctggaactagactgaaataaggacccgaaccaaaactcagaccaggactcgaactctgacccgaacgcaaacccaaactcgaactcagaatcacaaatggaccgagaaccgaactaggactaggaccatgacctaaacccaaacccgaacctagatcaaaacccaaacagagacctaaatccgaaccgagactaggactcgaacccgaacatagaccgggaccaaaacccacacaataattaggacctagacccataattaggataggaacctgggaaagagaactaggaccgggacctagtacccgacccagaccttaacttgaacctattacccagctcgtgacccgacaccagaaatcgaatgagactgggacccgagatcgggatctgaatctggacctatggcttggacaaaacccgtagtcggtg

SEQ ID NO: 107894 - DNA, 903 bp, Cannabis sativa
  modified_base (608)..(611): a, c, t, g, unknown or other
tatgccttcctatagcgagatggaaatcttgctattcattgtttagactcaaccagttgttacgcttagtttgtataatgtatattatatgctaagtgttctaacagtcaacatgtctcatcgctatcttcttatacgtagctaggttgatgccccgcctggtattatttctgccacccttatgattgtttcttctgatgtgaaatggtttctcgtcaatgcatgagttaataggttgtacatctttgtctctcttaaggctttacagtcagcgagttataaatatactctgtcaaccctgcatttaatgagttattctattttaatatcctttaatataattgtcattatattcgttgattcgtattctcctaggttgacacgtgtcctcctctaaagtgtcagccgaatttcaggtataataatagttatagaagctatattccatatctataattaacgctcttatgggtaagcttgtgatgaacaagtcaaagaacttgttattattattttatataatataatatttagattaactacttaagtgtgaaaaattattaattttgtcaaattgtaacatacattgtggagttacaaaatgtgtnnnnaatgatcacaaaataggagttgcaaatcctttaatttgatgatcacttgaatatgtaactctcatctctttttcactctcaaataagtaaaaaaaaatgtaattaattgtttatgaatgtgaatgaatgataggtatcgaaaatatagctgttggagacttaatttgttcatttataaggggtatatatggttcaaaatcatgtggaagtgatttggaacactttggagaagaattggccaaaactaaaaaaaaatgataactagtaactagttactgtttttttcagcata

SEQ ID NO: 107895 - DNA, 626 bp, Cannabis sativa
ttcaaacacaatgtgtgcctataaaataacaaactaactagtttattttttttctaggttgagacatcaaatctggttgtatacaaagtacatgactgtaacatatcttatagacttacataataaacctggataacaatatatgaacttgacaaaaatttaaatatagtgagatgtcttgctcacataaaatgtcttgctcataaggttattttgcatatatggctatactatgtctatactcatacattagtttattttggcaaattaaaataaattttcattaattgtttacatggtagtatttttgtatagctatactatcgtatatgttaataaatctattggtttattttggtatattgaaacaaatttttatttttcttttcgtatattagaacaataatttattttattttatatagcctaccattatatatgtcaataaacctactattgtttgttggaacattattttatatttttcaatacagagtaaactataatcaaacatagtgatatacaccaataaacctattaatctatttttcgtatattggaataataattcattttttcaaacacatatcatcatgcatgcttataaaataacaaattaattagtc

SEQ ID NO: 107896 - DNA, 679 bp, Cannabis sativa
  modified_base (131)..(138): a, c, t, g, unknown or other
aattagaataattttcagagtatattttattttattttaattataattttttcatgtaaatttcagaatacatttatttcaaatgtagatattttgataattctcctttttaaaaattagattaaagttgnnnnnnnnttttagatcaacttaaatcaagtatttttcattaatgattagttaaaataaatagactaaaatatattatatttcaattagaaaattaataattagtttatgaatatctagatagttattttctgagtagacttctagtatttttccagatatataattaattaaatagaacattaatatttaagttgatttgttcaagacacttaaatatttaatatttttcgtaagagatttaattaaatagaaaaattatatttgtgataaaaattaattaattaattttagatcaacataaattaaaataattttttccagatttattttattttaaaagaattcaaaaatgtatttttcttaaaattcattgaattttgaatttaatcagagatatatatttatagaaaattaaatttagttaaattaagtatttttcataatatttattgaaaattaatactaagtgttaacgcagattttcgttaactatattaaagcctaaattgtgatgaatttgtttagaaaataatagaagtaaagaaaa

SEQ ID NO: 107897 - DNA, 1344 bp, Cannabis sativa
tttagaattcatatcaggatgttaatgaaacatacttggtagtaaatctagatcatggtgaaatatttccaacataggccattttcctaaacaaataatacaagactaagtctacgttattataggggacagtagggctcagggagaaccatctccgaacaagaaccagagaactcgacctggtatgttgactcggtaggatgcccctcgacaatccttgtagcagagacctcattccttgcagcggagacctcattccctgcagcacagacctcattccatgcagctgagaacctcattcccagcctcgggaaatttatcagcatcaatgataagctggtctgaggatttcctcatgtaggcatttttctggtccttttaggttctttagtagaatccgcgacctcatcagcttgggttaccttcttcctggatctcttgtcggcttggggaggacctatgaacatgctctcaaaatctacgtccattcctgcggaggcaaaggtaaaaggtcaatgaagtaacaatgacgttgaataaaaacattgggttcgcaaatgaaaaaaaaaatgggttcagaccaggccacaatttgcaaagaatgatgctttccttcagaaatctcttataagaattacctataacaactaacagtttcttcttggcttgacttaatcggatgatcttaaatcccggaatcattcacttccaacttggactaaggtttggaatttttgggtgagtatgatatgaaccttaaatgttgaaccaaatgaagtaatgaagcctaaggcagatcatcacctcagtaaaatcaaagaaagaatgaggtacttactgtgtaaagtcgagaggtgggcctgagcaaagtcacaagaagagtatcaaagatggaaatggaggaaactaggttcttaccattttatactttgaacccagtaacggtaaggtcacaagatggaagatttaacggctaggagtgaagaagaagtggaaagggtggattattaatacaaataatgaccctcgaaaccataaagccgccaaaattaaggacatgcgtgattttgaaaaagggttgtgacaaaataccctttataatcatttaaaaagcacttttttattaaaaagaactttttaaggggcaattgttatatccgaaattcggctaccacttcagaggaggacatgtgtcaaactaggaagaatacgaatcaacaaatgtaatggtaattatatttgaaaatggaataactcattaatgcgaaagtgacaaagtatatttaaaacttgctgactataaggtcttacgcgagataaagattgttggaattattttaccag

SEQ ID NO: 107898 - DNA, 924 bp, Cannabis sativa
aatatactaataagaaaataacatatggatataatggcttaacatttaacggttaggtacttaacatttagccttcactttatttttatatacatagaaaattttacacaatattttcttaaattttattttttaaattactatattgtattttcttctattagcattctatataatcaagcattataattttattattaaaaaacatagtttattctaaaatagtaaaattacatatgctatttaaaaatcaaaatacataatttaaaataaaattaaatattaggttgcacctaacataaatctagtatttttaacaaatatatctatctacacctaattacaaaaccatattcataaataaccgataataataggtggcttctggtaattacaactaatattaatgtgtatttatttactaattttaccatgaaatattagaaaaccctttttcttgttctaaattaaaagtagttagattaaatatattaattattacagtataacatgtaataagcccattatcgttttgtcaagataatcacacaaagatttaaatttctaatatggacaagaaaaaagctcaagagcaaaccaaagtaagttaatcatttctcatttcaaattactattatatattattttatgaaatgtaagtacgtacacacatttttttttattaattattatgtattacattatataataataactgaatatcttctaattcatataaatgtaatgattcagaaagtagttgcagaattctcagtctcaatgtattgtaatgcatgtgaaagaaccgttgccaaaactatctccaaatttaaaggtgataaaaattttaccatatcattattcttcttcttttttaaaatatatatgattattaatttgattattattattatatataggtgt

SEQ ID NO: 107899 - DNA, 665 bp, Cannabis sativa
ccataaactatcaccaccaagaacaaaaaacaagaccaaaaaatacaaaaaataaaaataaaatcttgaacaaacccacaaaaaacttgagggtctctcctacatttcagggaacgaaacccatttcattcgccccctcaaacctccaagccgtaatgtagacatgaaagccaaacccccaaaaattagaatctcacatataacaaactccaaaagaactagatttatacaaatccgaaagcacgaaatgagatctaggtctattacaccatgaaaccagagaagaagttctataaacataaaaagaaaatgaacaagaagagggaaaaatcgaaaacatttgaggttctgatatttaggggaaacaaagagacagttgtggggagagagctaaggttcggcgacgacagcgagggagactctcctaggttgagctctgacagcgggagggtgatatttggaaacacaaagggatactacaaaaaatctaacttttagtcacaataaaacttgggactaaaagtgaaaaatttgtaactgattataaattattattcttattttgttactaaaaggttcgtagctataggtattagtcacaaaaattacaatttgttgtgactaaatgtattttcagtcactatacttgttgtgactaaaactaa

SEQ ID NO: 107900 - DNA, 562 bp, Cannabis sativa
  modified_base (346)..(356): a, c, t, g, unknown or other
attcaaaaaggggcacacgtgactagatgtcatcactctaggagtcacattgcaactcccattttgcaaaattacaaaaaaggacttaaggataaatattgcctagaatttcacccaaaatacgtgatagtgcaggaatatgccatgtggcagtaggacccacgggtgtgagatgtatccccctaattactcctgaagtaaagtaatgatagattaatcatctctgagagtatctggctagtctgggagcaaccctcctctgacattctccgtgtgtaacaccctaatgctaaggcacgctacagtgtttttcttaattaaagtgcaatctttgctaatcaaagannnnnnnnnnnaaacgtgtcaaattaaaaattttgtattaattaataaattttataatataataaaaaatttacaagtgtcgggatcccgtctttaaacttttttaaacttagtatcctaaaatacataatttataggtcgctcggcgactacaaaatataactcccagatgtcccgagaccgaacactccaggtcacgccgctttgacatgtacaa

SEQ ID NO: 107901 - DNA, 577 bp, Cannabis sativa
tccggttctgaactgggaaccaaaaatccgacccccacacctcaatttaatcccaaactttacaataacttccagaatacctgtacacactaatataaatcaatcccaagtaaaaagattcaataacatacccaaaatccatacatgccattagagctccaacttgagctcttaactccaaatgactcaaatatcaaaataaacccttagcttatcacaaacaagcagtaatcaacacaatttaacttcagaaaacacattcaaatcatccttaaacaaacagccaccaaaacccccaatttaacaaaacaacttcaacctagtcttaaaaaaaacaataagagaaagctaagaaggattaccttagattggaacctttagaacccaactagaattcttgataacagctgaaaattcatagcgcttgctgcctaggaaaaatcgagagagagagagagagagaaggaggttgaggaaaagtgaaggttcttctttctattctagcatattctcattttctcaagaaaataaaagagtaaatctcttttcttaatattaatatccttaaaaccatagg

SEQ ID NO: 107902 - DNA, 594 bp, Cannabis sativa
cataaaacccaacagttagtacaatagaagaaaagaaaaacatcaaagttcaactgcatagcatggagcatcagccaactactgattccccatccttctttggagcatttcgagtggaggtaacttctccatcttcctggtctaagaacacagatattctccttgaatactctatgtcattttgaactgaggtcacttcttatgaaattatctgagacaatatgacagttgtactttaagcatcctcatcatcctactcaagtgtcaatgtctaagattcatcaggatagctagtgttagggttgttcatcaaactgctaaaactgctcaaaccgcctgcattgcaccgcaaaaaaatgcagtttaaaattctttacggtgcagtcgcggtttgaatttttcctaaatcgcacagtgtagtgcggtttacaattttgaaatgttaatatgcgattcaaaccacactgcaccgcacattataaaaatacaaatgtttatatttatttaggtccaacatgtgaaggttcatcccaaagttcattaattattgtattattgaaacttatttttttttcatatttattttcaaacctt

SEQ ID NO: 107903 - DNA, 735 bp, Cannabis sativa
gttagtcaagaagtaacactagtagttaattcattactggaataacaccaaaaaatgtatagaattttccataggctgaataattatctagtagccttccatgccactttaacattcaatctcactcgtagagttaggaattccagataggtttttatacttctccaaaaaacactgctccactcccagagtaatcaccatctcataagtagactttctagcattaacataggtctagaaaactgatttggtgtagtctaagagtattaaaatatcacccttatcaactaacatacaattcctattttgatgttaagatttatttgattatcttccaatgttcatttcctggattaaactgatagctactcataactctcactcaacagcaggtgtctggtctaatgcataccaaagcttacatgagacctcttactgttgattcttaaggaattcttttatgacttttatcttttctagaatagttgaaacttttccttagataaataaaatctagacactaggagtcaaagacttcctatagagttagccattagaaaaattctccaagatcttactaaagtaagttgtttgcactagagtaagtaaaataccaggtataccataaaccataggtttatattatctcaaacctataatattatgattaggaacttttgttaagtctattgaatagacttattttgaaattttcatttcttgtccttgtaatag

SEQ ID NO: 107904 - DNA, 683 bp, Cannabis sativa
tatctagaataaaatcaacttaattattaattctaatttattataaaaaaatattttaatttaagttggtccaaaattaatttcaacttaagtatattttctaatttaattaaaaatcatgaaatagaaataaataattaagtatcttgaatcaaatcaacttaattataaattctaattaagttatatgaaaaatatcctaatttaagttgctctaaaattaattaattttcagcttaaatatatttttctacttaattaaatatcagaaaatataaattagttactagaaatcacaatatagaatcttttctataaactaaatgtgtttttctaaattaattttaaaataatctattgaaaaattaatttcatttattgcaaaattaactatgttgctaattcaattttaattaggttaaaactagtataattagcctaatacaattatttaaataagacaaattcataattggggttgttcatgtgagggagggctgggtttagtatgtcgtacccactactaatggtccactaactctcacacaaggcccaaagaagagggatttaacctttcgttaaataattgttattcattgaataaacccaatactaatgggaaatttacatgatgtactaacttttctctatttattacaaaaatactgtgacacgctgacatt

SEQ ID NO: 107905 - DNA, 587 bp, Cannabis sativa
atatatgattttattatatatatacttatgtattaatattaaacatatatataatatatttttaataattttttttagcaaaatgtttcaaccattacaccaaaagtaatgaaactcaaaaaggaaagagggagaatgcattactcatcaactagtaataagttttgaatacaatttagaaattccgaccactaaatagtactagacgccgtaagagcgacttagctacgtgtaggcaacaacattaaaatttctaaaacaatataaaaaacaaatagctttaaaactattacaaagattacaccgatttcatccaatacaagacccaaagaggaaattagaaaaactttggttcaccagtacttttgtacaatattcaagcaatccatttcaaagataatattatcatacccaaagaaatgacattggaccattgcattttgaaacgccaaagcctatgccacttcaggatgaatacaactttttaggcaccaaacaacagaagcaagaatagtacccaacactataagaaatgtcacttttgccagcacattgttgtgctggcaaaatgaaatctagttttgatg

SEQ ID NO: 107906 - DNA, 895 bp, Cannabis sativa
cacaataatttctgtatattttgtaaatatcaagaaaaacccactcttagcattttggtcgatggcccatctccgggcaaatggcggaagtagcagtttaaggtgaattgggaagggtttctttttctatttgctgaataaagttaggctattttcattcaactacaaataacaatatataaatatatattaaatatagatatttccagggaagaaatcacaaaggggttttttcgaatctggtttttgggtttcaagttttgattctgggtctgaatcaggaagacaaagaaagggttttcttcttttattttttgatgtaaaggaaagattttcttttcggattctgaataatctctctgaactcagattttttcaaatctggtttttgggtttcgttattttatcgctggcaaagcataggctgtggatgcatcccagtttgcttttgcgttgcttttaattttgaaatagtgattggttttttaattggattttgttccttgtcacttattgatattttttccttatttctgtgttttgtgtggttaattatgcattgtgattttgaagctaattcataataagaaggaccaagaagtctagttctggagaatgaagaaagtggtggtaccccagttatgggtaaaaagattgatatgtcagatccttatcggtttaacagaaaatccgattatgtggtgagtttcgtttttttgatttaaaatctccttttggttagatattcatatgtgataggagttttagaaatgtttccgaatccaaaactttaactttcataactttatggttggtaaggccccatttttcataggcggtggatagttttaacatagaataattttctctctagtttcttattgtttgtgtcata

SEQ ID NO: 107907 - DNA, 813 bp, Cannabis sativa
ttttttcagtagttttttatggtcttttttttttcttttcaaaatcaatttatatgtgtattaattataattggtaagcccaattgttggttgtttttactttcttgccattgtagatgtcttcattaacgtttttgttttttgggggcttgctttatgatgttgctttgagaaatagaatgggttttattttagtggtaggagactatttggaggacttatacatattagattagcattttgtttggtgagagggaaagaaatgaggaaggagggaaaaggaaaacttaggtgttgatgcaattttttgtaattgatttaagaagatcgtacaaaataagaggattgcgatgaatttatttgactaaataaaaccgttataaataatatatacaccagagatttataatagttcactctcatgttgcgatagtaatagggctacgtctattgttgtttttattaattagattcgacacgtcagagttatattctcaagagtgtggacaataatacgaaaatagatttctaggtgaaatttttatcgagatatatgaacacaagtcccatgggagacttaatattcacaaatttgataaagatggtgtgatgcggtttttcgtcaactgatctaagatcgtaaaaataaaaaggaccacggtgaattaatttgactaacaaaatcgcaataaattaaattgacagtaagaatttatattagttcacccccatgttgcgatgaaaatggggttatgtctacttttatttttattgattagattcgacacagtagagttatgtttttaagagtgt

SEQ ID NO: 107908 - DNA, 1032 bp, Cannabis sativa
ccgctggttataaccattcaactcgccaataagaggatcaagagagtgtttaatagacaatgggagctcgataaatattatttataaggaaattctaaagaaaatggggctagaaaaggccaagttaaggccttgtatggtgaatctctgcggattcaccggggatagcatcgctagccttggcataattaagcttgcattaattgtaggcgagacacctttaactgctactgtgatgcaagacttcttggttgtcgatttgccttcggcttacaacatattgttgggtcgtccagcactgatcggactaggggcagtcaactcgattatgcacctttctttgaagttctaaacaccagatggcgtgggagtaggggtggacatatgatccaatctaatattttttcctcaaccgatccaattcaattagtaattgaatttggaaaatcatcagccgattcaatccaattagacctcaaaattcaatccaatcaaatctaattactaaatggattgtatctttttttttagttggatatccaattacaacttaaatttcaatattaacttaaaaatatgaagaaaatacgaaaaaactaagtattactttttatttaagtttaataattcataaatatactattcttacaagtgtaatgtagccaaaagttttaaataattaaaacaacaatatttctaagtaatgaaatagaacaaaacatcatatgaaaataaatacacaaaacaatcaagtgttacaaattcaatatacaaaaaaaaatctaataaaataataatatatctatattatatttttcaattttttttattatataaataattttttaatacatataaatgtaattggattggatcgatttttaattggattttgagattgacatccaataaccaatccaatctaattagaatccaacttttggcatccaatccaatttaattgtaattggatttctaactttttataattagattaaattggatcgatttaattggattggattggatgat

SEQ ID NO: 107909 - DNA, 1309 bp, Cannabis sativa
tacaagttttgtccattaaggtaaattttgaattaatatataattttatataattaaagatgttgtggctactccctaattaaggaaataaaatgaataaaatataaataaaacgtaagtaattttgtggtttgacataagaaaacatgaatctgggacaagtgatcatataaataaatgcacaattatacaaattagcataatttttacatgcctaaataaatcatgtaattaattactaaattgaacaaatttccactttcaatttatactaaatatatgtattaaacaaaaataaaaaaaaattgactaaatgcaatttatggactaaattaacacagaataggaaaataattaatattccaaataaataaaaaatttataaataaatttggaatttttcattttttttttgaaaaattacactgcctaaacgacatgtcgtttttgcaaaacgcaaaacgacacttcattttccaattatgaagggctgataatgcatgtaaaaaaatgacacgtcgttttccttaaggggaaaaataacacatcgtttaacatcctgaagggctgcccacaacgacaaaaaacgacatgtcgtttgagcaaacgatagcagccagggaacttggaaaacgacatgttgtttttccacagagtgaaaaagacacgtcgtttgggtcgtcttcttcagccaacccgggtcattttgacccgtttttctgcacgtggtccgacggacccgacccaaacccgatcaaaaaaagttctctaatgacgaaatcacatgtttttaaccccgaattgatccaaataaaaaaaagagatcaaagtgagttttatacatctaaaacacgtaaatgtcaactttaatttcaattaaaaattgagtcctcacggtatatacatatatatatgaacgtatacaatatatatgaatgtgaatgaatgtatacaatatatatatatatatgaacgtatacaatatatatatatgaatgaatgtatacaatatatatatatgaacgtgaataaatgtatacaatatatatattaaacgtaaaatgaaatatatatatatacgtaaataaaaaagaaaatatatatacgtatgaaaatatatatatataatatgaatgtatatatatacacgaacatgaacgaaaaataaatatatatatatatgaacatgtatacacgaatatatatatgaaactcaaagtaaatcaaggcagagattaaaccactctgataccaattgttagactatattatatagtatatgtaatatagcatatatataaacgatatg

SEQ ID NO: 107910 - DNA, 672 bp, Cannabis sativa
tgattatattaagcgtaatttattaattacaaagattatattgggatatgtgagtatcgaggataccatttttaaaataaaaatatttttttcgggcccagcaactgtggaaatttgacaatgtggtcagaaatgtcacaacattaatgcatggattattttgaagatattccggactagtttagaattttagaatgtcggtttggtggattaataaaattaccataatgcctctaggttattttaaattttaaattttgtatgaggggtagtagattagtcattatattatataggtattttgactttagtcttgtgggttgaccattaaattaaaaaagaaaaaaaaaaccttatatatttttgagttaacttagaagctaaggcaccaagcttcttcttctcttcttccccttcgtgcaagccaaaccagccaaccttgaggattttcttcagccttttcccttcatttcaaagctgattcttgccccaagtcaacctagaagagctttgaggtaagttcttaacctttttggattgaaaactttaggttttaagttggttttgaggtagggttttgtaattctgtggctgtatgaattaaactaagattggggtatctttagggtaagtttttgcgtatgttggagatggttttaagtggtttctatg

SEQ ID NO: 107911 - DNA, 1112 bp, Cannabis sativa
gggtggtcaacatgtgaacccaccacaagctccttcagattgggagtaaagattcgtgaaaatgcaagatcatatctgccagtaggatgaagaaattctgagactaaggcagcagggtcctcttgcagtacctccaccgcaagctcaggccgttgtagttccagcggtgccagcagaacaacttgttgctagcaaccgtacggagtcgttacatgagaggttccgtaagcaagcacctctggtgttcttgggaggtccagatgtgatgaaggctgagcagtggctcatagtgatagaaagaattctgaatttcatgggggtatttggaaatgatcgggtgacctgcgccacatttcagtgccaggaagacgccctcgtgtggtgggaattggtgtccctcacccgagacatcagtgttatgacctaggaagaagtttgagatttgttcaacgccaagtattacaatgaggcagtccacagtgctaagcgaaaaaaattcactgagttggtgcagactgagggtatgtcggtaactgagtacacaacaaagtttgaccgtctggccaaggtagcgtgcctacagacttcaagaagaaagagaaatgtttggcaggtatgaatttaaaaattaggcatgacgtggtggttactacaaatgaggcaacatcatatgcggagatggttgaaaaagctctacgagccgagggtgcagtaaagtctcttcaagagccccgagtgactccgagtgttggtgggacccccactcttcctactcatgtttatggtagggatggtggtgattccaccactgattagaagagaaaggctaacccgacatctggtgcctcaggacagagtaagcgattccgtgggaaccaaggcagaggtagacactagagttattcttaccctgagtgcccacgttgtaagaaacatcatcccagagagtgaaactggaagacatgctttcagtgcggcatggtggggcatttcaagaaagattgccttcagacaaagaaagaaagagaaaaagtcagaggcaaaacccgcacctgctcgggtgtttaccatcactcaagctgatgctccagccagtccttctgttgtgacag

SEQ ID NO: 107912 - DNA, 828 bp, Cannabis sativa
aaaaaaaaaaaaaaacctactttttaatgtagttatttaaagggtaaatactattttagaccttgtgttttgtaaaagtcaccgattagaccctctattttgttaaatgacaaaatggatcctgtattttccaaaatagtaaaaataggacccctttcctttattgtcaatattccttgagtgcgattggaccctgtatttggctgttgttttagcactgtctctcttgtcgcactttgtgtttatgtagatatagatgtagactttgtcttctcttaggttgtagccttgaagttccttagcattccctgaactacgttttagcgaaggtggtcttgatcttctcctcaacttcactgtggaggaggccttcgtcaacttcttagctttacagtgtaggaggcatttttcatctcctcagctttatagtggaggaggccttcttcgtctcctcggctttacagcaaaggagacctttaacatcgcctcgacttgacaataaaggaggtcttcttcatctcatcagctttacaatatagtaggccttcaacatctccttgactttatagcagaggaggccttcatagtctcttaactttatagcggatgaagttttcatcatctcctcagctttacactggaggaggtcttcttggcgactgtcaacgaagtgttgtagcagtcgctggctattctttagtcaattaaggatgtgaccaactcctaaattaatatacctaatatgggggtgatgtcttccccgtcccaggtgcaccttagagtgattccaggtgcggtctctattttgtccttggtcttaaacttaga

SEQ ID NO: 107913 - DNA, 656 bp, Cannabis sativa
acacgaacccagacttgaactcagacccgaacatggaacaagactagggacccagaattgggattgaggcccggaactgcacccaagtcttagtcctggaactagaatgagacctagaccgggacatggaaaatgaaccgaaacaagattgggacccgtgattgggattcagagaaggacccgaagctggacttggacaagacccatagtcgatgtcttgatctaggactcaaagaaggacctgaagctagactaggacctggactcagagaaggacccgaagctggactaggacctggacccagactcagacctaagacacgaaaccgaaacttgtactagaacgtggccaagaccctaaaaggcttgggtcgtggccaagacctagaccttgaccgggacctgaaactataccagaacccagccccgaaactcgggctcggacatagacccagacctataactagacccgatcccgaacccagactaggattgcgaatcgaacttgaacccgaacacaaactcgagacttcatcccagacccaaaccaatcccctaacctaaattttgattcagaccatgacatggacacgaacctagacttggacccgaataccgacccagacccagatctagaccgggatcgaaacacggga

SEQ ID NO: 107914 - DNA, 550 bp, Cannabis sativa
tttttatttgttgtttttgtgtatttgtgaactaatccctatatagtacctgtattttcttaaaaaatatatttggtactttagatttttaataatacttatttgatactttatattttaaaattgtacatatttagtatcctaaaataaaatttaattaatacaattttatcaatatgaccaaacagttcttgcttatatgtaatcaaataattacatttgaatttagattcataaaattgaagacaatttgattgtattgatataaatttaacaaataaatttaagtttagggtaccaaatatgtttgatttttaaatacaaattgtcaaataagcattattaaaaacacaagatatcaaatctgtatttacatgaaacacaaaataccgacagtatagccattataatatgtgcaatctactttaattattataccgatgctgatattatatctaaaaaaagtaaaaatatctatcttttattacaaatatatcaactaccctatctacgttatagttatttaagacatcttacaaaatttggagaa

SEQ ID NO: 107915 - DNA, 898 bp, Cannabis sativa
acaattaatagaatcaatcctgactttgactttgactttcctataacggattgaatgttggttccctttaagtgatgctgatggtggttcaagcaatcaaaagcaacattcagatgccatctgagtttgggatacttgttcatgattgtcgtgttttgttgtcttccttaatgtgtctttatattttgttaaacggtctgcaaacaagactgctcattgtgtggctagagggtcttattttttgtcagattgtactattagtgagcatgatgctcctgatgatttgatctctattgtacttgctgaaagtatttgaataaacaatcatcttttactcaaaaaaaaatggcactaaaggataaagaagtaattagaaaggtaaaataatattttgaccaaaactaattatgaaccaacacatggagggctaatcactggaaatgattatatcaatggacactgcagttaaactcagtaaatataattttataattactaatagtgtaattctatatttatagtggagtaatcatgaaattaataaacaaaggattatttggttgatgagtgtaatgccctaataattaggcacgctacgctaaccgattatgaaaccataatcccctaatctaggattactaaaaggataagcgcgaaaaatttaaactttatttgaaacagaataaaaattaaacttgtaacaactttaaactttacaaccaaaagatacatgtttcgggatcccgtaaatattttcacaaaatattacaagttcatttcacgaaccgacctaagcagcaaaataagagttacaaaatacatcactggtagatcccaacccgcttggtcttggtagtgtgttatttcagtcttcaaagtagatgtttggccgagttca

SEQ ID NO: 107916 - DNA, 722 bp, Cannabis sativa
ataatatccacattctgtgtcttccggttgatgtggacactaaagatttttttttttaaaattactaaaaatcttaataaaatataattaaaatttaaaataaagaatgtcttgatttgataattaaagcatcctgcatattaatttatgaattaattaaaattaaaataagtagcttctctacaaagtatagatgacaaataaaccaattgtgtcacctaatcggcctaatcatgaaatacaagcatccttcatatttgtttgtatatgtgcacacacatacacacacatgtggaatagaaaatgatgaaccataatgttaggcctcaatatatgctcacacaacaaatcagttagagagttagtacagtttaaattcctatacggctggttgtattgctagttagttagaaattttttattcttttcagttagtggctgtgtctatataaaggctagtcctatattcccagaggtatcagttagaatatgtgttaaagaaagtgaaatactttctacagagaataccaaactatctcgaaaagttgggaactttgtaactctttctttgatattgataaaatgcctattttctaattctttttgagagctgaatgggaacaataatgtatcacataagcataagaaacaaaacataattctaacttatggacataaataatagttcaacatcaattaatagaatagaaacttagtgcatg

SEQ ID NO: 107917 - DNA, 726 bp, Cannabis sativa
ttatttttttaatttagaaccaaatgtagcccttgttcccaaaaggttcgagacacattttgaaacgccaaaattaaaagtggggtaaaatatttcagcacatcttttatcccattttttattttcttatgtataaaaagtgggataaaaagtcccttttcttgtaatgaactaagccaaaagaagtccaaagcctcacaggtaaagtcaccgctctaaatcgctttatatcgcgatcttctgataagtgcaaagattttttcagatcttaaaaggcaataagaagttccaatgcaccgaaaaatgcgaggaggcttttcaagccttaaagacacatttggggcaacctctaatcctatcaaaatgcatgaccggcgaagtcttatccatttacttagcagtatcagaatatgcaattagttcagtactaatatgcgaggatcaaggacgacaatacccagtgtactatttcagtaaacaattactggatcctgagacacgctatcctcaaatggaaaaattggcgttcgccctggtaatatcgtcgagaaaattgcgaccttatttccaggctcacactatcgaagttttagcaaactaccctttgaggcaagtcttagcaaaaccaaaaatgtcggagaggttgttgaaatgggcaatggagttaagccaattcgacatcaaatataagccaagaattgcgatcaaggggcaagccttggcaga

SEQ ID NO: 107918 - DNA, 547 bp, Cannabis sativa
gacatttgcaaaaacacggtttttcagagttattacattctgaatcatgagtcattgaactatcacataaggatcccaccatgtccattaagcgattaatctctcctgaaagtgattgtagaagtgatagtagtttctcctctttttcagttggtcaaggtgagtttgggtaataaggtgggtattggtgactccaaccctaacgtgatggatcccaatgccaatcgtaatcaaaatctaccatattattcaataaatttattatatcatagcctctcattaatagaggtgctccagttacctctgctccataatcaacccagcttcttatttcatcatgtacattataaaagagccacgtaaaacatccacttgagaaagtgggataacatctctctacaagctctttaaatctcctccaagaagaatagaatagctcattataatgttggacaaaatcctcaagatatatcatctggatttaccttgcaggtcaagctcatcaataaaacattagtaaaaaaaactaaattagtactaaaaaata

SEQ ID NO: 107919 - DNA, 921 bp, Cannabis sativa
tggtatataattttattactacggtatattaattttctgtactacgatatatctaatactgttgtatatataatttagccattcattagtcaccaatgctctatcaagcctttcttcgatccactcgctgctgtttctccctttctcccaggtgtacgggtatccgactagaggcaaagccaacaaattgcagtcatccaatgccctggtaaaacctttaattagtcggtcagggtatttcctcccccctttcttttcaagatgagaccccaagttattcatgtctcccataagacaccaagggaggttgctgtcgtttttgagagagcgaaaaaggtccaaagtctggaaccgaagctccctttttggttctccgtagactcctgtgaatcgccaaggagaaaaccccaacatctgaactgtggcgtcgatatggttaaaggagaaaccttggattacaacttcactcgcatccttccataacaaagctaggccgccactgtgcccacgtgcatccaccacaaaacaaccttcaaagcccaaatgggctctaatactttccatactagtcttattgcataaagtttcacaaagaaataaaaagttgggcttcttttgggacacaaggtccaataagaattgtttggcccgcgggttcccaagcccacggcaattccaacttaagcaactcatggttctgggtgggcctggaaaccagaacccaccaaagatccattttttggaagccccacaacaccttgctccatatcatctattatatcagaaaattcattctcccgtggtcccacaaaatttcccaaattggaatctggctttcttctttttgagtcaaccattgtagtaatggtagaatcaaagaaattcccattactattaacatttaaagtcaaatcttcatca

SEQ ID NO: 107920 - DNA, 2029 bp, Cannabis sativa
  modified_base (212)..(219): a, c, t, g, unknown or other
taagtttcacatgaaactctatcggtctctctctctgcgcaccgcctcctcccttcaacttctttatgcgtttttaaaccctaaatatatctcataaacatcccatatatagtcccaaactctaatattaacctagatcaatttttttaaaaaaaaataatataacacatatataaaatagttaccatattccataataataataataatannnnnnnnaataataataataataacaaactaaataatatgctacaatatatttacccatattattattattattaatatgcctataatattattcacttataattaaatattaaattatcttaaataatttaattatttatctaacattatacacaccctcaaaataaaaaaataaaagaaattttattgtcactaaaaaaaatctcatactccactaaacttaaaaatattcaaaattataaattatctccattagcaaacaaaataaagtaagtattttttttaaaaaaatattaattacccttcaagaaaagcggatattacaatgtgggtgcacgtgtgcatgatgaggcctcaacctcgctgcgtgaaagagaaacgataacaataaaaatgcttagcgtatattacacaatgcacaaactaagtgtcgatagtttggcgagtccagataacagatagtgaggcgtttatctcgcaggaggacgtcgtgcatttaaggaagatcatctcaaaaccagaaaatatagttatcagagttaaaacaatattagtctcgagaagtcagatgacaaacaactgctcgccatccaagttaacttggctccattctcaattagacatccctatgggataaggtttgtcgtatatctttaattacgcgttcatctcggcccaataaaagcgggatactcacaactgtgtgaattataaaagcctaatttacctagcttgatttgtaatcaaatcccatggttgagggaatcattaccgtaacgatttgggtcaacttttgtaaattcactactacaaaatacactattcacgtcggtcaatgctactattcatagcgttgaccgatgtgaatagtactcaaataattgactctttactaatagtatgttatttgcgtcttttattaaatgacgctaaaacataaatcgatgggaataaagcaaaaattttaaaaattacttttcattatgcgtctgttattaacactcgactattgtgttagcgaggttttaaaaatgacgcaaaatacaataatgagagatagtaaccgacgcaacaaaaagtaaaatccttaaaacctaattaggttcctactgttcacacatgaattttctcaccctcaactcttcgaatttctctggggaattcaaaggcggctcctccatcctctttaaaaccaaacccttacccattgctctttcttcttcatattcttcttcttcttcttttagagagagagaacctctgatagagggatgggaaactgttttgttacgtgcgtcagccaggcgagcataggcatcgtggagagatggggtcgtttcgagaggttggccgatccgatcactccctcaagatccgattccgactgtcttccttaggccctccgcccacggctctgactgtctccttgaactcccccggccatatgaatcccccagtgcccttaccctatccctgttctctcaacctccaagtcctcacaagcacgaacaaaaaaccactcacggtcatacccacacactgtagactacgatctctgccctccctctgtaaaactctcttagcttctatgtggtgattgaggttagtcatgctaaattgttttttcctaattatatatatgtatattgtgcatttgttggttccatttttctatctgtttcttttttgttggatttttgatttcttattttctaccattaacaaaaattgacaaccaaaaactgatcattgtgacatcttggatttcttatttcttatttctaacgttgtcgaagcaaatgaagagaagaattgg

SEQ ID NO: 107921 - DNA, 595 bp, Cannabis sativa
  modified_base (26)..(32): a, c, t, g, unknown or other
tgcacgtgtgactattttattttatnnnnnnntaaaatagactatttgaacattgttttctttattgtaaattattttgaatttctcaaaattttataggatacctcaaatagctataacgtaaatgaatatgaaaaaaaatagactaaaatttttttctgtatgccgaaacaagtagagggtgcatcagtacatttcttttaacgaagtgcattatagaatcaccctataatttttattaatttgttaaatcaactaactaaaaagacaatacttaaattcaacaagaccatcaccgctttgaacacattgaacacatagtttaataaaaaaaaataaaaaataaaaagattgtttagagacaaggcagacccacattttaaggagagggcgaaatgtatatatgtattttaattaattataatatgtatttataatagaagatagtatttataaatataatagcaagttttatgtaatagtatagttagattacatatatgttagaggtcaaatgatcaatatccactaacaacacttttttttctttttcagtttacttttgcctttcttgctttacaaaaaaaaaaaaaaa

SEQ ID NO: 107922 - DNA, 1151 bp, Cannabis sativa
ggctcgggtgctctattgtgcaagaaagggtacgtcggtagttgaccagccatgagatatcgagggcttttgcggtgccttgtacatgttcagactaagctagaccacgagggttgtaatctccacgagggggaactgttgtaatctccacttttgccacttaggtcggcgtgtactaatgacttgtaatattttgaaaatattttacgggatcccaacttaaaatgtactttttttggatgtattttaaagtgtatttattacaatttattattttattttgtattttaaagtttaatttttgctcttggttatagtatatctcgaattagtgggatcaatatatgtttagactcagcacgtggcattctttattgtaagggtgttacaattttgtatcggagcgccaaattttttaaacttcctgtagattggccgaacatgtacaattatcaccaaagacaagctcgactcgtggtgcaataaatattgagagtaaatgcttaacttcttctgtgattaaatgtttgctgctttttgttataggtagcatataagcatctaaaagatataatgttataaaaaaagcatgattattaattatgttaataattgtgttttaaaaattgtatagtatgtttgagttagggttaaggcaataagtgtgattatttaaagtttcgttgatttgattttgcacttttagttgtaattttcctatatacacatatattttaatatttagttcatcaattgtaaaaataatacaaaaatatggagaatgaattttagtgcgtataagaaaacaggttggtctattaaagagaaataggtcgacccgagtaaagtatgatacaaattcaagcacaacataaaattattggacttgcgggtcataacgagcctaccctataaaattattgcataatacattatgactcatatttttttatagcacggcacaacacggcacgactcatatttttttatagcccaaaacatcacgacccatattttaaaaaattcaaaaaatatataccaaactagcatgataattctaaaaaaacaaacacattatatagtatccttttatatatactaggtgaggttggcacgtgcaaatacacgtgtttggctctttttattctatt

SEQ ID NO: 107923 - DNA, 534 bp, Cannabis sativa
ttgaactcgaggatcaagatcttcatttttcttctcgtgttctcctgccaagatcgtcatcagttgatgaccggccttcctatgctatagctctatgcaataacaattgcgagccagcatctagtcgccacgcaccacccccacgccttttggggtttggaactttaaagacaagtgcttgatcaagctgattgcccctagtccgataagtgttgggcgacccagcaatatgttgtaagccgagggcaggtcgacaaccaagaattcttgcataacagtagcagttaaaggtgcctcgcctacggtcaatgcgagctcaattatgccaaggttggcgatgctatctccgatgaatctgtagagattcaccatacaaggccttaacttggccttttttagccccattttcttaacaatctccttataaatgatatttatcgagctcccattatcgattaacactgtcatgatcctcttattggcgagttggatggttattattttaaatatttaaataataattatcctaattat

SEQ ID NO: 107924 - DNA, 510 bp, Cannabis sativa
acaccctcatatccccttggtcttcgtagaggaaattcacctagatttttctccaatttcttgtgcacatgttcccttgtaagagttgtcttataatccttatatcgttttcttgcttgttgcaagaattgctttttatgttggggttctaatttaaacgtactctgcaaattaagaaattgtcaaacatatatataaaaaattagcaattagaaaaaaaaaaatcaagaagcacatgtaccttcattgtttcccatatttggatcttatcttcttttgggaccttaaaccaattttcatgaagaatttatacaattctacgaacagtagacccaagcatggatgcaaaactcaccctgcccttcccgaccagttgacctttttcattatactcaacgggtattagatgtccctcactcctacatctatttatgtctggcaaccaggatggtcctctaccagctggtatgtcattttggtcctccagttcatctatatctatattctcat

SEQ ID NO: 107925 - DNA, 609 bp, Cannabis sativa
  modified_base (511)..(531): a, c, t, g, unknown or other
tatttttgcaattaaaaattttagaccgtaaattaaattataaataaaacataaaagaagggtatttttaaatattcccctatttttttttccttattttacatttgtccattggaacacatttataaatagtgggtcaaatatagcacaaacttattttttgtgccaaacttaacacaaattttagatctttctattagagatgggagatgcaaaatctatatatagcacaaaaaatagttttgtgatatttttgtattaatttttacaattgtgctgcaatacataattgtaaattttgatgtaaaatttaatatgtcacatttaatgttcatctaataatttatggaaaagataaagtaataataagggtaaataccattttggaccttgtgttttgtaaaagttaccaattggatcatctgttttattaaatgacaaaacgaaccctatattttccaaaatagtaaaaatgagaccacgaggccaattttcaacaattttatttttnnnnnnnnnnnnnnnnnnnnnaatttctaacacgaacagatacataaaatgtaaccagttttttcataacatctctatatcagattattattaagtttt

SEQ ID NO: 107926 - DNA, 966 bp, Cannabis sativa
tgattgcgtatacttgcgtagtgattataaatttaacaacagtccatggttcgtagatcgctagcttgaaacactgtcaagaggagtgataaaatttgatatgaaagttcggaaaaaaaattattttgaattgtcaaaatagtaattatttatttttcaaattaattaaattgagaaaagacaaaagttttcaggataaaagacacatctcttgtcttaaccaagataagagagtcaccacatgcactgtgtccagacacagtgcatgcgccactattgtaggatgtctccactgattttgtctttggattgattaattaattaattaattcaatagatacgtatttgaatttaaaaagttgttgagatattctcaagtggttgagagatttcttcaattagttatagaatattaatatctttaacaaaatttgattatattatttattcaaataatcaaatattatataataaatgattttgaataatttaataaaaaaatttattggatttatttaatataccacataaactaaattcaacaaaagaatttgtacgtaacttttctaaaagcctgaaaggattaattagtaaatatttttctgtccatcactacaacaagattgttgttgctcatgtgttgagaatacaagaagttcatatacactattatcctactagcctacactagaacttatgtgtggtaaaagatttggaagatgaaggcgtgagtttttgtcattatcgttctgtgaatacaacatacgaaaaaactcaagaataccctgataggcttcgagaggtaaatattttttttttatctatttacttttattttaatatatatacataggacacttctatgatagagacacttgttttgtccttatgggtagtgacattttattgtaccttgattattgatccaacggtgataagaggttggagaatatgatagtaaagata

SEQ ID NO: 107927 - DNA, 566 bp, Cannabis sativa
tttatcctaaaacactgcttaacagttgcaaaggacaacctaatgtttcctaccaaatcccgtagttcaaatacactaacataaaactcatatttgggctctaaaacatggtagatttcatttcaagcttcgaaatagtatatagaacgtccaaaacggacacccgagtgaaaatttattataaaagtacgattcctaagttctcgaggctgccagaaatagtaaactggttggccataaccagctgactggttccaaaatcggtggaccgattttcaggggtaaaaaatgtgtttttctaggtttacgcactcaccgaaatactactagaacctgtctaaaccaccccaaacttcatagggcacatatatactataaatactaccatatttacgcaatagaaactaaaatcgagcccttgattagcaaacgtcactaatatctggacttaagctatgaaaagttctaaactcaatttctaatccaaaattacttcaatttcaactaaaaaacatcagaactagtcccaagactacccgagaacaatcctataaggccagaacctt

SEQ ID NO: 107928 - DNA, 747 bp, Cannabis sativa
  modified_base (693)..(703): a, c, t, g, unknown or other
gtgagtactacgaatggttgagtgccactcactagaaccttagcttgtactagattcagtgagttctttacgagaatagtgactccggtacaccacagctaacttgattacatactatgtgtcacgggacccataaacatcgccagtgatagtgtgagtactatgaatggttgagtgtcactcagtagaaccctagcttgtactggattcagtgagttctttacgagaatagtgactcccgtaatctacatttgtagaatatcgagaaagtggttttaatttcattactgtaatcctcaggaattattataattaacacacttgttgtcatatgattaaaagaaataaacatacaaattgcaaactcaattaatagagaaaaagtattgtatagtgtgtttattaatttgggccgacatgtatatttggacataacataaaatataagaaagttcattccattccattacaccaaactaaaccggttgtatttgtgtttattcatgtggggacacatgtttatgtgttgtacttttaacttttcatagagttgacataaaatattattttaatttgattggactgcttgtgattgacaatacttgttgtatataagtatagtgcaccaaagactttcaaggaaaatatttaaatgaagcgcgaaattgttggaaaatattttaccaggatctnnnnnnnnnnncaagtatgtttcattaacagcctaatatgaattctaaaataatg

SEQ ID NO: 107929 - DNA, 632 bp, Cannabis sativa
tgttaacacagtagtgttaatctccttgagaatctgacctgagtgcaagaaagaaaaaactgattcactaatgtcatctccaagtaattcctacttatcttggaaaaaacaactagtaaagccatctggtccaggagctttgattactggaattgcaaacatagctttcttgacttcatcttcggagaattctttaaataaaaaatcagcttgtgcattggagactagtggctcgagcttcatgaccccagaattgaccttcttcttgttttccattttagaaccaagcaattggtgataaaatgaaataaaggcttcagaaatcttcccaagatcatcagttctcactccttgctgatcttcaatagacagaatgctgtttagtttcctcctctccttgatactagcatggaaaatggtcgtattttcatcaccatctttaatccaactgagtttgaatttctggtgcaaaaaagaattcagaccctttaacagcagcccatatttatgtctagtagccacttcttgctcaataaaattttgatttaaaggctcaacttgcagcttcttctgaacctctaataaccctttttttgctaactccgtagcctcttgaatattagaaaaacact

SEQ ID NO: 107930 - DNA, 999 bp, Cannabis sativa
  modified_base (634)..(654): a, c, t, g, unknown or other
  modified_base (938)..(955): a, c, t, g, unknown or other
ccagtttcttcgtgatttttccagtgacaatgccaatttcgacgaatttcccagagtttactgtcggtactgaaaaagtcactagagtagctgccggtgtattagtcgcgagagttgctaccaacgctagaaaagtcatcagaaaaatcaccaaaaaaattaccaagaaactagtttcttggtaattagtttcttggtaatttttccatcaactatgccaattctgatgacttttccaaagtttgctgtcggtgccgaaaaagtcgctggagtagctgctagcttcagaaaagtcgttagaattggcattgtcaacggaaaaatcagctagaaactggtttcttggtgattgtttcagtgattttttccggcgaaaatgccaatttcgaataattttctagcgccggcagcaactctgacaacttttcggcatcgactgttactccgacaactttttcgacaccgacaacaaattccggtgacttttccgatatcaatgacaaataaaactttctaaacaaataaaaatattaaatatgggatttgaaaacttaatcacatatatatggcatatcaaatacaataaaaagacctaaaaacaaaaaaaataacatataaattggtcaaacttaannnnnnnnnnnnnnnnnnnnnaacttttaaaatcccatagtaagtgtaatttcctctaaatgaaatatcacctttgatagttttatttaggcccaattggtattgggcttatccaatgaataataattatttaatttaaggttaaattcctctcctttcggtcttgtgtgagaattagggggccattagttgtgggtacgacatactaaactcagccatctctcacatgaacaaccccaattatgaaggctcatttcccttatttaaatgattgtattatactaattatactagtttaacctaannnnnnnnnnnnnnnnnncataattaattttgaaataaatggaattaatttttcattagatt

SEQ ID NO: 107931 - DNA, 625 bp, Cannabis sativa
  modified_base (599)..(599): a, c, t, g, unknown or other
ggcttattctgtgttgctcccttttttttttttttatctccttggtttctgaaagaataggtcacatgctcctgctttaggttctgaccctacagctcctctaagaattctggagatcagtggtcttccgtctcagcagaaaaagtgagttgtttcttttaagtttattttctgttgttttttaggtgctaaactgtttttcctttttctgtttttttagtgactgcggagcatatgtggctgcaattgtcgagttctttatccatggaaaagatgttcctgcggattttgacttcgaagtttatcatactcgatttgctgcccttttcttctcatatggccaaaggaaaattgatgaaagcattgatagcgaggatgagaagcaaagcaagtcttctaatgcttctaaattgaaaaagtagggtcttttaatttagtgagaatttggtgttattagttgaatctattatcagacaatagttagtgattttatgtttctaggtattatatttggttttatactctggatttagttttaaacttttcggatatttgacattaatccttataatatgtttattctatatgtttgtatcagnagaagttgtatgtttttctaattgtt

SEQ ID NO: 107932 - DNA, 1007 bp, Cannabis sativa
  modified_base (928)..(932): a, c, t, g, unknown or other
aggttgaaggagatctaaaatgacgtgtcgttttttatttttatggcagccaccgtttatgtaaaacgacgtgttgtttttcacactctggaaaatgaccgtgacgttttttttcattgtgggtcgtcgtcgttcatatattgtttaatcagtcttctcctcatgtaaaacgatgtgtcgttttgcctatagcaaaaacgacatgtcatttaaggcagtaatttttttttttcaaaagaaagaaggaaaattaagaaaaatttaaggaaatttcgaaaatttataattttaatttattttagaattttattttatttcctcatttttgttaatttagtcaattaaattacatttgtttaaatttttcatttttaattaacacatactttcatatatgttatttagtaagaaataattatgaaatttttttaattttggtattaattacatgctttatttttacatgtaattataataattgtaatattttaagaatgtgaatatttgaatattctacaattaagtgtgcaattattatatttatttaccaattgattgaattaattgataatctgtcattaagtatatattcttggattttgcatttaattcatttttatataattaaattgtactaatttaaatatttatcttatttatacaaatttattattagtacaaatatttaagatattatatggttgtaaatgcataattaattatatattatgaaatttacatttaattaattgtcatacaataattatattaatttgtatttgtttgacaagtttattattagtacaattaatttagattcgtatgatttaaatattatacacaaatttcatatatagtgctagatatatttagaaatatatattaaaatattttatttagtatattaagtttcataaaacttcataannnnnttcataaaatattcataaaaatattcctaaaatgaataaaacataagtaagtttgtggtttgacataagaaaaca

SEQ ID NO: 107933 - DNA, 725 bp, Cannabis sativa
ccgccaaatctccggtcactggttccgcctgtgggccaagtagtaggtgggaagaccttgtctagtaattcatcgggagaagtcatacccggtaattccaaccaggttaatggtgccagtcagcatattaaccaaaccaaccaatcactgagacagccaggcgcttctgtattcgaaaggttggggatgactcatgatctcaaaaacgatctaaataggatcgaggagaggcgtggacgattaacttgacacgccgatcgtatagctcggaacccatgctcaaattcccgcttagaaagatactgacgtggctcagattggccaaaatgtcgagcaggttagtccagctgtgcaggcataactagaacaactaaagaatatgttccaaggcatggtcagtcagagaaataatgatctcgtgtttgaccgagcacgtgggactcctttctccctcgagatcaatctcctggcgttgccccacaagtttaaaatgccaaccttaaagatgtacactggaaaagaagatcctcttttccacctcaagtatttcgagatgcaaatggatctgtaggggatacgaggagacgtatgttgcagaatttttcctgcaaccctcttagaagccgcccagcaatggtacttcaagctggcaccaggaaacttcaactcatggaaggctttctcctcgtatatcaatgcacaattttccccctcccgccaacttc

SEQ ID NO: 107934 - DNA, 1500 bp, Cannabis sativa
  modified_base (292)..(292): a, c, t, g, unknown or other
taagaaaaagaacaattgaaaatgcttaaataataatattattttttttataaactacaaaagtaaattatattttaaaatttatttttagcctatgttttgcttcgcggcgaacttatgaaaatttaccattgttgatgcaaaatttaaataatcaataaatatatatatatataattaaaaaaaaattattgaaattatgataccacatattcataagtaaataataaaatatactataaatgctaaaatataaaaatgtgatgagctaaaattctctctagctattatntgtgtccgctagtatttatctttttttttcccttattattaatatatatgaatataataaattaaagttttaaaatattaatgttaatataataaataaaaaatattagtataattatttttctcaaagtattaaaattaaaaaaaaatattatttgaatttaacacaaaaacataaattaaagtaaataaaataaataataaaaatattaatatctaatagtgggaacttaatgttgctaaagaaaaaaagtttggggatcaatttaccaaaatataaagtttggggatcaatttgccaaaatttatatagtttggagattaatttgccaaaaaataaagtttgaggaccaacttgccaaaatatgtatagtttaaggacatgcagtacaaataaacgtatctttattaatattattagggaaatttcattttaaatatttaataaaataccctctaacaaaatttagactactaatttatttatacatttaaatgttattgttttcaaattctacccaaaataccctccctttcattttccttctctctctgtctctttctcttcctcttcctcgcaccaccgagaccaaccagacctaggcaccgagaccacccaaccaccaacactgaacctcctttcccccaccaccgaacctcctcatctacccaaaatcccagacgaaacccaaaggcccaagaccggtcggacctccatagcactcaagcataaaaaaacctagaggtctcgaacctctatctctgtcttcatctttatcttcgtgtttatttgttttttttttattggatttgtgtttgtttcagaccttagatggttgtggttatggtgttttctggccaaaacgtgattatcgatagattgtcgataggttatcgatagtttatcaatgatttatgtatatgtaacacaggtttgtcaaatttacatttatcgatggcatttatcgatagtatatcgatgacatttatcgataggttgtcgataggttatcgatgatttctgtttgcacacaaaaaaagcagtgcgcagacaaaacaatcgataaagtatcgataacccattgataattacattttggctggaaaatcataccatccacctccatctaatgtctcaaacaaatacgaattcaatgagcttctggttgggggagggttaggtgggcggtggcgaatggcgatggtggt

SEQ ID NO: 107935 - DNA, 784 bp, Cannabis sativa
taaaatttttaatcggcattaatgagccgaatctgaaaagactcttagtcagagtcacattgggtcatcaatcgacaccactgccacgtgccacctgttcaaacaagaattcagaccgagtaaagtccacgtgcgaccgagaaggtcccgcccagacattaggggcaaatgttatccaattttttgcacaatcacatggaaaaatacttaggtgacacatgtcctgcatttcttgtatctgggcagaggtgaatgttccgaactgactccatattgtacgtcaacatgtataacctttgattacctgagcaggatgaaagatagatcatctgagaaagtataattctggattgccgaactacttccaaaaagttaatcacttcattgtaatcttacgataccaagacacgaaggcaatccttacaatcgtgggattgaatcagagaaatatagcaacatgttctagtttcctatttcatgtatcataattatgtaataaatgtaatttcctattttatagattgtaagcaaaagagaaaccttccctcatgcattaaggccctataaatagtggcttagcctcaccgtgaaagggattgaaagaattgcttcagagagagagatctaagagaattactcaaaattcattgtaagagcttttagagggaaaaacactttgttctttctctcgagttaatacaattcaaggggagtaggctattaccacactcatggggccaaacctgtttaaaatttggtattctttattactttgttgtttttg

SEQ ID NO: 107936 - DNA, 529 bp, Cannabis sativa
gggcataaaacccaacaagaactagttagctatattttaatttctctttatttacttgcatgctcaacatgcatcgcatttgtttttatatatgcttaaagagaagttgcaagaacatgcatctatcctatttgcaataccgggattcgagtttgggaccatgggtcaaatttatatggaatctcaattctagggggatccgagtggaagcagttttcatgtatgctttgattgttgttgaaactatctggagagtgcgaaatgattttatacataacaactctcatccgaatgttatgaaatgtattgaccagatttgtaattcttatgcagagcttcatgatactttcttgccttgccctgcaccatctttgagggggacctggagtccgccacctcaggatgggataaaattgaattgtgatgtcagggtgggcttagaaagcatgtgcacaacggtggtagctggaaaccatctgggtaaggtggttcgaattcacacggctaggttggatttctcggatgcatt

SEQ ID NO: 107937 - DNA, 1101 bp, Cannabis sativa
taattatttagggcgttacagctagagtttgaacttgcagggcatgaggagagactgagagcggctcttgatggccaacaggccataaaggatgagtatgccagcttgtcctcaaaactcacctatgagttcaagctacgtaaccccagagctaatctgtcatacttgggcaatgaggctttcgtggagagcacgttggctcaaggaaagatgctcttcgagagccgattgggagcggaccagaccgctgcctattgagaggggtcatcctcagggaaccatgatgtggggctggccgacccacttgcagaggaggtggtcggccagcttgttgatgttgtggtcggcctagactccagcgatctacatcttgcggcttcagactcggttccacctgcccctgcacacacatagacaatattttattgaaatgagttttccaatcacaataaacaaaccaaacacttaaatgatctttctttaggaatatcaattctattcctacactcattcatgtaaaccaaatactacattagagttttgttgatggaataaatgctattttggtgttactttttagggtaaattgcggtataaatacctgatgtttcagattttatacatttaaataccttatctttattttgggaggtaaaaataccaaatattacaattctcttacacacgtactttcgttaactcataaatatggacacgtggagagtccagatgcattaaatttatttattttattttaaaacttaatattcttaatatcagaaactaattgctacttatttaaaaaaatgagagaaatgcaataccaaattaccatagctgagtgaaccagtgcagtatatggaacatgattatcgaattgaagtgctaataccatgtaaaaattgttatgaaaattgttttttttttgtttttgaaacaagtaccatttagtttctaatattaagaatataaagttttaaattaaaaaaataaatataatacatccagaccctccacgtgtctatatttatgagttaacggaagttgtagtaacgaatgtaagagaattgtaacattaagtattggctaattaggattttt

SEQ ID NO: 107938 - DNA, 584 bp, Cannabis sativa
atttgtccaccatgtggaccattctaatattttatggtattgatagatgcctcaactagattgtcacatgtttgcttattatctactcgtaatgtagcatttgcaagattgtttgctctaataatctatttacaagcacaattcccagactatgcaattacatcacaggcttttaatgattattgtatgtcaatagggataaatgtagaacatcctgttgctcatctacatacacaaaatggtctactagaatcattcattaaacgagttcaatgaatcgcaagatcattacttatgacaacaaaattccaaattttagcttggggacatgctattttaaatgttgcagcacttgtacgcattaggccaacatcatatcacaaattctccccattacaattggcctttgatcaggagccaaatatttcccatctaagaatctttggttgtatagtatatgttccgattgctccacaacaatgaaaaaagatgtgtcctcaaaggacgctgagaatatacattgggtatgaatctctgtctatcattaaatatctcaaacccacaactagagatatatttactac

SEQ ID NO: 107939 - DNA, 529 bp, Cannabis sativa
cgccgtgtcacacttcttctccggtgacgatcatcgtctgtattgaagaattcatttcttcattgaaattcttcatcgacaccttcctttcttctctacgttttctaatctttctgtcatcttccttcgtcttcaatcatgtcgacaaatgaccaagaaacaagagctatagatggagcttcgactcaaaccaacaatggcaaaaatcaaagtcagatgactgatgtgggagtcaatgcacagctgaccagatcaagaaaccagattgaagatccttcagatccatacttcctacaccacagtgataatcctgggaacgttttggtgtcccaattgctgactggacaggaaaactatgttgcttggagtcgagcaatggagctggtcatttctgtcaagaacaaattgggcttcttgaacggctccatttctaaacctcctatttccaatcatgttctttacaatgcttggatccgtaataataacatcgtgatttcttggatcattaactcggtttctaaggaaattt

SEQ ID NO: 107940 - DNA, 530 bp, Cannabis sativa
  modified_base (502)..(504): a, c, t, g, unknown or other
ataattttatataaaaatattacatcaaatataatttaatataatactatacagtacgatacaatacagcgtaccaaacaaatcctcactaaataaaataatttgacatataacttatggatgtacatgttatcatatcctaattttacgagtattgttattaggtatcagtgtatcatgatcgccaatatttctataagatgatatcttataaattgttaattagcaattttttatatttattattaaagtaaaataagtataactaaatattaaattacactaataacaatacgacacctctaaatattttaggttacatattctctagtttcactttcacatatgctagattcttttaaactttttcttaattgttttttatatgtcatatatcatagagtatcaaataccctaaaatactttataattgatatatgagcattgttattagcagggccggccctgggcataggcgggctaggcctgtgcccagggcccnnntagtccaggggcccaaaaaaaaattt

SEQ ID NO: 107941 - DNA, 971 bp, Cannabis sativa
tattgctaacaaatattcatgcatggagacagaactacatttgggcttgatccctggaaagggtatgtaggcagctctacggagtgcagccccctatcataacaatttttttttaggatgatgcgtcatttcaagctatttgacatacaacatccatttgatagtttcatatgacaacccaccaaacgaacataaattcaagacaatattcaatattctactgaaatagaagcacaacgcatacaacgaaccacatagtccaaacatcatcccgaactactaagtctaaatctaactcagttgacctacatttaggctaagggaaaaatggggtaccagacccatacaagtcagcaaaaccagctactacaaccaatacatagtgcatacaacaaacatcattccaaaatagtaactctaagtccaatttggctgacctacatttagactaaggggaaaatggggtacctacatttagtccaattgcatacacctatcttctttttatgtgatgagatgtattgaccaagacatatatatacatatatattctcccatgacacacaaacatgcatgccatacgcccaggagagttgtagccatcacctttacatatatacatattacttgcatattagtccacatcaaccctttttatgtgatgagatgtattgaccaagacatatatatataagctcctatgacacaaagtcatacgccagcccattctctacgccagccctccctcctattgatatatacaacctattacatttggcattaatgccaagcacacatcagtaaataaataaaaaaactgttacactacttgtcatatacacatatctctatctcctcacatcagtaagtactacattgctgattatgaagaattgctcctcggccctcatccgcagcaattcttcataatcagtaatgtactggggtatgtcccaagactcggccttgtt

SEQ ID NO: 107942 - DNA, 993 bp, Cannabis sativa
gtaagttcttgcgatccattcctctctttttgcttatattttgtcttaaggcatctggtctcattcttgcttcttttttcagatcactgcagagaccagccccctctcaaagaccctgattgatcatgggtatttcatgtccgaattcgggggcatggacgaggccgtgaagagtctgcgggacttgtcaactgagaggagggcattccgggaggaggcccagcagagggaggctcaagcagaggcgaggcaccaggaagagctgaaggttcagggcgaagctgtggcccaggccaagtgggagttgcgggaagccaaggaagctatggccgagctaaatgccaagttaaaatccatggaggagctgcaccaagcggacttgcagtggacggccaacctaaccgtggaggtgaaggagctcagggactttaaagatcaagccttgaagaaggccaaaagagatgagctcctaacccccgtcatctgcaagaactgcgtcaagcgcttcggtgatggcgtttacatggcctggcagtcaaatggccagaacatcaagctcgacttttatcccaagcctgaggaagtccttgttcgcttccgggagaagaagaagagacttgacgccttgcttgaggagcgcagggggcctcatcttccaccccgtattgattaagctcaccagttcaccattacaattatctttctttttatctttacatttacagtatcttttccctttttccagaaaatttaattactattttttaaggggaggcaatttttaaggcccgtccgcaggcccttaatatttttttaggacctgcttttgggtcaggacatcttttatgtttacatttaaatatatattttgcttagatacatattctacttgagtttgctaagcttttacttttggcctattttacatttgttcgtgtggtatgccttactacccccctgagtggcatgaaaatattgtttttaaggcactca

SEQ ID NO: 107943 - DNA, 784 bp, Cannabis sativa
  modified_base (350)..(350): a, c, t, g, unknown or other
  modified_base (526)..(546): a, c, t, g, unknown or other
actgggaaggtccttatgttattgaggcagtagtaggaaccagtgtttataaattggctcggctggctcagcttaatggctcgctaattaagaaccactagaacagtgaatattggcgaccctattaccagtaaattttaaatgtacatgctgtgtttatctatgtaacatgtaaattcctattattaataaagttaaatttaattcaagtcattacaaagttttattctctaaaattacttgaggggcatattgttgggattttatgccctaaataaaaatcatttcaatataatttgatttgttatcaatagaagattagaagtcgtttatgtttacatgtagttttnatgtttatggtttaatgtatacaatttttgttaagtccataacatatagttattcacaattatagtgatgtcaatacagtggaaggtaattgtgattatatgcttcaaaagttaatatcccatgattcatcagtacactagatgtacactaatgtgatagtcagcgataaagcttnnnnnnnnnnnnnnnnnnnnntatgttctttccaaaacattggcaaagtatgctaatatcagatgtatggagtatacattggactgagatcgatattaatcttagtaaagatattataatcttatcgttgtatctttctaagttaatatcactggtcgatttcaagagtattatttgtgttctttaagttgttagtcaaagcctagcatttggttcgggtcacacgtatagcttggcaacatgatagtacaattgagtg

SEQ ID NO: 107944 - DNA, 678 bp, Cannabis sativa
taaactgtagttgttttgttccacaagtgtcattgcgagccaaccaaattcgccatgctatcatagccctttcctccatgacagtagatgtatccttcagtaaagcttcaccaaaccagttagcaaaatctggtgttccccctccccctttaaaatcaattgctgaaatattccaacaagatttagcaaagtcacattgcataaggacatggaaaattgtttcaatatcaacatgacataaagggcatgttaaatcgacattaacatgttttgtatcgagctgaaccttggttggaagataacccgacaacgctcgccaaagcatatgcttaaccttagcaggtatgtccaaaagccacagctgctgccattttttgtctgcaccagcagtcggccaagaaccattttgctgctgcaacatcttatatgcacttcgaacagagtacccacctgcactttctttagaccagtaccagcaatcatcacaaggagtatcactcaattgaatcgacaaaatcaagtttctgtcatgagcattgactatgtcattaactaactcctcatcccagcccctcccttccatcttcataaggcagtccacgtttcttccaactagacttggatggacagtcgtaatacattgattttcattcccaggaagccaaggaacaccaataa

SEQ ID NO: 107945 - DNA, 505 bp, Cannabis sativa
ctaaaaaacgctggagctacgtactaagattggtaaacaaaatgtttaaagaccagatcaggcaaaatatggaagtgtacgtggaggacatgctcgtcaaatccagaaaggctgggggcacatgacctagacgaatgcccgagagtttctaggcttcatcatcaatgcccgaggaattgaggctaatccagaaaagattcaagccctcttggatatgaactcgccaacaaaaatcaaagaagtgcaaagcctaactggttggatcgccgccctcagcaaattcgtttcaaaatcaacagacaaatgtgtcccattcttcaacatcctgcgaggaaacaaacagttcgagtggacagaagaatgtgaaaaagctttccaagagctaaaggcacaacttgctaaacctcccgtactttcaaaacctctggacggtgaggaactgggaatatgcttagctgtcatggagcatgccgtgagtgtcatgctgatcagagaggagagccac

SEQ ID NO: 107946 - DNA, 854 bp, Cannabis sativa
tcattctctcagccaaaccatttttttgtggggttttgatcactgacttgtgtctcattataccttctctggcacagaaatctttgaacagatttgagcaatactccaggccattatttgttcttagcaccttcaatttcttgccagtttgattctcaagcaatgtcatccaattgacaaaggttgcaaatgcttgatctttgcttttgagtagatagacccacacttttctactatagtcatctataatgcttatgaagtaactagccccaccaattgtttccaccttagaaggaccccataaatctgagtgaacataggccagtttctcagttgtgtgatattccccctttccaaacttaaccctgcaactcttaccaagaatacattcttcacaaaattcaagtttgctcttcaagccacccttgaatataccttgtctgttgagttcatccatgcccctttgactaacatgtcctaatttaagtgccacaactttgtactcacctcagaattgtgactcacagctggtgatgcatttccaacaactgttttaccatcaaggtaatagagtccattgttcaaaagccctttgatcataacctttgaacttctgaaaattttgagtattccatcttcaatcttgacatccattcttgtcaaacattccaatggataacagatttctctttaaatctggcacatatctcacatgttgcacaaccctggaaacaccgtcatgcatatgcatttctactgagccaattcccttaacttcacaagctctgttattaccaagtaaaacggaacctccatgatcttctgaaaaggaactgaatagttctttgttgggt

SEQ ID NO: 107947 - DNA, 556 bp, Cannabis sativa
  modified_base (63)..(70): a, c, t, g, unknown or other
  modified_base (256)..(262): a, c, t, g, unknown or other
ttagtttggatgaagagaccataaacttccttttatactatcttcaatagggttagggttgannnnnnnngaataaaaaaatgataaaaatagggtgaaaaaccacttggtggccgaccacttattgagccccacacaagtttgggttttgtcatttttgctaactattttacatatttttcataaataccactttttacaatttcaaccctataaatgcccaaactgttcatttaataattaaaataattatcannnnnnnttgtcatttataatatttattaattagactccataaagtgtattaattaacaaataaaccctaaaacactatttcttcataatcaagccatgtcttagtcaaaaattcataaactagacatggtctaattttacaattataattgattagttaaaattaattaactgagttttacaagcagtttttctcaactactatggggacatgggcctatgtaaccgagcttccaataagaagttgtagaattaaccaagtaaattcactaacttattaattcctcattacatccaccat

SEQ ID NO: 107948 - DNA, 735 bp, Cannabis sativa
agtgctcatggctgctcaccctcctcttacaactcatgattatcaagttccaaatcctgtactcagtaagagttttttatcagttgttaacaggcagccctcttcgaccactccttctgctccaaagatgagcaaaggcaagtctcctctgttcaaaggattatcggattccaactggcaggggcaaatattttttgattttaaatccttcatcaaaagatataagaaggatcaaaagcgccagcttgcctttgaggcctccatgtacaaaatggtttgcatcatcaagtctactgtgttgcaaaatcattatgcagatcctttaactccttcaattgatatatctctccctccgtttcatagggatccgtttggtgcatcctcagatgggtctggtagtaacgcacaagtgcagggagagccgtttgtttctgccccagtctcaagtccagtgccacaggatctgcctcctacagctgacccgtctccagtaaccactgcacctaacttggtgtcttctgtgccactttcccagggggagtctgacaaatatgtggagcaatcagctcatgttcaatgaagggggagatgtctatagtctcaagtctttcttttgatatgtttttatggcttgctatgtttatggttgtaaagacattttatagttctatatttttgtgttactggatatcttttgaagttattgtccttattttgtttagttttttttttttt

SEQ ID NO: 107949 - DNA, 866 bp, Cannabis sativa
tatgatgaatacataatttgtttatgcatttaatatttcgtatagattacttgttatatatatagctaactttaaattttgtttgttaatggtgtagatatagcaattcaggattagattcagacccagaggcagagagtccaacaataatacctacaggaggacctactcaaatgaattgaaatatccaagctaatggatcaaggaaaaagagtggccctcgaggttaatgacaaaggacaatactgcggcaaaagctacgccaagctcgtatcaactttaggagttagatgtcgtcagacgatagggttgtctataaaaattggaaagaagtcaaccctacgctgaaaaataaagtttggacagatatataggttagcagttatttgttagaacttttaattcttttttattgattcagatgttaactctaaccgtgtttgtttttcttcaaactagacgggtttcattgtgccggattccttcaaacatgattgcctcatccttgctgggaagttaatgaaaaacttcaagaataggatgacaaaagacattataatgcctgcagtggaagagaaggatgtgggacgactggcacaagtccctgaaaaacatcccgaaattgaccttactgattggtgcaaattcgttgaaagtggactaacccctgaattcgaggtacgctaattatatttgtactaagatcaacttttaaatacaagtacatgtatctaatgtatttttttggcattgtaggaattgagtaaggtgcaacgggaacgttccttgaaatacaatccagacatcgaagtggtcggagtggaatggtgaacgtacgggaagctgtggtaagtaatgcttgaatt

SEQ ID NO: 107950 - DNA, 686 bp, Cannabis sativa
aggcacgggagccacaaaagaaatcaactcttgaggaaaggaaagaagttaagtatttattcgacgatgataatgtcgaccaaatttttatgagttgttaaaggctaaagcaatacgactttccgagcctaaacgacccagcaaggttggtatgacaaatgacctaaattattgctggtatcaccaaattgtgagccatccactaccgaattgttacatccttaaaaacatcatcgaaggcatgattaagagaaaagaaattgaaattaactcttctcttggaaaagttgttaggctacttttagtctaagttttgggccatttttagtgttgttttcgatctttgtttctacttttaggactgttttacgcttgattctctttgtttcagatacccaagatttttaaaggaaatattcatgagaattagagatgacaaagaagggaaataatcaaggaaattttcaattcttctcttccaaagatcacctcagagagatttttttaagggatgtgattcttgagatgcttccagtcaccgcaactaagcatttggtggtcgcggtgaagccttcttgatgaacataaggtaaaataacagaactaccccttgataaaatataaggtaacaaacatatacacaggggtaaaatagtcttaaaccataaccctgaaaataacccgac

SEQ ID NO: 107951 - DNA, 1317 bp, Cannabis sativa
tttttttttattttcatattttatgcccagaacagtagaatgcgacgcatgatctataaagtcactttattataatttagtaccttagaaatagcgaggcaatatagttagatatttagaatatcgagaatgttaaggattatggtttaggattattttaacactaagtttataaatgcttcttggcgaaaaggagcgaaaattactaatttgaccctagttttgtctttattgggctagtggattctgtagtaaatctcttgagtagttaattaagtgtaagctgattttttaattaaataattgtcatttattatttttagcctagaaaattacgagttagaaccaaactttctctttctttcttcttatttgctcgaccaatcttagggcaacaaccacggggtttttatcagacgatttatatcttaagatttgaggaatgatctagctaagttaaaataatcttcttcttcttgtttttcaaagctaaagtaaggtttcatgctttaattttagggttttggtttctatacgagctagttgtttagggtttgctttgttgggttgttttatggttaattatgttgattttggtctattttggttgttattcttgaccctagataaagtttgagcttttgagctcaaactttgctatttaatggtgaatttcatttcaagggcttatttttatttttattacttaaattatgtttgttgtggcttaattaggtgttctggaaggtttggttcgatttggggttgaattgagttgttggtgaagtttttagggtttcctgcaaggaactgattaatcagttctagcattcttgtagaactggttaactgtttccctaggcaaaatcctaggaaccgattttccattttcagaatctagtttaccagttctagcagttttagaaccctagttttttgtatttagtgatatttagggtattgccacgctatccatcgatagggaaacttctagttttaattaagtccccaaaaagtgatttagcgtatcacttaatcagcagttttacgaatgttataactacttattaggggcttgtaaatcatcgagcaacagtttccacttaggttgatcagcacacctgaattcaaaattaaggtaagattacataacaatatgcatatatgattacatgtttagcgtacatgtttatgaatacttgttagataacatatcgataatgacagttttagtgtacatagagttgcactgaatactgacagatatatatatatttgacaaagtattaattaatgctatcacatcagtacgactag

SEQ ID NO: 107952 - DNA, 684 bp, Cannabis sativa
taccgagggttaatactattcagatcactatgtgtgaaatctgatataacacccttaaaggatacaaagtaggaattgggattgacaaatctcaagtgtagagatagtttgtatgggcgtgtgagagagagtgaagagagttattagacttaggcttagagcttggaggctagtattagactttagtgactttcagacgtgaactggacttgggttttctaggttagagttaaggcatttatataggaagcctaaactctaatttacaacttgaacccctagatatttgtatatttaattagttaattgcaaaagaccaaaatacctatgaacatatatattattcaactattctattaggcttttagggcccgcagcccaatcatgttgtccacgtgtagaattacacaggaaatcctgcaggccttctcttggccggccagacacctacagggagtatgttggctgggcatggtgctgtctagaggctggccgaccatagatccgaccaggggtggcgactagcttttgtgaggaagctggacctatttgagtgttggggtccctgtttgcttaggtactgacttggccttcttgttagtgagttgtactaccacgtggtactgattttgtccacgtaagcactgccatgtcatgtaggcaaaattgggataacatttgccc

SEQ ID NO: 107953 - DNA, 1161 bp, Cannabis sativa
  modified_base (993)..(999): a, c, t, g, unknown or other
agtaaaaggttactaggggcagagtctagatatccccctcttgaaaaactcgctttgtgcttagtccatgtgtctcgcaaactacggttgtacttccagacacaccctataaaagtgataatcgataagcccttgagataagttttatcaaaaccagatgcttttggaagattgataaaatggtcaattgaactggggcagttcgacataacataccaccctcgaacatccatcaagggccaagccttggcagacttcttaatagaaggtataactccagaagaaattctgcctgttcatcgagatacggaaacttggaagttatatgtggatggggcatccaacgagcagggctcgggtgcaggggtaatattaatctcaccagaaggctttaagtttcactatgctttgagatttcaatttgatgcatcaaacaacgaggctgaatatgaagccttgattgctggcttaaagatagctgaggcactgaaggtcaaaaatcttattttccatagtgattcacagctgattgtgaaccaggttctcggggaataccaggctaaaggcttgaaaatggcaaagtatttagagaaggttcggaagaacttggaaggatttgattactttaaaatcaagcaaattccaagagaacaaaactccaacgctgatgccatggcaaaactggcctcgcagaacgacttggatggattgaacttagtactggtggagatgctaagcgagccaagtatatgtgaaacggaagatgtagagatgatagagagttctcctacatggatgactcctataatcaactatctactcgacggacaacttccaactgacaaaaatgaggcgcaaaaaatcttgtattcggtgcctctctacacaataattgaaggcaaactatatagaagaggttattcaatgcctctacttcggtgtgttctccctacagaagcgaactaaatcatcagagaaattcatgaaggcttnnnnnnngatcatgcaggttggcaaagcctatctaaaaagatcattagataaggatactactagccaacaattaataaggacacctatgagtttgtcaagaaatgtgataagtgtcagaggttttcacatatacctcacgtgctcccaacagaactaagaatgatgacc

SEQ ID NO: 107954 - DNA, 1074 bp, Cannabis sativa
cctctagaaagcacatcactaggtctattcaacttctcaattattctacttaaaatataagaatgcgtcgcaccagaatcaatcagaatagtcaataaagtattagcaacagaaagctgacctgtcacagtggaaggaccagcattagcatcagcctgagtcagggcaaacacctgggcaagagtaggtgtgtcatccttcttttgctctagtcgcagtagctgttggaaattcctcttcatgtgacccactaccccacagtggaaacaggccatggcctgacactcgccctggtggcgccttttacatctcgggcattcaggaaaagtctgccagtttttgttcccactacgacggaagccttggttaccctggaaccttttgtttgggcctacaacttgcggtcaccggggttagtaccctaccaaaaccaacacctgatgtctgcttccagaaatctcttctcgcaatatttttctttcgtatctgatcttctgcaccctcagaaactagggtcagttcaactatctaggcataagtccgaggaacccaaggttgtttagaagcaaaaatcacatcccgtgcgatatgtttatccaaccctgggataaactttgcttttctagcagcttcagtagccacctcatctgaagcaaattttgctagtcgatcgaacttagtggcatactctgtcactatcatactaccctgagtcaatcgtataaactcttatgcctttgcttgccgaatagactcattatagtacttctcataaaacaaagtccagaaggcatcccaggtcatgttatccaggccatgaccctgagacacaatctcccaccaaatacgggcatcatctcgcaacatatagatggcacacctgacccagtcattatcctcgacccgcatgaaatcaaatatggatgttatcatattcatccactgttccgccttgagtggatcaacaccaccctcaaacaccgacaggttctgcttcctgaaccgctcatacaacggttccaaacgattccctgcatccggtggcactactagaggtgccggaggatcaggatt

SEQ ID NO: 107955 - DNA, 540 bp, Cannabis sativa
tctgctctagaagcagaattaagagctattcttctggcgctaaattgggcggttgaggaaggctggaaagaagcccacattctttcagattccttggtagctgtctcggctctttctactcaagacagtcctcctgagtggaaatcctcttcaatttatttttcaattgttaaacttttaaagaactttgttgtgtgcaagtttttttatatttcccgtagtttaaacactgtggcggatggggtggccaagggtgctagagtcgcctatgaacaacacattttgtatcaaggggagggaattccccctgtgattcccatctatttttctgcttaatgaactgattgttctttcaaaaaaaaaaaccatcttgagaaagactaagtacagagtttgcacgatgagaaggtattcaagatcggcaagaccaagtggattacaagactaagtacttgtaatatccagtttatatacatatattggtatttggtatattaagtgtgatacaattatattgttattattattattaatattatt

SEQ ID NO: 107956 - DNA, 1151 bp, Cannabis sativa
  modified_base (935)..(949): a, c, t, g, unknown or other
  modified_base (998)..(999): a, c, t, g, unknown or other
aagcaacaaaacaaagcttcatacacagaaatgcatttcaccattaaaggttcaagattgagttcaaaaactcaaaacttgactcacccttcaaacagcccctaactcatgcattaaaccacataaaaactcatatctaaactgcagaacacaacaacaataactacaacagctacagcaagctaaaacaacatatcactcataaaaaccaaagtttgagttcaaaactctatacttgcttaaaattaaccaatcatgcatcaaaacctgttctattctattcaattaaacatatttaaacttaaaaaaacaacaataaacaataacaacagccacaaccacaaattcatcaaacatgcaataattcatttttcttaaacttcaagaaaacaaaaaaaaagcttgaacaaagattacctcaacttgaattactctaagattgatggaaacttgctgaattgaagaacaaaaaccaaccctagcagccctagggttttcgagagagagaaagagagtttgagaggaagaaatgagactttgcttcctattccaatttttttgaatgaaatgaattataaaattgatttttcctaatttgtttcagccaaaccaaattaaaaaatcagtttactaacatatttaaaaatccataaaagacaaattacatatgggcaaaaatgaccattttgccctcacacactaaaatggcataaaaggggtacaaaggggtattttggggaattctaaatttctgaccaatcccaacattcccaatgtctaacaataccgccgcgctaaactaaaatactaatttgtgattctactgagccatacaccgcgttccatgttgccgggcaccgaaaatgtaaaaatatgagatttcactatatgacataaaaatgcattcagaattcaaataaatcaacataaataannnnnnnnnnnnnnntaaataattttcataattaaacaccaattatctgctaatttccaaattnnaactaagcggtctttacacctacagtgggaaaggttaaagaatataactaaagtttgaaatttccttgggttagtaagctactatcatcgctttgtggagaatttctctcgaattttatgcctttgacaaagttgacaagaaaggaagtaaa

SEQ ID NO: 107957 - DNA, 1348 bp, Cannabis sativa
  modified_base (1209)..(1213): a, c, t, g, unknown or other
gttcatatcgatttatgcacacccctatatgctagtatcaaattcaaatgttttgcaccttgtttggaatattaattctatatttatgtagacaatttttaaaggatttaaaaataaataaatgttgaccacacaaaatttttattatcagtaatgttataatacttttatgagtaataatacataaaatattacatttagtcacagtatattttggttaaccatattttgttgaaaggagattttttttctaaggaacaattaagacaatttatttggggataagttaagaattttttttttttttttatctattatccaaaaacactcttatattatatttattaaaaagtatccatttttgtaaatggattatctaagatacactcaccatctacttaagtctagcacataatttacattaacctaaggaatataatgggaacatcatcaataaaagtaggtatattttaaagaatatagaaataaaggtaaaaattaaaacaaataaagtaaagaggatatataatgtaattgtctaatttatttgagctaatattttaaattgggctaaataagtaatctaactaaataagcccaataaacaatttattttgtagggagatcgaagttgaaaaatgctcattttttatacataaactaaatttactttcaaataaaatttaattcaaataaacctctttttataagtatcatacccaaattatctttataccctcacataactaagacataatttctaacataatagatttgtgttatttgaagatagatgtgtaggtttgtgggaaagataaggtaaaatttcaattagagaagaatgaaaactattgtgaagtgataggagtaaaattagtagaatgattgaaaaaagaggtaaacaatagattttgaaaatagtaaaaattaaaggcatcaattttaaaaaggaatgtagtgtaattttttctatttggtatgagctttgtaatgtgtaatgcctaataataaacttaattaggatttatggggctctaattaacatggatttttataaaaatactagattttaggtaaaaatttacaattttactatcacacgaaattttttacaaaaatactatcttttataaaacaaccgtaaaccaacaaaacagagtaattaaaacaacagtggaacagctaaaaaacaaccgtaaaaacttaacnnnnnacacagtataaaacttacacactatttttgaaaaaaaaaatcccctcacattaaagaagtaaaaaagttaaaaaattttaatatatgatgtaaaaattcctaattaatttgctatatacgtaagggtttggtggc

SEQ ID NO: 107958 - DNA, 664 bp, Cannabis sativa
agagagagagagagagagctaggattgagaaattgtattgagcaacattattgattatgctggcttggtttagtgagttaatgagtgttgagagattacatcatatatagatgacttgttgtgattatttccttgtagctcctgatattgatatatctcttattctcattatcaataaagattggtggaaatgctttcaaactggagtatgaccaagtttacattgaacttattagaatcggaactagtataaatctctgtattattatgtctgacagctatttagattcatttgtgttatatttttctggtttattgggtttgttgttttttgttcttgatttgtttgtttttatttaacttttgtttgtttaagtgtgatcttgaagatataattacagaggttaattcctatgtatcagagctaaatttcctacaaatcagaacttttcaacattcttttcttctctattttcttcttctattctaaattaatatgtgtgaaattgctacgatgaacatgagtagctaaacagttcattagagtttagatagatattatttgacattaatttttggttttaatatgatttaatttctcctcaatttctatgtattctatttcattcgtacttaattttttttaattgcctgaccatcaatt

SEQ ID NO: 107959 - DNA, 602 bp, Cannabis sativa
  modified_base (244)..(252): a, c, t, g, unknown or other
tactacaacaagactctactactctatgtggatgacatcttgataattggaaaggatagaaaggctattgacttacttaaagaacaactcaactctgaattcgaaatgaaaaacctaggtgaagctaaaaggatacttgggatagaaatcaagagacaaagacctggttttgtgttcttatctcaggaaggatacattcagaaaatcattgacaaattctgcatgagtgagtccaagacagtcnnnnnnnnncttgcctcacacttcaaacttgctcaaaatcaagcccctgataatgaagaagacagaacatacatggaaaatgttccttatgcttcctgtgttggaagtctaatgtattgcatggtctgtaccagaccagacttggcatatgcattaagcatggtgagcagattcatatctgatccaggcaagacacattgggaggctgtgaagtgggttttaagatacctaaaaggaacatccaatgttggttttctgtacagaaacaatggaaaatttgaaactgaagttgcagggtatgttgactcagactatgcagggagtatcgacaccagaaggtctatcactggttatgcatt

SEQ ID NO: 107960 - DNA, 573 bp, Cannabis sativa
ttgttgaaaaatacatatataccataatgtagttacatagtatttattattttttttacaaactacggggcgacaacaaaataactcaaaaagcagtatgatcgaaactctccaagttgcattgccgcgatatgtaccatccttgccgagccccaactcactgctcctctaacttggcttttcttttacatacacaaggtatcaaattgatgagtcgacagacccagtaagatacgcataaaacatacataagcaatacggtaacgactttgaacttaagtcgtcctgagcctatatgtaaggctcaccaaatggttaagaatgttctcaaaggaagtacgaccgatgtgccacatgcactagagtatcgactctgtactcgtgttggtaaggccattatcgtacttccgggagttactgagtgttgtaccacatgcactctatatcccttggtactcgtgttggttacacattaacctcccttaaaaaccctgcaatgtactaacacccttagtactatagctatttcagtgttattagtgtatacaaatatcaccatgcattcatttagtt

SEQ ID NO: 107961 - DNA, 578 bp, Cannabis sativa
ttttaagatctaaattaatgttttaagatttacttaagaaaatgttgaatctttttcatttttatttaagggggtacaatttgatagttgacaaagcttagtaggcaaatttactaatttacaaagatacgtcaacatttaaacaaaataataagacagaacctaacaagaaagaccaatttctgtaaatataaaagttttaaaatttttttaacaaaccatatattttaaagagagaaactatattatcgaaaattcaagaaataaattgttaattattctaattttaataataattttaaattaataaataaatttaagagtaatttgcggcataaatacctaagttttatgttgagtagcagataaatacctaagtcgtatttttggcggtaaaaataccttccgtcactagtgtagaacttccgtaggtacctggtcgttaagtgccagattaggatccacgtgcagggtcggccctaggcataggcgggctaggcccgcgcctagggcccacactttccgggggcccgaaataaaaaaaataaaaaaatttatttaggcttttatttaagtaa

SEQ ID NO: 107962 - DNA, 615 bp, Cannabis sativa
aactcatttggcatttgtaagtctcggtcaaagtcacagggttgactttagtgtcttcaaggtactcttggcatgtgggcccttgtgcaagagtagacattttattttcttgcaaaaattagatataacgcatatatatgaatatgtgtattcatctcttttattatatttcaatcaattatatggcatatttgtatattcttcaggatatatataagattttatcgaagatatataatcttctagataaatgcataatttatatatattttctctatatttcgtaggtacaaattatataaaatatattataaataataacatataatatatatacatgaattcaataataaacacatatgagaataaatatatatatatatacatatataatatatatggatatataaataaaaaaaaataaaaaaagagtttttaaaattgtccagtcacatgaatgtatataaatatatatttagtgtattatgacctctaaataattcaagaatttaaacaaaatatttattttaggacttgtgttgataacgtgttataaaataatataaaatattacataatcttcaggatatgtgcaatattttatcgaggatgcat

SEQ ID NO: 107963 - DNA, 808 bp, Cannabis sativa
aagatttccagaagagagtccaaaagtacatcaacttggaagaagcccaaacagaggcttacggaggatactacccgatcggggtggcaggatacgtacccggagttcagctctcgggaaccctaccttaggctactccacaaatgagcagcatacagttctctgctactccaggatacaatcagagccaagcctttgctcctgcatattcgcactatggaaacccctcaaggatgaacggacaaatctcgtctcactccgctactactgcaagcctaaccggaccttctcaaggctcccgaagcaagaggtcctcaaaaggtagcaactggacggaggacaagcgccaaaaaatatggtatactcccagtacacggagctgacggacacacaagaacgtgtgtatttcgccacgaggaaaaatacacactatcggaggccacctcctctgtatagggatagttccctaagggatcctaataaaagatgcgaatacaacaacgacattggacacagtaccaatgagtgcaaaaatcttaaagatgagatcgaaaacctgatccgattgggtcatctatatgagtggatcaagaattggctcccccatctcaacccggttccggcagggagtccattgccccaagggacaccaggaagtgcgcttggagcattgacaccaactgtaccctcgggagggccaatccctcaacagacctctggcctgccaccaagacccaacggaagagtggctatgatctctggtgggccccatattggaggaaccattcgaaaagaattaaagcgctat

SEQ ID NO: 107964 - DNA, 727 bp, Cannabis sativa
attttagtgttttgaatgtttgttaatattttgtcttgtgtaataggtttttacaatggtgtataaacggaagaggggtgctgctgcagagaaaattgatgcagctgagatgaaaaagaaggattcgaaggaagcttgggcgaaatattagtaagttatttgtcgttgttttttcgcgctaatattttttggttttgaaaacaatatttgtaattcccttcctttatttaattgatgtagccaagccaatttcaaagcttatgctgctgcacatgcagataaatcaaaagcaaatgtgagtgacttactgtgtgtcatggatcttttatttagcgttctttacttcataatcgagagtcttaatattgcagatccttggtagttttaaagagcaatttaagctgcttagtgaggaagagattgagaagtgggcttcatatgaagttgaggcttccccttcgaaggttggtgttagagggaaagggaagaagttaaaggagacattatctgctaagccaagaattgagaataatgaaggggtaggggatattcaagtatctggccgttgctccttcgaacgtttgggtagaatagtcccacttctcaacgactcttaaaaagaaatggtcagaaatgctggtttctctacattcttaagggaggatgccccgtacatcgatgctaagatagttagttggcttatcgatcacgtggatccaaccacttc

SEQ ID NO: 107965 - DNA, 522 bp, Cannabis sativa
aaagaaggttataaaatcttccaatagtaatttaaaaaaaaataataaaataaaaatgtaatccgccaaatcttttggtaataacaaattgatttttgcataacaactacaataattcaagattgatatatgttaaagtttaaaagacaaataaaataataataagaaaaattaaattagagtttgatcgatagtgcaattaaattaatataacttatattttttaaaaaaaaaaatgaaaataatatatgagatggactaaactaaatacactacaaaaaatagctatatttagtgataatttttttagttgcaacataatttttgtgactaaatgcatgtgacttttagtcacaacaaaaaattacttatgactaaaacatagtatttagatacaagttgtcactaaattatttttaatcacagcaagtactgactgtgactttaaatagtcacaacaaattgtaatttttgtaactaatacttttagccgcgtgtaccttttaatcacaacataataat

SEQ ID NO: 107966 - DNA, 565 bp, Cannabis sativa
  modified_base (299)..(300): a, c, t, g, unknown or other
taaacaagtaatgaatttaaatctgtatctttattgatatttgaatagaaaatattacattaaaatagagttttatttagggaacaaagtccaacacttagagcatcttcaattgagagctataaatgtagtgtattgtcattttttagagcatctccaatggagtgctaaataggtggtgtattgttattttttagcacttttcaataaaaagcttctccaatagtgtgcgataagttgcgccaaatttggcacacactaaaaattaagccaaatttggcacaagatatagcattgtnncaaatttgacacacaataaatgctacttttttaattacacttttaccattaatcattaatgacatactttaataaatatattttatttacaatattgccattagtgaatttttaaatatttaatttattgattgtcattaatgatattttgcttttaacaccaatttacctcttaaaatgttattgtgcattggagcacaattacaaatattatgctaaatataaagtttgttaatttttgtgccaaatttagtacaatatttac

SEQ ID NO: 107967 - DNA, 510 bp, Cannabis sativa
aagatccaccaacgaacaactttaggcgggagagaatcatcttagctacatgactgagagaatcttgtgcttgtgaaaaataggcacagttattaagtattagtagtgtttagcattatctagagaaaacactttataattgattaatgatatttcatacaaattattacattaaattatatgaattctatatttaatttgtatcattttagcattattgagtttgtaaaattaaatggtgtgaaagggtattcaatggaggtgtaaataatgccaaagtaaaatgatacaaattaagactatataacatattggcatgtgcatgcatgtagtgccttgaataaatagatatttaccaactttcattgttctcttccttaatttactctttattaatttgtctcttcctcattgtgctacctcgtttaaaatgcaaactcaagaaatgtttaaagtatttctagctagccagaaaaaaaaatgtttattaattcatctaaatcattcatg

SEQ ID NO: 107968 - DNA, 638 bp, Cannabis sativa
attaagtaacaaggaataccaagctcctaacttgagcatgattcaccacaaatccaacattaaaagctcaagtatttaacagtaaatcccagcttcaacaatagccaaaatcacaattataaaccaacaaattacttcaaaaatacaagagaaacatcctacacgaatccctactcaaactagcatgaattaacaagatcacaccaatatctaattcatgcataccaaaaacatccaaagctttaaaatcacaattacattttcaattttagcaagaattcaaaaattaaatcagtaggtacactacctcaattccttgcacacacaagcaccaagaatcaaagctccctaaagaaatttcccaagcaattcacttcaattcaaggttgaaattaaaagagggtttgagagagagagagcggtttcggtaaggggaaaaatagactaaaaaattttcttaaaaaaaacctttcttttattacatataatccaacggtcaaaatgaccattttgcccctagggccaaaaacatattcatgcacatacaagggcattaaagtgatttcatgcttatttaaattcaaataaaatttcagattaatcactaataaaaaaaaatgccaataactcaatcccaa

SEQ ID NO: 107969 - DNA, 797 bp, Cannabis sativa
cggagtggggaattagccaggagtgctcttccgtcctcattctcatttaggattttaattctcatcttcgctctatcctcatttattccccaccggcaagaaattttctaattaatataaaattaaaattatttatattaaaaattaaaatatataaaaataagtaaaataaataaaattaaaatattacatattatttattatttaatatattacttattactctttaacacaatttaaaaatttgtaaaaattatactaaaaaactaaatatgtacaaatataaactataaaatataaaaaattaaataaaatattaaatggttcctgtctatccctgtttaatatttagagacaaaaaataatcttcattttccatttaaacaaaaaatctttagggtgggttcccggtagtacccatccccataaaaaaacatgtgcatccctatcaaaaccttaaaatatttaacatacctaatcttgcacataattaataataataatgaaaagtggtatccttaatacatgatctgtcttccacttaaagtctgaaagcgttgaaccatgagatcagtctaactaaattagcatatatctcttatatatatatatataatcattattatcatcaaaaaagccttaaatacagactcaggtcgtgtaatgatccatcatcatatcacacataatactaattatattagaaacaaggttattattatcattaattagaaatgataccatacatttctaaaactagtaataattcactaacactcttatgggtgattaatatg

SEQ ID NO: 107970 - DNA, 586 bp, Cannabis sativa
tgcaggtaaggggaaagcaaagatagagcagccatgagctcgaggtcgtagcagcaatgtacatatcagccgcagtgtatcggcccaatgaacaacatgattcgttttgatagtattttgggattacaaagtttatattgtaaaagtactagtaaactagtttgtactattttgataacaggggtccccatagttctcattacttatcttctgctatgaagaagtttttacatgcttgattttcgttgcaaaaaaaaaaattaattacccgcacttttggtataattatattgtatatatatatatcaattttataaaagcacacacgtggtgtccctattggatagggcgttacaacatggtatcagagcaaggtttttagatcctgaagactggtttgatatgtacattggctgcaaggacttgatcgactcatggttcagtaagcttttagttaaaagatagtttgttaatattctgactgcctgattatctgaattgtgtggaaggactatgatatgtggaaatacttatcagtattgttattacttggaatgtgacggcaggtgtatagattatgcacccg

SEQ ID NO: 107971 - DNA, 705 bp, Cannabis sativa
tacgcaagtgcacgtaattaagtactaaactcacacaggtgaggtcgaaccacagagaattggattaagtaccactagactaaatttatgattctatttggcaaaccaatactttttatgattaaacacaaaataatagtaccaagaaactaaaattaatagcgaaagattcaatcaagatgataaaataggaaagagaatcctgttgatttatttacccaattgataatgcctaattactatcctttttcttgatgtgatgacagattacacaatttaacctaactcttttcagatcttttaggttctaaatcacatgttctctaatcaatctctgaattagaataacatgcaatcagtattaagctataatctaaatgtcacacaggttacgcaaatactttcgtttcacataaaacctagattatccaattttagcattctcatttctcacttttcatattttgaattgagatcatagaacatgtagaaggtgatcaagctaatacatggaattacacacaaatatagataattttacaaataagataaaaggaatggcaattgacattaactaggcaaaagttttaatcaacattcatcgccttccccaattgagaatttagttcataaaaaccatattaacatccataattaaatctagaacagaaattaacataaagaaattcaagagttaagaaagaa

SEQ ID NO: 107972 - DNA, 567 bp, Cannabis sativa
  modified_base (118)..(122): a, c, t, g, unknown or other
actcaaatcccctccgactaggcccgaatttaaatccccctccacgactctagtgctaaatttggcctctgacccgaactaaatccgactccgaatctagacccgacttaaataaaannnnnaaataaaaataaaaataaattttatagaacacacttttgttttttgttttttaaaattgaaaaacaaaagtatttacagaatgcatttttattttttaaaaatagatttttaaaaacaaaaatttatttttattttgtgattaaaaagttagaaaacttagctaaattaaccatttttttttattaactttagtcaacaaaatatttctgactttcaggcgcgaaaataactaaggcaggcgccaaaaactttgaatattccttactttcaggcgcaaaaaactttgaatattcctcaatcctcactcacatttatcttttcattaataatgcaaaataatgaaaatgtgaatattttgctaagaaaataattttgaaataaagaaaacacaagtcaacctttcttcatttattagaaaaaaagaattatccaaaatatgttgct

SEQ ID NO: 107973 - DNA, 913 bp, Cannabis sativa
  modified_base (586)..(589): a, c, t, g, unknown or other
tccattgtaataatatctctaatacatgggtcttaactctttgggtactcatttttagcatgcaacccacttgtcaaagtctctaatgtaggccattcgagatgtttttggtaagcagaattttttgagttatggctccttggagcgccctcatttgtcttttatctggttagtgtaccaactttgccccttatccgagatgaaattttgaaaaatattcatggcaaaaattttaaaattccatgctcttagagtggcgtgttagtaatgacattgagatttacttttatctcgtcgatatccgactttgccccctattcgagaggaaattttgaaaaaatattcatggcaaaattttttaaaatcccatgctcataagtgacgtgttggcaatgactttgagatttattttgtgaattgatggagtatagttatggcctataccatatatgcccccaaaagttataaaagtattgagttacttttgcaacttgtttgagtgaggtatttacattacaaaagaaatatcttttgtaacgccctaaataattaggcacgctacccaagttatttacgaaaccctaannnnctaaacgggattactaatcaaaatagcgcacaatttaaacttttgtaataaactgaatgaaaataaaacttgtaataatttaaactttacaatagttgggatcccaaaaaaatatttacaaactttattacaagtctcttttagttagtcggcctaagcggcaaaatagagtttcagaaattcaacactggtagacccttaactcgcttggtctgatatggcccggacatgtacattcttcgcccagctcctatactcgtggttgatcagctaaagctttaccctttcctgcacagtagagcacccgtgagccaagcccagcaa

SEQ ID NO: 107974 - DNA, 1005 bp, Cannabis sativa
ttccaaactcgatttctaacccaaaatcaccttagtttcagcaagaaaatatcgaaactagtcccatgactacccaagaacaatcctataaggtcagaacatggaatccattattttcggctccagttgaaacttgaagtctgtaggaacaaatggaaaatggttggtgcatctgggtattatgaatctggaaggataaatttctgaactcagaagagacattttggcaggaaggaagtaatccattctgaaaatggatgtcactaaagaagctagaggtttatgaaaaatgacaagcttgagccccccttttatacacaagattcagtgacaagaaagccaaagattgagaaatctctcggttgggaatcgtgtagaatatgaataggcaattcttaatgatcttcgaaactgcacaacgaccaaaatcaaaggaggcatcctttccaagaaaggattttggcaaaaatgccccctgtaattattaaaaagctctttttactaaaaaagaactttttaaggggcaattattatacccaaaatttggctggaggacatgtgtcaaggtaaagggaatgtgaatcagtgcaatatctttctatagaataactcattaattgcgtaagtatcagagtatatttgtaacccactggctgtaaggtcttaggcgaggaatcaatgtacgaactggcacttagtgtattaacgagaaatcatatgtcgctgaatgagaatagcgaggcaccggagaaaagtagcacataccttagcttacaataagcaagctaagtgtaaaagtcggatcggctcgaagaacaagaatgcgagatgaccatctcgctacgagaaaacttcctatagttttctccaactaacaggagcgaggctcataactctggcaagtcagatgattttcgtgatcgacataagacatatcttgtcgaccttggaaagaagaatggttccagctcgccattgggatcactacaatcaagtttctgtcga

SEQ ID NO: 107975 - DNA, 696 bp, Cannabis sativa
  modified_base (99)..(104): a, c, t, g, unknown or other
acatcatacttgggatggattttttgtccaagtattcgatcagtatagattgtaagcggaaaatggtgattttttagccagaaggtgaagatccatttnnnnnngttggatcagttcaggggtctcggcatttggttatctctgtattaagagctagggatctactacaccgtggatgtgtaggatttttagcagtggtgattgactccagtagacccgaaacatttgggcctgaggtagttagagtggtaaaagactttctcgacatgtttctcgaggagttgccgggattactgccgcaacgagaaattgattttgtcattgatctggcacttggagctgaacctgtctctaaagctccatatagaatggctccagccgaactcaaggagcttaagttacaacttcaggcgatgcttgatattgggtttacccgatctagtgtatcgccctggggagctccggttctatttgtgaaaaagaaagatggttccctcagaatgtgtattgattatcgggagctaaacaagttgacaattaaaaaaaagtacctgttacccagattcgatgatttgttcgatcagcttcagggaaagatagtgtttttcgaagattgacctacgatttggttatcatcaactcagaattcgggaagaggacataccaaagattgctttttgaaccaaatatgggcac

SEQ ID NO: 107976 - DNA, 614 bp, Cannabis sativa
agaatagaaaaatggaatagtatgaaattatagctactgaagagtgtagttcaattttgcaaaataagttacctcaaagttttgtgatccgggtagttttactattcattgcactattaggaaatttgaatgtaaacatgcactttgtgatttgggtgctagtattaatttgatggcgttgtctgtgtttagaagactcagtttgggagaagaaaggccaacctgttatgttgtttttaatattattttttggttaattttttagtatgttttatttagttctactcttgtttggagcaattgtacgctttttatcttttattcttgcagatttaaaatagaagaaaattagaaaatatcaaaagaataagatggaaaaaaaataaaacaaatatcacaaaaagatgacatatgaaatagaaaaaattttataaaaaaataaagctgaaattcaagcctgaatttgactatgttctgtttagattttggaaaaagtcaaaacataaaagttctagatatcttttttatctttagtaacatcttaaatcgtccaattctgagaaatatcaagagtgttacagtacaagaaatatcacttttgccagcacattttt

SEQ ID NO: 107977 - DNA, 624 bp, Cannabis sativa
tgggagccgctgggcgacaaatctctgtccgtgaggcctatggctgtgaaggcttctttgaacaacaaattcacggaactcctattatcgaccaatattcctgcaacaattttattggtgatgggagtctctatgaccagagggtcatggtgagggaaatgcactagtttggcgtcatcttccgtgaaagtaatgggttgttccatgagtcggggcctctgtgctagaagctgagtgacttcccacacttcatcgtgttttatggctccagcgtagcgctttaactcttttatggtggtttccacaatatagggcccaccggagatcatggaaactctcccattgggtcttggtgggagcccagggacttgctgagggattgctcctccagagggtacaacgagtgctggtgctctgggtataccccctggtgccctttgaggcaacgggcctcccactggagtcgggttgagatggggtagccagttcttaatccattcatataaatgacctagtcggattaagttttcgatctcgtccttcaagtttttgcattcattggtaatatggccaatattgttgtggtattcgtatctcttcctgggatcccttcgggaactgtcc

SEQ ID NO: 107978 - DNA, 584 bp, Cannabis sativa
tttaattattggtgatagtctaaattgcagaaaccgcaaaatcgcacctcaccgcaccattttttgcggtgcggttttttagttttttggtgcggatgcggtttggaaaattggaaaaactgcatgtgcgggttggtttgaaaaaatagtcaaaaactgtaccacccgcactgcgaacacccctaatgttgattgaatttggttggagtatatttccttcctcaattttgttatgtataataattttatatcaatacaacagtttttatctaaaaaaaaaactaatgaatgattaataatttatttatttgtcaaaaataggaaactctaaaaaaatattgagatataattttttttgtattaaattaatataattgataatatatattaaaagtaaaataaaataattaaataaataataaaagtgaactaaaataattgagcatactttgaaaaaaaagttataaattgatttaaaatattatttttatttgtattatttactttttattattatatgaaatgagatggattattttaactatatattatcgaacctttttatatatatatagataaatata

SEQ ID NO: 107979 - DNA, 591 bp, Cannabis sativa
  modified_base (60)..(65): a, c, t, g, unknown or other
  modified_base (476)..(477): a, c, t, g, unknown or other
agatcctggtaaaataatacccaacacaatcattatctcaatttgatcctcgtacaaatnnnnnngaacttgaagttcaaagaataatttatttgtaaaatattgcaatcatttaccagatggattcactgacccaaagaaaattacaaaattacatattccagctaaaaatgttcatgcttgaattgaagttccagaaggaaaaattgaaaatgagtctaaagcacgcttgaaacgtggtagaccagttggttccaaagatacaacacctcgaaaaaagaaaggagcaaataatctctatggtcctagtgaagaggctaaaaatttcaaggaagatcttgacatgaacaaatatcttgaagagatttaggtacctaaaaataatagaaataatgagatctcaataaattatgtcaatacatgaaaagaatgtgacctacttgaagtaattatcgacaatatttttgcttataatnnagcactagaaattataaatgaaaatgagaatcttgaacctaaatctgtctgagaatgtcaaaatagaaaagattggtcaaaatggaaaataagaaattcaagcagaattgaatt

SEQ ID NO: 107980 - DNA, 586 bp, Cannabis sativa
  modified_base (237)..(237): a, c, t, g, unknown or other
tatatattgcacctttaatttttgattgtataaaaaaaacatagcatcaatgtcattgtgtagcatcaatgcaaattttaagaatagcattcatttatctctaatatggtatagtatccttatattttgctacctaagctttccacctcatcaagcattctccaaaatattaccatttgagctgcaatggtagcattcttaaataagctaaaaatttacacatcatctaaaaatatnatattttattttatctctcttcctcatcatttttggcactcttacttctaaaaacactccaatgtataacactctttaaaaatactataattataatttcacacattattatttaatatatatcttaatttttagctacaataactttttagcttcaattttttattaaaaaataatgaatagcattgatgctacaacatagcatccatgcaaatttctagaatgacatcctcttctctccaatagtatagtatctcaatattttgccacataatatgtccacctcactaagcatcctccaaaattttaccattagagatactttaagagtgtaatcaatatgtgcatt

SEQ ID NO: 107981 - DNA, 690 bp, Cannabis sativa
ctcatatataataaataatatttggtgccataaaaaatattttttatttcaccaataactcacatcatactcacatattctaaataaatctctttaattaataaattacgcttatttatctacttatggtaaaaattttaatttatgctaaattaggttagtaggatcataatcctactcattaccacctaattattctataaatatataattaaccttaattattcataattaggttttcgggatattacatgtgaagcgcagacgagttgcagaaaatcaaaattggaggaaaaaagtatcttgtacgagcttgaccattggtgttcaaacattctaaaacacaatattgatgtcatgcatgttgagaagaatgtttgtgatagtttattgggcacaatcctcgacaatgataaatccaaggacaatgccagtgcaagacatgatttgaagaatgtaggagtcggagaatgggtgtggatttatgaagatgagaaggggaagctgttgaaactgcatgcaccttacgttcttaaaccagatgataggctccaattttgtaaattttttagcgatgtgaaatttcccgatggcttttgttcgaatttgaaaaagaaagtaaatgaaaatttaacaaatgttatcgggttaaagtcacacgactgccatgtactaatgcaacgattactt

SEQ ID NO: 107982 - DNA, 535 bp, Cannabis sativa
cacgtaaaaattttacttgaatagagaaaaaaaaaataccatgacaaatatactattattaactgctatagaattagaatatatatcaataattttctcttattatttaaaaatcagtatcaataacagaataaaagaaatgaattaacttgagatagagaggttaccatagtaaaaatgaacctgaggcaataaagttttttttttttgaaatcaaggcaataaagtatttgagacacttcattgtagaaacaaatatattaagctgaaaatttcaatattttgaaattagaaaaatctttccctgctcattaaaagtaacataatatcaaaactttatattaatacataaacaaaaggaaaaagaagaatcgaaaacataaaatatacatatttgctaatcaaaatctgtagacagtgagaaagtctttggcgttgacaaaattgtatttactctaaaagaaatgccaccatctactatttgaaattaaattaatacgaataaaatgaaatataacaatactcatacatataa

SEQ ID NO: 107983 - DNA, 853 bp, Cannabis sativa
ggttggaaaaattatcccttcgtgtggccttcgtcaaggtgaccccctttcgccctatctgttcatttgggcagcggaagtgctttcgaggctattacacgatgccttaactcaggggagcattcaaggcataaagctaagtagaggtggtccaatcctttcccacatcttctttgcggatgatctaattctgatgggtagagccaatttgaacgaagtcaggggattctggagttgccttgaaaaattctgtccgtggtccggtcaacaggttaataagctaaaaacctctattttcttcagtaacaatacctcgtcaaacatgaggaaagagataaaagaactgttggggattaattcacctgaagggtgcatcaagtatttaggcttgcccctgttccggtcgagacaaaaggacaccgactttaacttcattcttgataatctcgcttcaaagctgcagggatggaaggcaaaggttttgtcaaaggcgggcagggccaccctgattaaatcaatgggcctctcgatgccaatgtatgctatgcaaaccaccaaactctctaatcgtatggtcaaccgtatcgatggtctggttagggatttctggtggggttttgaaaaaggaaatcgtgggctccatttaaaagcttgggacaagttgtgtcttcctaaatctcttggtggtctcggttttcggaaaactagagaaatgaatcaggcgtttctggcaaagtggggatggcatatccttactggtagccaatcgctgtgctgcagagttttgacggcaaaatacttaaaagggaaggatttcctaaaatacaaatataaaaactctgactcttggttc

SEQ ID NO: 107984 - DNA, 953 bp, Cannabis sativa
tttcgagtcttgttctggcaatcattttgcagactactatgtcttgtttttaagcttcttgactattatgctttatgcttctggtgtcagttttctctaatcatgttctttttgtttcatgcacacatgtctcaaaagatgcttgatgctatgaagaagacagttggaggaagctcgagcgcatctcctccgaccaagaaatctaagggcggtgaagggaccccttccaaggaaaaagggcctgctggggaggttatcgaccttttcgaggaactaactgttgcaaacccctctactacaaaagttgctaattccaaggatcctcaaggaggaagttgggacaggcctgagcaatcaaaaggtggatctgaggtgatgcgagctcctactcctcctttgtcagtgcttccagaggctaagaaaggtaaggagatgctcgcccactacatgaaccgattggttctagatgttagtgagcaactggccaatgttgacaacaacttttctttcgagctgcttatgggaggagtcttgaaggaattcacaagggtaagtctttcttgaaagtttcctttaatcctctttatttggttcggattttaaagttttttctctgcacaggctggtctgaagttggcttacacatactcccgaactaagtctgctgcttccaagaatgcggctctgtcaaacaccatgagggcggaggtggacttggccaggaaggacgctgatgacgccagggtggaacttggagctattcggattgagctgggtgaagtcaataagaagctttttactgctcagaagaaaataactgagttgactaaggatcttgaggcttctgaccagctcgaggagaccatcgaaaccttatttgcagaagtgaatagccttcaagatgaaaggacgtctcttcgagctgtccttcgtcgggtggaagaggagaagaa

SEQ ID NO: 107985 - DNA, 921 bp, Cannabis sativa
  modified_base (26)..(27): a, c, t, g, unknown or other
  modified_base (215)..(217): a, c, t, g, unknown or other
ttacattgaaacagagttttatttanngcataaaacccaacagttagttgccatggggttcactcagaaagaaggcatcgattacaatgagattttctctccagttgttaagcaagcttcaatcagagccatgatggcaaaggcagcaagcatggacctagagattgcacggatggatgttagaacaactttcttgcatggtgagttagaagagnnnatctatatgcaacaacctgagggctttgacaatgggaatccagatgaggtatgcttactcaagaagtctctttatggcctcaagcaggcacctagacaatggaacttaaggtttgacacttatatgctgaatattggatacattaaaagtaagtatgactcatgtatgtatttcaataatcaaacctatttgctactctatgttaatctttagcaaagaaaagtaagagattgacaagttgaaaaggaaactcagtgatgagtttaagatgaaagatctaggcaaaacaaagagaattctttggatagacataaagagacctaagcctggcatgatagtactttctcaagctgcctacctacagaaagtattgaacaagtttggcatggacaagtgcaaaccagttgcaacaccacttgctcaacacttcaagttgtttgcatctcagtcaccaaaaatagatgcagaaagagccaagatgagcaatgttccctatgaaagttgtgttgggagtctcatgtactccatggtgtgttctagacctgacttagctcatgtgatgagtgtggtcagcaggtacatttcagacccaagccctaaacattgggaagcactgaaatggataatgaggtacctgaaaggtactctggacactggtattgtgttcagtaaggagaactagttcaaggaagaaatcactggtt

SEQ ID NO: 107986 - DNA, 606 bp, Cannabis sativa
ggtcttaacatgtcatttctcagtataatacatatatattaaattatataatcatataattctacattaatacacatttaactagttagggtttgctattctgttttcttaatcttagggtattacaattaccccctccatatagaaattttgtctcgaaatttacctgaacaactctggatatttatgctgcatatccgtctcgagttcccaggttacctcttccactttactattactccataataccttcactagtgcaatggtcatgtttctcaagaccttctctcttctatcaagtacttacactagtatttcctcgtatgataaatttggctagttccaacgcttcataactcagaatatgggacgaatctaagacatacttctgaagcatcgaaacatggaacacattatgtacaactgctagcattgggggcatagccaacctgtacgctacttgccctatcctttcaaggattttaaaagggtccatgatccaaaaattaatgtcccgtcgctttggatcaacataactcttttgtctgctctgagccgcgagcattcacgctctgattttatcaactacctcacttgttctttcaa

SEQ ID NO: 107987 - DNA, 545 bp, Cannabis sativa
  modified_base (170)..(172): a, c, t, g, unknown or other
aagacgatgctgctaaaaaggagaaaaaactggtggccgggaggagctccctgaagttctatggtcgtatcaaacaactgaaaaaatggcagccagacagactccattcgccatggcatatggatatgaagctatgctacccgtggagctcgagccaccatcccacagannnttgacgtacaaccaagaagcaaatcacgtactcttggccaaatcacttgataaaattgacgagaagcaaaccacatcaaacttaaagttgatagcccatgaacaaaaagtacctcggtatttcaataaacaagtgaaggctcgaaattctttgtggcagatatggtcctaagaagagtatttctaaacaccaaagacagtacggtaggtgtactcagacctaactgggaaggaccatattaggtagtcaaagttttcgaatcgggagcgtacaaattcggtaagtatgatgaaaaaatgcaacttgttctagtaccacggtattggaatggggaacattttagaaaatactaccaatagaagtaccaggtcag

SEQ ID NO: 107988 - DNA, 622 bp, Cannabis sativa
atagaaatgcacacaatagggctccggacatccgtccgtagctatatccaatgccctgaccttaggcctgtctagcatcatccaatggctattttgtaatggttcaaaactttgcccgaatgggatgaactccttacacaagagtgggaaaatgtcgacaattagagactcgtgggactcaattgcccaaccactgaaaacatggcaaacccattgcgtttctgtacgatttagctacttaggctacatgtcaatctagatttatcatttacggcaagtgtcaaatacacatgtcaaatgaacacccacttgtcgtgataggtagcatagaaggaagacacctggaaaaacacctatttgccattaacatggtgattccaaacgccatcttgccgaaacccgaaaatgacgcaccatgagaataacatccgcccaagtatctccaaagactggaagaaaatatgaatcattataaaaaacactacactgagaaaaacgaggctaactataatgatccaatctttcaagattcgtaatacccaaaaactgcttgtaactgcctattctcactcaatgaccttgatgaagaaatatgtaagggattgtgtatatctccacctgt

SEQ ID NO: 107989 - DNA, 754 bp, Cannabis sativa
gtatgtttcacaaccggactgaaagtctcatgaaagtcaaatccataggtttgaagaaaccccttagcaacaagcccagctttgaatttatttagacttccatccggattctccttttttctctgtaaacccacttacaacctatggcctttctgccaggaggaggaggaacaagaatataagttccattctttttcaaggctgcattttcagtttgcatggcagagaaccaatttggatcttgaaaagcttctttcaggcttaaaggttctttagatgccatgtatactttgggtttatagacaccagctttagatatagtgaccatattatggttgttggtgacagcaggggtagtagcagtggtgacagaccctgatatgggtgctgaagtagtaggtaacgagtgagcggaagctgaggtggaggacaaagattgtgaagacgtaggaaggggagcagggtcagatggtggaaggggagtgtcactggaggacgatcctcataaaacaggtggatttggtaaagatgaagcagtgggaatgggaacttgagtactggatgtaatgagaggtgtggaagtagatgtggtggaatggtggctatatggaaaatcatactcattgaaaagcacatctcgagagatgtatattctacccgattgagctaaacacttatagcccttatgcttgatgctataccctaagaacgtgcatctttcagatcgaatttggagcttgttcttattgtaagg

SEQ ID NO: 107990 - DNA, 531 bp, Cannabis sativa
atatttctgcttatttaaattattaatataatgtaaataaaaaattataaaatataattataatcatattgataaaataaataattaaaatatacaatattctatattaaaatgatataaatgtacttgacataagatatacagggtatgtaggcattaatatttttcttcatatgaatagtgttcctttcaacaatgaaggcagatagtgttgctttcaacaatgaaggtaaatagtgatatcctccaacaataaatgaagataaaaatgtgattagagatgaattttgaatgacttttgcttttaaaatagggaaagtgaacattattaagaacttaaaattgaaccgtcaatcatattaattaagagcttcaaattgtttgatatattagctcttaatatgcacgccatagcttataattaaataattcaataaaattgatgacttgtttttctgaaaaaaatgtaataaagctggactagggaacagagatagactataaaagaaacttaaaataatttatgactta

SEQ ID NO: 107991 - DNA, 832 bp, Cannabis sativa
gtgtaaatagagataatcaagagagaagagagagaagaaaagagaaaaataatatttaattgtattttataataaatatttatttattaaatattattaaaataatataataaataatccaatacaagctaaatattaactattatcgtacactaattttattatttattgctataaaaacttccatacaaaacaataatccctatcataaacacgttctatgtttattattacccaacgtagaaaaactctctggttgaaatttaaaataattgaatgtaattcatagtaacatatctgaaaaaatggttaattattattctctaattatgctaaattaggcattagattagatgatgagcaaatttttaccttccttgtaactcttgttcactactcatttcacaattaattaatgaaagtgaacatgtaaaaaaaaactaattaagaactagtaattgatatcgttgcagtttactaacatctagatattgttggaaatagaaacagggaaattaaattgaaaaatgataaagggcaccagtagtgcctagtacactcttatatgtcaatatcgctattggtccaattaagtatcgagtcccatatagtttaatataataatttttagggagtatcgctacccaatcgcaacgcgatatgtcgagaaggtgctaggcaccagtagtgcctaatagcaatgctcaattaaattaggccaccaaacacaatcagagtatatatgattattaaattataattataattgattatattacacaatgttattcttttttccttagggttatataatactatatacttagaaatt

SEQ ID NO: 107992 - DNA, 763 bp, Cannabis sativa
tttaattttaaaatataataaatcctcgttaaagttttataagaaaataaattattagataactattaaattataaattaattattatttatttttatttaatttctaaattaatcactaaaaaaaatgtaaccattctcctccatatctatatatactagattaaagttacgtgcaaaggcacgtattttttgttttgtaaattatttttttaatgatacaacaaataatcatatataatttaatataatttaattttgtttaattaaatttttttttaatataaagtgattaattgaaaaaaaatatatatatataataaatagaagtataagatcagtataagctttgacttattgtttttaataaaaaaatgtttttttttgaagtgtttggatattattaaaaaaaattataagtaaattaagaattatataaattattttagttataataatagcttctcaaaaattctttcgggacttttagttttttatccaaacactcttagaatgacttttttaattttaaaagctaaaaaatagcttctatacttgatcaaatgttatcatcaaacacaatatgtaattatgtacatatatacatgatcacttgaatccaccaagaacttttcaacggattaagtgggtggaagtgggtataagtttctagttaatgaaaattaaactatgtatcatcaatattttaggcaccaaagttttcatttttcctagagaatggaaaactatgatcaatgtcaaac

SEQ ID NO: 107993 - DNA, 844 bp, Cannabis sativa
gcagacaaactttctcccagctaatcacatgtattttacttctattcccattccaaccccgaaagaaccctctacacagcttttctatctctttggtgatgctttgaggcaggataaaaatactcatctagtaattccgaagcccaagaagaattgaatgaattagttgcgctcttcctgcaaaagaaaggtgtctagttttccaagaaagaagtatttgtttgatcttcttgattatcacattacaatcttcatctttccattttgtcggcctcaaaggaactcccaggtactttagggaaaagtaccctcagacagatttaattctctcattctatcttgcttagcctcttttcgaacccctccaaagtacatctgagacttacctgtatttatagcaagccccgagatatctttgaactccatcagacacttctttataacatggacttattgcatattccccttaaaaaataatatgagatcatcagcaaaacataagtttatgatgttgagactcttacgcatggggtggaatctataatctgacttcttggctgccatttgcaacttccttgttaaaaactccattatcagaacaaacagaaggggagaaaggggatccccttgtctcaaacctttcttccctttgaaactgccttgaactcttccattcataagaattgagtaagatgtggctctcacacaagtcattatccatttgatgaatctagctggcagtttataggcattaagaagatcctccaaaaaaaaatcccaatttaccgtatcatacgctttcctgatgtcaactttgatggcacatctaggagacacgttcttc

SEQ ID NO: 107994 - DNA, 838 bp, Cannabis sativa
  modified_base (799)..(799): a, c, t, g, unknown or other
aaatattgcaaaagccagatgcctctggacggctactcaagtgggcggtggagttgggccaatacgaaattactttccaaccccgaacaacaatcaaaggccacaccttagcaaactttgtggtagaatgcacaggcaaggaaagaagcgtactagaaagcaaccccaagccagtacaaacacctcagcaaagtaacagtgaagataagccgacctggaaactacatgtagacgggtcatctccaaatcagctatctggtgtaggatttgcccttgtcacgcctgggggcaacacctgcacagtgcagtcaagtttggatttaaagcatctaataacaaagccgagtatgaagctctaatatctggcctaaaactagcccgggagatgaaagccgaacacattgaaatctacagtgattctcagtttgtagtaaatcatgtatccgaagaatacgaggctcgggagaaaagatgataagatatctgagcaaaatacatgatctgctcgcacaattcaaaagctatggtctcagacaaattccaagggaagaaaacacaactgtagacgcgtttgcttgattggcaagcagtaatgtaagtgacaaggcgaacttggttcctatcaagttcctcgaagagcctagcatcgctggcacagaagaaattgaaatgattgatacttccccaaactggatggcaccaatagtcactgacctcgacactaggaaacttgaagataatcaaaatgaagctcaaaaaatgagaaggaaggctacatggtatatcatagtagaggganttatgtacagaagaggattctcaatgccattgctcagat

SEQ ID NO: 107995 - DNA, 522 bp, Cannabis sativa
  modified_base (51)..(54): a, c, t, g, unknown or other
aacttcttacataaaaaattatcacaagtaatctataacaaatattaactnnnnaaacaaacattatcacaagtaagaaatcataagtaagttaccaattagacatatgttcgtttctttttttttcatttatgtttgcctgaatcataattgacccatattctctaattaatatctactgacctcgcttctagccaacgataatgaatcaaataataagcgattaaatgatataattaaaagagaacaaaaacaataaggtaaagtgaacaacagattttaaagtggtttggccccgtgagtgtggtaatagcctactccccttctattgtattgacttaagagaaggaacaaagtgtgcttccccttgaaagctcttacaactgatctctgagtaactctcttagatcactattttctctcgagagcatatttctacagcaattctttcaatccctttcatagtgaggctaggtcactatttataggggcttaatgcatgagggatggtttcctttttgc

SEQ ID NO: 107996 - DNA, 615 bp, Cannabis sativa
cctgaatattcctgggaggagtgagcaattttcttgaacaaaacctgtatgaaaccataacaccaaaaacattagcaatatcataatgacaataattcttataaggttgagattttcttctagaacaaagacaaagacaagacattatgaatcctaagtcaactaaaaaatcaagggtcatgaagaacacaaacattaaacagtacaaactcctaaggatttccttggagatataaaacggaccgagtcaagagctttagtaaaaaatctgctatttgcttgctagtttcaacatattccaagacaagacttttattttccacaagctttttaataaagtgaagacagatgtctatgtgctttgtgcgagagtgttgagtaggattttttgaaatgtttataacactagtattatcacagaaaatagttattgttttcagatcaaacccataatctgccatcatttgtttcatccataacaatttggtgcaacaactacccgcaaaaacataccaaacctatgcagtggtcagagagattgagttttgcttcttgttgtgccatgaaacaagattgtttccaagaaagaaacatccaccactagtactttttcta

SEQ ID NO: 107997 - DNA, 847 bp, Cannabis sativa
ttctgtattcgaaaggttggggatgactcgtgacctaaggaatgacctgagcagaaggagaggaattgacgatcgtgaagctcggagcccgtgctcaaattcatgctcagtatgatactgatgtgattcaaatcgaccagaatgctgagcaggttagcccagccgtacaggcactactagacgaactgaaaaatatgtttcaaggcatggctggacaaagaaatattgatctcgagctggaccgagcatgcaagaactccttaatcttccgagatcaatgttctggcattgccccacaagtttaaaatgccgacatggaaaatgtacacaggaagagaagatcctctttctcacatcaagtatttcaaaatgcaaatggatttgcaaggggtacgaggggacatgtgttgcagaatctttcctgctaccttgtcggaagcctcccaacaattgtatttcaagttggcccctagaaagttcagttcatggaaagccttctcttcagaattccatgcacagttctcctcctctctccaacttccgttgcatctaggagacctggttgaagtcaagcaaagaccaggcgaacctctccgagcatacatcaacagattcatgacggaggcgaccaaagtttcacgggtaactaatgatggaaagttatccgcgatactggggggcattgaagtcctttgtgaactttggaaggatataaggaagaacgggtccgtacactcaatgagtgattttcttgaccgtgtcgaaggcttcatcaagctcaaagaagccattcaacgagcagaaggtgagaaaaagccttgcaagttgaaagctccttcaattggaa

SEQ ID NO: 107998 - DNA, 682 bp, Cannabis sativa
cccacccaaacctgccttcaaccatctcaaaccagacaaccataaaacatctcaacctagaaaacttagtcactcaaaccagaaaacttagactctcaaattaaaaataattgcaaaaaccagaacaatctcaaactaataaccaagaaccaaactcataccataaaacaatcacaccatgtcacaaagacaagacttacggtaacggaaccgaacggaagacaaaagacaaaagacaaaaattttactagataaactaataacagtaaattaactaagaatctatccccatataaacctaattagaattaactactaacagaaattaaagcaaactcaaaacaagatccccttgtcgctgcctacgtcgctgcagaatcccatcgtcgaaatcatggtgcgtgatcatcaaacaaccaaggacttcaaaacagagacaaatgtgatcacatggaagcggcaacttcaatacccgagtgcttcaataacaaagaccaatgtcgtcgtcgtccctgcaacttcgtcgctgacgtcgtcgctggaagcggctggaatcacatggaagcaagatcccgtcactgccttcgactgggactgggaagagcaaccgccgacggaccacttctgatctgaaacattcggaccacttctgatctgaaacatatccatttagttagagcgg

SEQ ID NO: 107999 - DNA, 684 bp, Cannabis sativa
gagggttgcgtcaaggagatccactgtctccttatttgtttttgatttgtgtggagggtctctcattgttgttaaagcattatgagaggcatcattggttgactggttatcgagttgcacagggcgctcctatggtggctcataggctatttgcggatgacagctatgtgttctataaggccaatgagaatgaagctcaaagtgtgttgcggcttttacataattatgagcttgcttcgggtcagcaggtaaattttgccaagtcctctgttttctttagcaaaaatgttactttgggtatccgtgatcatgtgtgtggacttatgcgtttaaatgtggcttcaaatgatagcttttacttgggtctcccgtgcataatgggaagaaacaaaaatgccattcttggttttttgaaggaaaaaatgaagaagaaaatttttagttgggagactaagtttttgtctaaagctggaaaagaagtgttgattaagtcagtggctcaagcgtaacctaattatgcaatgagtgtttttcttttgactcaagaaatttgctcgagccttgaagggatggtggcaaagttttggtggaaatcccaatcaaattcttctagtaagggagtgagttgggttagttggaagaagctttgtcaacataaaaattttggtggtcttggctttcgtg

SEQ ID NO: 108000 - DNA, 722 bp, Cannabis sativa
caatgtgggactctctaacacctatcaccaagtccaactagactttgcaggtaaacgcacacttgaaattggataggcataccaatatcatcacattcttagccttattactttccaaaaaaacatgaatcttgatccattaatattttattaccacgaggcttcaagtatgtaaattgagaatacataacagaaagagcttagttatctcatacccaaatacgtatgtaacactaaggtgtttgacattatgtacccacaatgcgaatttgatattagccaaatcttacagcctatcactttgtcataaaaaattcggttgttcctttctaaccaaaaaaataaaaaaaaaccagttacagtggattgccatagtttttcttgtgttggttttcctctatatggaactcgatggagcatcattgtcctcatcatcgtcaccatcttcatcatcttcatcatcttcatcttctttcggcagatgaagagttgttcggtaaatctccatcacctgtctaagctccaaaaccaatgtgttcttcatctccgtcaccgaccgttgctccaatttcgagactagcaaccagactccgactgccctagcccttaatttcacttgggacaggctatggaggtgatgaatttttttatataatatatataataacctctctatataaagtgtggctatgtaacagaattcttggtttaacgattatttt

SEQ ID NO: 108001 - DNA, 545 bp, Cannabis sativa
accttcaacctaaattctaacttgctacaacattgttaatatgtgaaaatataataacttataaaaagtttaaagtaatttacggcataaatacttaagtttgtcttgcagttgcagattaatacctaagtaaaaattttggcgataaaaataagttctggaacttctgtaggtacctcaaccttaagtgacagatcattacacacgtggcagtatcttattgatccacatcattaatttttattattttttaaaatttcatataaaattatataaaaagaaattaaagattaaaaaaaatactaaaaacttaaaattaataaaaacataattttttaaacagataaaaaaacattaattaataaaataaaagattaaaaactaaatcaaaatttgaaaagtaaatgaactaaacctaaatgaccaaaccctatcgttatcccagattcactaacccatccctctttttcttccttcttcttcttttcttcttctacagctcagatcaatccagaacaaataaactaaaccatttcatccttttc

SEQ ID NO: 108002 - DNA, 753 bp, Cannabis sativa
agtaaattgatagttgagggggttttgccgcaaattactcaataaaaattgtactatatcattaatagcgttatttgcgacataactttcttaagtagtcaaatttttacaactaacccaaattctaaaattttagtggcaaaaccctctaaattcgtgttctattagcagtttaacatttcaatcagtttttaggtattaactgccatggtggaatgtctacgtagacacagtatacacgtgacataattttattggtccacgtaagtaaatatttaaaaaataaaaaattaattattttaaaaataaaaaacataaaaaaatttctttttctttaaaaattaaaaaaacaattttagaaaaataaaaattaaaaacctgagtttaggaaatttaccaccaaaattttagaattaggggttagttacaaaaacctaaccacttaaggaggttatgacgcaaataactctaattaatattattattttataactaataatataaccactctatgaaaattagtaaagaatttgaaatgaaagaccttagaaaggccaaaaaaattctgggaatatatattcacagacctaaactaaacttcataactctctctcaaaaggattatctgtaaaagattcttgataacactactataaaaatgagttttctcgacgtttttaaatagtcgtttaaagtattcccgtcagtttctataatcgtcgcctatacgaccgtcgtaaaacgggcagaata

SEQ ID NO: 108003 - DNA, 733 bp, Cannabis sativa
tggattaatttttgacacactaaaatccaaaccaaacattttgcaagataagttatgtgtaagtttagtaatactttttatattagttttttttagtttttaaattagaaaagtgaaaaaaaattcaaaattgtgttttataaattgtttttacttttttactttttttaattgaaaatcaaaattttgaaagaaaaaaaaattatcttcaaacattttttaaacagattttttttttcttaatcgatattttaaactctgactctatcatagacttttgaacctagactttaaccctatcctagaccttggaacccaggccccgacccgaaccaaaacccgaattcggactccaaccctagacccaacccccaacttggacacgatctcgatttggactcggacccataatcggacttagacctcaatccaaactttgaaccccaaactgaaattggacccctaacccttaaaccggacccgactcgaacctagacctgaatctggactaggaccccaaatgaggacctaaacctggaacttggacctcggctttagagccgaattaggccatcgacccaacttaaataaaatcaataataaaaataaaaataaaaattacaaaacacgtttttattttttttataattaaaaaatataaaaacaaaaatattatctttatatgttatcaataaaagagtaatttggagatgttattattaataaaaagaaa

SEQ ID NO: 108004 - DNA, 549 bp, Cannabis sativa
  modified_base (425)..(437): a, c, t, g, unknown or other
  modified_base (489)..(520): a, c, t, g, unknown or other
gaaccatgcagtggttccgccataaacaactccatcattaactcaccgagcccttttatcaaatgcgactgcacttttaataatggttctctctgtcacattactaaactgtacgtacatttatttttatatatatatatatatctttatttatttactaaactgtacgtacattatgtgtttctttttttaataacttagtcattaggtttattttaatttttatattctttaaaagctaatttgtaatttttctccccgaactttgacatatactaaatcatgccccctgaacttaaaaatccctactgaactattaagattgttatatttaatgacttttgtctaatttcattcaattttactgtttcagtgattgtttatgtactaaaccatgctctccagattttgatatctaccaaatnnnnnnnnnnnnntttgatatgtactaaattatactcctaaactttcatgttagaattttttttnnnnnnnnnnnnnnnnnnnnnnnnnnnnnnnnaatcttaatagttcaggaggaatttttaa

SEQ ID NO: 108005 - DNA, 779 bp, Cannabis sativa
taaggtggaagtgtataaagacatgcaattggtcgttaaccaagtattgggagaataccagactcacggagaaaagatggctgcttatgtctcaaccgcaaaagcattgctacatgaattactgcttaaaattagttgcctatcatcaccgccagcgatgcaactcacaaactcagtctcattcgctcggggacataacatatagtaaactgtcaagtaaaaaataaaacaaatatattaatagatggaaagtaacatgaaataaatgtaaagcgtaaaaaacttacatttttagcaaatagtcgtatcactttgtccttgctgagtatcgttttcggcttactcttccagttcaccattctcggaaagcaatgtgacttcttcactacatacccattgcccagctctaggatggcctcgtatacccaatactacaacgttgcagtatagtcgtaagatgagtatttggcctccttctaactaactcccttttcaatcttcttaagcatcctatttttcacatctatgtagtctttattaaaagtttccatcaacttgttgtacgaaatctttcccctcaggtactagtagaagaatggaaggttgccaatcattcttatgacaaaaggaagaacgacagtcttctcttccttaccagtgaggacacccataacaaacaaggccatccccaacttgtaaacatcatcaacttctgtgcagctcacaaaaactctgtgcagttagccaaaactgaaggaaggattaccgttgaaatactc

SEQ ID NO: 108006 - DNA, 633 bp, Cannabis sativa
aactttccaaaagagaattgcttctcttttaagaagtttccaaacaaaggaaagttcagctgaaaagtgcaactttcctaacaaggaaaagagcagctacaaacagaataaacaaggtaagaaatcagttatgaatgcacaagaatcttaccataaaagtaaaaaatattttgtcaactaacttgccaaaaaaggactttacacttatcatagttccaagaacagtctcgttaaatcttcgaattttaatgtttttggcaactatgtaatgatcactttcaccattgatcattggaattgaatatgtgatgctatgattatcgttcactctatccttctattctttttcttctttaataattacagaaaaaaataacctaagaagaaaataataaaaaatcttaaacatgaccttaaacattattaacttggaaaactaataaacgtaaagtgtggcccaactagtaaagaaagaccataagcaagatactctttctctatatgtataaagccaacaattttaaaaacttgtaatacctactagttcaatagataattgatgtattggcaattgaaagtcacctcattatcttgaaatatttctaatgcttgcaacctaatgatgatcatttc

SEQ ID NO: 108007 - DNA, 615 bp, Cannabis sativa
ctaaaatttttaaaaacttttgcgacaattattctattaaacagtttttttttttttattattgagtttcatgcactttcggtgtgtcattaattagttactccactcattacttaattttatttatacttcatatcaattggctaaacgcatatattattaattagttttaggattggatacaaataattcctttcattctcatctcactacaaacaagtgaacagaagggaaatattctttgtgataattataatgcgcaactctctgggtactattggtatgtgaacatgtgatgtggaatgttatattgtcccaactttgtacctacttgacatatattttcatatatatatatatgggtggacttttaatgagtatcatttatgaatacgtaaattagaaaattttgagtatttatgcttaatttttttatctaattaaaaaaatctctagtttttatatcatatgggctgagattattccatcggtaaaaaaaaattaaaaaaaaaagtttttaaatagaaaaataagaaaaaaaaaagttgagtttgagttaaatatttttatatgaatatatttttgatatagtgtaaaaagagatattttttgata

SEQ ID NO: 108008 - DNA, 516 bp, Cannabis sativa
cggtaagtgatacgcccaggaaaatgctcagccaaggggagaatgagttctggagccatctgcaaatacaaacagaaagattataaatcgcatatacgtcgcatgaaaatcgcacagaaatcgcataacaaccacttaataacatactatatcgcacaagctcgcacataaatcgcactaccagaaataatttaattatgtttgctggctggcaacatatttgaatataaatcgcacaaaatcgcacaaatttaacaattgcagacacagtagtcataaatcgcacaaactcgcacaagacatcgagcaaaatcgcacaaattcaacaattgcagatacagtagtcatttatcgcaaataatcgcacataatcgcacagaaatcgcacacacaatcccacaacgaaacagaccttaaattgtatcactaattgcatacatatcgcatacacatcgcacaatgtcgcacaaaatcaaaaaaccccccaaaatctatctccctaaactcagtttcttc

SEQ ID NO: 108009 - DNA, 659 bp, Cannabis sativa
ccaaaactggaagttgattgggacgggaactaagacttggacttggaatgataactgaaattggacctagatctagaaccgtaaccagaattgggagccggaccctagtcccaaccagaaactgggaatgataactgaaattggacctacatctagaaccgtaaccggaattgggagccggacccagactccaaatcagacctacacccgaattgggagccggacccggataccaaccagaaactggactcgggacccaaaccggaacttgacctcagacccaaacatggaactagaatagggacaaagaataaaggtcaggacctagaaccccaccccagtctcgatcctgaactcaaactcagaaatgggacctgggacctgaaccagaacgagaatgagacccgtgacagtgattcctatcttgactcgagattcgggtaacggggcctggaactgaccagtagtcggtgtctagatctgggactcaaacttggaccagaacccagatgaagaaccaaacccaaaccagacgtagacctgggacccgaaattaaaacaagaacaagactcgtcgaaccacgaccctagaacaagactaagaccgtgaccaggacccagaccaagacctagaaccgaacacaggcctagcctcagac

SEQ ID NO: 108010 - DNA, 998 bp, Cannabis sativa
tttatgatttgaaaatcgtatagttgtgattttctcacttttattgggttaagacaatcgtgtattaaacacgtctttaatggttgtatttgtagatatctcaacagaaacttggttatagcaatcccaatagcgagctggggccattctttcttccgaggtcgacgatgtaggtctggcgtcgatcgtggttcttacttgcaaagacttcttctgactcgctagggttgtaagccgtgttaccgttagtgtgataaagctatgggtagtcttcccatagcgagacggtcacctcgcttactttctctcgagccgatttaacttttatacttagtttgttcattgtatgctaaggactttcatggttgatacgtgtcactttctccagtgcctcactattcatatttagcgacatatggtttctcgctaatacactaagtgccaatttgtacatcgattcctcgcctaagaccttagagtcagcgggctataaatatactctgatacttacgtaattaatgagttattccataaaaattaatgcaccgattaacattccctttgacacgtgtcctccagctgaatttcgggtatgacaattgccccttaaaaagttcttttttttttagtaaaaagagatttttaataattacagagggcattttcgtcaagatcttttcttggaaaaaacgcatcctttgattctggcggttgtacggtttcgagagtcattatgaatcgtctcttcatattttgcacaacttccaaccgttatatttctcaatcggcggctcaagcttgtcatttttcacaaacctttggctctttagtgagatccattttcagaagagatcatctctttcctgccaaaatatcccttctgagttcagaagttcatccttccaaactcataatacccaaatacaccaactattttccatttgttcctaaagacttcaagcttcaaccggagccgaaaacgatggattccaaggctg

SEQ ID NO: 108011 - DNA, 836 bp, Cannabis sativa
atggctttcacacctcagtatgggtagctctattccagcaaggggcctgacaagaaactgaaacaaaaattgttcaaatctatacattaatactttagtttatcctaatcacacatatgtaattaacttgaatcttttaacccaacctcaaaagtatgaagagtacaagacactaagctaattatcatctaaaagtataaacatgttttgtcaaccaagcatgaaagaaggatagaggaaatataagaactactcaaaattttgtacaaaatggagaaccaaatgaaaagaattaaataatgcaaacccccaaagattttttgagggagtcaaactgacttaaatctagggctttagtaaaaatatcagccaattgcttttcagtatcaacatattccaactgcaatgtttggttttcaacaagttccctaacaaaatgatgccttatatcaatgtgttttgtacgagaaggtttaacaagatttttagaaatacatacaacactagtattttcacatgcaaaatgacaagtaagaacagatgtgagagtgtagcaattatcaacatatctgaacccttgtaaaatgcattgtttattactgttaagaacaaagtaatgatcattgttaaaattgacggtatacccttgatcacaaatctgactaatgctaagtaaataagcttttagtccctcaataagcataatatttttcaaccttggtaacccttcaaaattgagagttcccataacaatgacattttctgtgggcccttacgcccacagaatgatggctcttatacatgactgcatcactctagttgtttcctggactgac

SEQ ID NO: 108012 - DNA, 636 bp, Cannabis sativa
ctagggttttttgtatgactcatcttgaacccaaatatccctctcctttaggtagatcttgttagtcaaagacttttgttgaaattgttcttcaagcttcttccaaatcttggcaggagtttcttctttatcaaccaatctgataattgcatcaaaaagattgaaaattatgatcccattagctgtttccaacagctcttcttactgtatctttgaagtgttttctggccattaatagggtcttcaagaaccctaagtagtttctgttgagccaatagggatcttatctttctcctccaaatcctgtaatcaccagatccatcaaaacgatcaatgtcaactttgatattactcattttaataaaatcgaaattaaactgagttgagttttgagaaattgattgagtatcctaaataggatcattcagtggaatttccacaacttttccactatccacaacagcttgttgtgattcttcttcttcttccagcctttgtcaatcttcttgattccttttcttgagttgtattattctcgaaccagagctctgataccactgtaggattttcttgtgctctttccaagaatgcccctacactaactcaagaattgattaaaacgacaaggacaaaatt

SEQ ID NO: 108013 - DNA, 617 bp, Cannabis sativa
ttggctcaaagatggggacaagtgttctaaattcttctttctgtcggctactattaaaggtaggagaaatgccattgagattttattaaccaaagacaatatttggatcactgatagggatcttatcggcagagagtttattgatttctttaagggtatcttctctggggcggacaacgggcagtcctatgactgcagtggtttatttcaagagagaatttcttcggaggaggcagagaatctacttgactgccctagtgcagacgagatcagaagaaccctttttgccatgaataagcataaggcccctgggcctgatgggatgtcagttctgttctacaagcattattgggattctgttagcgctgatttttgtgaggcggtgtcagacttttttataactggtaatatgcatagaggcattaatgctaccaacattgttctcattccgaaggttcaaaacccgaaaagaaccagtcatttcagacccatctctctctgcaatgtcgtgtataaggttatttccaagatcctggcgaatagaataaaacctttgttaccttccttcatttgtcctacacaatctgcgtttattcccggaagaaacattcatgaca

SEQ ID NO: 108014 - DNA, 1308 bp, Cannabis sativa
attatatatattttgttatatggtatataagttttattgtatagtatattattttattttagattatgcatatttaatttttcttatatatgtaaatgtgatatatatttaataagtatgatataattattttatagttgtatataattttattaattggtagatacaattttttcaataatattatattatttttttatttttttttattataggtatagatgttttgatgtatgatatatggttgttgttgtatatagtatatcatttatttaagatgatatttacttttaattttattatatataaatcttttagtatgtatacatattttaatagtggtatatataattttaaaagaatgatagataaattttttgagtattaatttagtcatgatataatttatttgtggtatataattttattactacggtatattaattttcagtgatatgatatattaaataatgttatgtatttatttaatgatctaatatatttattggattttgttacaatataataaaatgcaatactaaaaaaattatataacttaatttaattattatatattttcttaaagaaataatatgtagtaaatgtattttgattaattttattagctagtttattatatttggctattttcttaattttttttaaaaaatgacatttactaacttagttttcaaatttagtgccattttgcatctcaaccctattaataatatatatttttgttattattattattgttagtatatattttggttaatgatatatgtattttttgttacacgatatatcattttttttaaataatgtttaagttttatttttttattgtatttttgttgacatgatatataattttattagcatcttatatatttttatttttatttgttgttattatatatttatttttattgtgaggtatatattttttattatatggtatataaattttattgtatagtatatcattttattttagatcatgtgtaacgccctaatgctaaggcacgctacagtgctttttcaattacagtgcagtctttgctatcaaagaattttcttgaaagacgtgttaaattaaaacttttatattaattaataaactttataatataccaaactatttacaagttccaggctcgatcccgttttcaaacttttgaaacataatactccaaaacacatattatctaggtcgcacagcgactacaaaacacaaccccagatgtcctaagaccgaacactccaggtcgcgcagcctcaacatgtacaacctcatcctagctc

SEQ ID NO: 108015 - DNA, 559 bp, Cannabis sativa
  modified_base (118)..(120): a, c, t, g, unknown or other
  modified_base (488)..(508): a, c, t, g, unknown or other
gaattaaatgactccttctgctcatatctctaacccttgtatcctttctgtagcagagtatcatcaagatctaagccagattctccttctcttgattagattcttcacagtcttacannntatgattgagtaccaacttaatatgtgtgggcacgtactctatcactatagggttcaaaagttaaagtgaaaaagagagagagagagagaaggattcgaaaatagagagaagagaaggcttaaaatttgactaaaggcaagtgaattcttctcattccaattttgagaccatcactatctatttataggaatccaactaggtttaggtttgaattatttggcacaaaaaaattaataaataaattgtaaaatacaccacaagtggtcgaccatggatgtgggccctaccactttgcaattttgccattttcaactcattatcttattttctcaaaaatgccatatttttcaattcaaccacttaaatnnnnnnnnnnnnnnnnnnnnnattaaaattaattatcaaataaatatgctatttaacatatttattaattag

SEQ ID NO: 108016 - DNA, 1095 bp, Cannabis sativa
taaacccaaaaatacaacataaaaaacttgtaagaaaagaaggagaaaagtcacttactgtttgaagtttgtttttgggatgatgaacgactctacaatttatgaattagcgaatgtcgtgaagatccctccgaatgcttaaactcaaatattaaatcggatgaaactcataggaaaaatgttagtgacaaagatggcatgcaaattttcgagtaaatctggtgatggtttttcggcagaaaagtttgaaaatttcttagaatttctaaaatggcaaaagtagtgcaaaggtggttcccttttccattttatactcctgagttaatctcccttagattagagggataattgatcctacgggtagaatttgaaagagaagtggaaaagatggtcattaattgttgatgtccctcgaaaccacaaaactgctaaaatcagaggacatgtatttttcaaaaaggaattatgacaaatataccctctataatcatttaaaaggcactttttattaaaaagagctttttaaggggcaattgttatactcgaatttggctggtacttcagagggggacacgtgtcaaagtgaagaatacgaatcaacaaatataatgataattatattagaagattttaatatggaataactcattaaatgcagagctgatagagtatatttataacttgctgactgtaaagccttaagagagataaggatatacaaactattgtctcgcgcattgacgagaaaccatacaacatcagtagtgcagggcgaggcatcaacctcgctatgcatgagaagatgtagaccagacatgatgattgttaagacacttagcgtataatacgtcttatacaaactaagtataaccgttgaataaacttgaatgacaaatggcaaggcatccgtctcgctataggaaggcatactcatggtaccttcactaatcagctctaaacatctttcaatgaaattcactgtactgtcgagtcagctctctcagatagaagctaacattcaaatgatgttgactgctgaaattcatcttgtcaccaagaactgcgattgtgagatggagcgttatgtcttcaagc

SEQ ID NO: 108017 - DNA, 588 bp, Cannabis sativa
aaattaggcataatggtaaaccggtgaagcctggatctttatacaagtattacaagtctcacccacaaggtaaacaattttaatttgttatgctatggctgtttagtggtgagttttaatgtttatttttttagtgaactttttaatattttaatgtttgttatgatagttatgaacttttaatggttattatgttatgttatgatttaatgtttttaatgttatgtttgttatgtttgtttcagaatttttcatgtttgttatgttaaacgttttttttttatctcaaagtcgacagtatatcgacattccatcgatatattgtcaacaatattgctcgacaatattgctcgacttaatttcgacatgctatcaccaaaatatcgacaaattgttaaataaattatgtatgttaatttactttgttatcgacatgatatcgacaaactatcgaaatcatgtcgataatggtcatccctgacctttcttcgtagaatatcgacatagcatcgatattctatcaataaactgtcgataatatctgcaaaacctagattttaacataaaaccatatctactagatctcta

SEQ ID NO: 108018 - DNA, 610 bp, Cannabis sativa
  modified_base (164)..(165): a, c, t, g, unknown or other
gaatcttcgatcattttcggccagaaataaccttaccttagaattttcttagataaactctacccggcagtgtggtttccacaaaatccatcgtgcatttcagacaaaattcgtgcatcttgttcttgggtaacacatctaaacaatggcatggagaatcctcnncagtacataattccctctactatgatgtaccgtgcaaccttccttctcatctttcgagattcatttcgattatctgggagttccccagtgttgaggtagggttctattggcgtcatgcagtttggggaagtcctagtcccgatttgggttcgggtccgggtttgggtcccagtcccagtctgggttcggatttcgggtcccaggtctgagtttggttcttaggtcctgtgttcggccccagtttttgggtctggttttggcttcgggtctgcgtccaggtctcggtcttggtttaggtcctaggacacaggtctcggtctgggtccaagtctcagtacgggttctagtgtgagtttaggtttaggtttgggtcctactacagtcccatgtccgggttctagtcccagtcttggtctgattctggttccgggtccgggatcgggtc

SEQ ID NO: 108019 - DNA, 674 bp, Cannabis sativa
ggcatgtggccttttagctttagaccattactcacttttgtgttccaagtggcctgcggcctttttggaactttattttcatgtgttatatgccctgaggccttttagaacactactttgttttcagtcccagggccttcatgttcgtatctttggtcgtaatctctctattttttaacactgctagtatttggccatgttgcttttttatcatggatagtgtgaccgaccatgtggtctttaatcctggctatcttcttatggccttgacaagtaagggtctaaatttactttgccaagctgaaatatgcctgcatgacttagaggtaggtttagtagcttatactaagtgttaaaatttctatacataagttctttgtgctagttcaatgcatttcatagtatgggtgccccccaagtgaccatacagataagtctctgggtcacttgctattcaccaagtttcacagactttgcatgggttctgtcttgcgagggtaccatagtacgcatgtggaactaaaagattaactttaaaatattaatctgtgagcaagtggttcatagacacaacaaacataatataaatactgttattatttattaattggtctttgttgctgtgcaacttacataaattgaatatacaagcctatattacacaaatttagctt

SEQ ID NO: 108020 - DNA, 820 bp, Cannabis sativa
  modified_base (54)..(63): a, c, t, g, unknown or other
taaaaataaataacacgaaataactcaaacctgttataactaaaatagaaccgnnnnnnnnnnataatgaatgagtatttttggggtagatattgtatgagtataattattgaggcaatgacattgtatacctagtttattttatttattttattttttcattcaattccatattttttaagatatatccacttttataaatgatattctaattataacccataggttgatgtaaattatgtactagacttaagcggagagtgaggatatattagaaaatccactcacaaaagttggtactttttaataaaatataatataaggttatttttttattaatgaatacaaaaaataggtatttttcaactaattattctataattatttggtgggttggcgcatgttgaatcgatgtttttgtttgagttattttatttaactagtttttgtgtgtgagtttttatcttagttgttttacaaaactagttttttgtcttaaatttttaagtagttaataaatataaccgatttcttttatattttatatcagtgttattatttgtgtttatttatttttttatggaatcgtttcttttcatatttatgcctcaatattttttggaattgatctccatttttttttttaaaaaaattataatcagttttatgaagtattatgtgttatgaagtattttattgtggaactagttttatttttaaattatgttttagtgttttgggaactgattacctctttattttttaattgtaattggtttgagttattgcgtgttacttatttgtattcattatgttatat

SEQ ID NO: 108021 - DNA, 1268 bp, Cannabis sativa
  modified_base (183)..(194): a, c, t, g, unknown or other
ctacttggtcatgcccttcgggttaaaacacgctggtgcaacgtatgagagaatggttaaccggatgttcaaaggccttttgggaagaaatatggaagtttacatggacgacatgctggtcaagtctaaagcatgtgggagtcatgcggacgacctcgcagaatgcttcgaagtggtccggannnnnnnnnnnnaacttaacccgaagaagtgcactttcgaggttaaatcagggaaatttttgggattcatcgtcagccaaaggggaatagaggcaaatcctgaaaaaattcaagctttactaaacatgtcttcccccaagaaacacaaagatgtgcaaagcttgatcggaaaagttgccgcccttagccgattcatttcccgatcaacagacaagtgcatccctttcttcaacattttaaacaagtgtcagaaatttgagtggacagaagaatgtgaggaggcattcaaaaaactaaaagaacatatggccaaaccttcgattctatcaaagccagttcacgaagaggacttgctactgtacttggccatctctgagaacgctgtcagcgcagccttagtccgggaagaagaaaaagtccaacatccggtgtactacgtccgcaatcgtatgatagggtttgagatacggtatccattgattgaaaagttagttttttgcctcctgatggcttcaaaaaagttaaggccctacttccaggctcaccccatcaaggtattaacaaaccacccgcttcggcaagtcctgcagaagccggaagcatccggaagactcctcaagtgggccatggaattaagccagtttgacatacactacataccgcacacttctataaaaggacaagccctagctgacttcataacagaatgcaacgaagcagaagctagcgcaaatgcaccagtaccacaaacttcagcatggaaactattcgtggacggagcgtcaaacgaaaacggatccggagcagggatagctatgatatctccgaacggacttcgactccaggcggctttgcgtttcgaattcccgacttctaacaatgaagctgaatatgaagccctgattgcagggctaaaattagcaaaaaccgtgggagccacgagagtagaagtcttcagcgattcgcaattggtggtaaaccaagtcttcgaagagtatcaaatgcgtggagaaaaaatggctacgtatgtaggaatcgtccgggagctgctccatgagttcacagattataaagtggaaagaatcc

SEQ ID NO: 108022 - DNA, 750 bp, Cannabis sativa
  modified_base (454)..(468): a, c, t, g, unknown or other
ttttataaaaacacagtagttttgaaaaaaattccgtgtgacagtatttttgtaaaagttaaccaaaattctagtatttttgtaagtttcccacaattaatgaataataactgttaaaagtgtttattgggaccttgcagggccagtttgaattttagtgggccaggaaaaagaaatttttttgaacccttgtttaaaaaacatgtatttcaaaatttgtaaaaggaattagggtaaaaaccattttggatcttgtgttttacaaaaattatcaattggacccttattttgttaaatgacaaaatagactctgtattttccaaaatgatacaaataaaattctgagcttaatttttgacaatttttttttaatataacaagcttgaaaatacgaacatatacaaaaaaatgaaaacaattttatcgtaacacttttagatcggattattattannnnnnnnnnnnnnnaaaaatcagttcagggtcctatttttaccattttaaaaaataaaaaatctattttttcatttaacaaaacagaaggtccaatcggtaacttttgtaaaattcatagtccaaaatagtatttactcaaacaaaattatatgtttttttaaaagaaaaaaatattttttttgtactcctaggcaccggcatagtggtttttcctatattttaacaaacttttacatcgtttcaaaaaaaaaaaaaaacaaccttttacatttttagcttttctatttttttttt

SEQ ID NO: 108023 - DNA, 926 bp, Cannabis sativa
  modified_base (237)..(240): a, c, t, g, unknown or other
tatctataaataattttcataataaatcataattaaatgctaattgccaaataaaactaagcggtctttacacacatattagaggcaaagctcttcaagaattttaagatgcccaagatggcaacatatacgagagactcggaccctagtgatcatttatcccatttcaaccaggtgatgaaagttatgagggccaggaatgatgccaagtgtctatgctttccgctaacattaagnnnntccgctgaggaatggttcaaaaagttggaaccaggatcagtggactacatgaacaagttgcaagttagcttccggaggtagtttgtcacaatgagaaagattaatctcgaagtcaaccccttgactaacataaaacaattgcccacagaaaccttgaagaactttataaaaaggttcaaagaggaggcttcaaagaccaagaaggtggatgacggacaacaacttgcacttttccaagctgggattcgtacggggaccccattctggaatgaattacaataggagggagcagtcaatctccaagatttccaaaagagggtccaaaagtacatcaatctagatagtggcctacgggggatactatcgaaccggaatgtcaggatacatagtcagagctcagctctcgagagccatgcccccggacactcctcaaatgagagacatacaattctccgctacaccagcttataatcagagcctagccttggctcccgcatcatcacactttgggaatcccataaacaaccccttggggatgagtggtcaagctccgtctcagttcgctcctaccgcaagcctgacaggacctcctcagagctcccggagcaagaggtcctcaaagggtagcaacgagacggaggataagcgacaacagaggatacacccctcaatatactcaatacatg

SEQ ID NO: 108024 - DNA, 1271 bp, Cannabis sativa
caagaaatccaggggcggtgaggcgaccccatccagggaaaaggcacctgccgaggaggttattgatctttctaaggagctaactgtcatggacccttttgcttagaaagctgctaagtccaaggattctttaggaggaatctcggacaggcctagacagtcgaagggccgatccgagctggccaagagaggatctgagcagatccgggctcctactccaccttctccattgcatctagaagccaagagaggcaagtagatgctcactcactacatgaaccggttggttcctgaggtgagtgagcagctggtcggcgctgacaacgaatcttccctagagcttctaatgagaggagtcttgaaggaatttacaaaggtgaatctttcttgacagtttcctttgatccttctttacttggctagactctaatgttttttctctgtgtaggttggtctgaagatggcttacacctattcccgagctaattctgctgcctccaagaatgctaccatgtccaacaccatgagggcggaagtggacttagccaggaaggatcttgatgatgccagggtggaactcggagctgtccgaatggagttgggtgaagtcaacaagaagctttttactgctgagaggaacgtaaccgagttgattaaggacctcgaggcttctgaccaacttgaagctaccatcgccaccttgtcagcagaagtgaatagtcttcaagaggaaaggggagttcttcggactgtcttccgttggctggaagcagagaagaagtctaaggaggaggagcttacagctgaggtcgagaagtatatatcggaggttgaacagtagagagtagatgtgacgaggctggaagagaaattacatgccctagatacagcgggtctcgagattttttatgacttctggaaagctaatcccgaggcaaatttggattacatgggtgattccaaatacatgtttcttaagtactgcacttctcaggtgcttatggtgaacccgaggtgaccacttctacttctggccaaaatgttggcgtgccccccgctcagacaaaagatcctccagctcctactggcccagaagacccgaacaaagagcctgggactccagctgtctcagtacttctctttttatctttctttttatatatctatccgaccatgaggccttttttaagacatcatgaccggcaagcggtctttacagacaacaggctgaccaggtagcttttaatcccggtattacatgcttttgttat

SEQ ID NO: 108025 - DNA, 813 bp, Cannabis sativa
atcattgaacaaagcatgcatggctttcgaattaaaattggcccactccatctcatctagagtccacaaactcataggttttggtttggtgacaccattatccatctccattgggcatgtccaatagtcttctatggtcatccaaactctttcattcaccgccattaagaatgctcgaatttgggttttccagtatgggtaattgtcaccttccagcattgggggtcgtgatgtggaccctccttctctgaacatctccattcctgtacgaagaaggaaaaacaaaataaagatagagagcagtatactcctggagtcgtgtctggatagcgggttagttccaactgggtgttgtagacagacaaaaaatgcagaaaaaacaagaattgcagcaacaatgaatttcaatacaacatatcttgcaagaaccctaaggatcaatagttctaatagaaatagcccgctctgatacaaattgttaaaccaaagttcttgtctaacctatatctttcatatttagattgattttatcatgatttaagcttgcatacaaaaataaaatcaaagattcaacaccagaattttacaagcttcccttgtcttagaaactcattctaggcagctagtgcttgggttccccgaaccaggataataacattcactatattcaaagatgtatcttacaaaaaccaacaatattgtaaacaatacactcttttacaaaatacagtgaatttatacccataccaaccaagacccttgattggagacgcaagatatccttgtgttaatgatgagctctcttcaacactt

SEQ ID NO: 108026 - DNA, 687 bp, Cannabis sativa
  modified_base (543)..(543): a, c, t, g, unknown or other
tcatcatacttaggatgagatttccgcatcctaaagtacttaaaaggcttctttccccccaccatttcaggatgaagagataaatgacattaatacttttgtgatgcgttaattatgattattgataattatactgtcttgctaggcttggctcacgtgtgctctactgtgcaggaaagggtaaatctgatcacccatgactgcgggagctgggtgatgtatgtacatgttcgggccacaatagaccaaacgggttagggtctaccagtgttgaaattttttgttttgccgcttaggtcggctaaggggaaaagacttgtaatattctgtgaattactttttttaggatcccgaagcatataaatttttgttgtaaagttaaaattattacaagttcattttcattccgttttgtttaaagtttactttcccaggggattagggtttcttaatcatctttggtagcatgcctaattgttggggcgttaattaatccatataattcagccctaagccctatttgaaacactataaaaggaacangatgctctcatctcatcctcttgtaagtcttgtcaacttgactatctaaccaacctagataagagagttccttccttagtaatttcaaacctcctttattgttcttcacctattcaaacccatagtgaaagagtgtcatgccca

SEQ ID NO: 108027 - DNA, 756 bp, Cannabis sativa
aacctacgggcattttggtaattttactaatccattaaactgacattctaaaaattctaacctagtttggaataccctcaaaataattcttccattaatgtcgtaaaatttctaactataatgctaaattttcacagtcgctgagcccgataaaatatttttatttcaaaaatggtattctcgatacacacatatcccaatataatctccgtaattaataaattacggttgatgatcattcaataaacccttattaattaccctaagtaagatcatagtcttaattcattaccaaaataattacatatttaataaaatatgtctatttaaatatcatttattttttgggatattacaactatccccccttataggaatttcatcctcgaaatttacctaaaaagctcgggatacagctcttgcatctgcgactctaattcccaagtcgcttcttcaaccttgctgttccgccacagcactttaactagcgaaatagttttgttccgcagcaccttttctttcctgtcaaaaatctgtactggttgttcttcatatgataggtcggtctgaagctcaatgccttcgtaacttaagacatgagttgtatctgatacatatttctgaagcatcgagacatgaaacacgttatgaaaccttgataaagtaggaggtagagccaaccgataagctacctgacctactttctcaagaatctcgaacggaccaataaacctgggactcaactttcctttcttc

SEQ ID NO: 108028 - DNA, 683 bp, Cannabis sativa
cttttactaagagttgtctggacaaggtgctgggagggtcggtaggaaggggtgaagctgttgtgtttggcagctggtttgataacgtttgtaaggtgcagcctatggatcgtattgagaggcttgctatgcttctttggggagtttggagggctcgtaatgacttggtttggaataataaggctttgtcagtagagagggtggtgaatgctgcaattacttaccttgattcttggaagaatgctcagctggaaaatagagttgtgtcgccaatttctggtccgattactttcgggtgtgagcaatgggctaaaccttgttttggtgagattaaggttaattgtgatgctgctgtctttgaggatgacaatagtttcggtttgtggtgaattgcttgggatcataatggtttattcattgatgcgctggcggttaaaacttatggtcagcccgacccgtttttggctgaagctatagcgttgaaggaggcgctcagttgggtgaagggaaggtgggttgaggggggtgtgcctactagtgtagtcatggagtcggactcactgctgctagtgcaagtcgtacaacggaaaaagcttttgttgtctccggtggggcttttagtttcggattgtgttgctcttatgcaatcctctcttttgtttcctattttaattagttttgtt

SEQ ID NO: 108029 - DNA, 561 bp, Cannabis sativa
agatctgaaagaacaatcgactcatttgtgttgtctgtttcttgtgtatacttactgacacttcctgttgtaccactagattggtggagtatatgaagccaacttgctagtagatcaggaagaaaaaacttaaatgaaccactaattatgagacagaattaaaaggttctagggttgtcaggatagcggttaagtttagaataagaaatggtgatcttatcctgagtgtttaagatgcaaaaaggtgccatttgggctaatgtagagccagatcttgttattgtggggtagtgggtcatctgaaaagaacctgcccacatttaataaagactgatgttaaaaaagaaaagtgtaagggtccttcccaagtgctggttatgactcaaggggactcgggtatcggtcctttggccgactcaagttaggaaattttcccaggaagtgtgcgagtgagcaccaagcaccctagaaacttttgtgttggtctgtagggctagtcatcagtccatgaagcagccagagtgacgtacttgtgtataagagccatcattctgtgggtgt

SEQ ID NO: 108030 - DNA, 506 bp, Cannabis sativa
ttttttttatatttatttttcttacgtttctgcaacaggttgtataaactctaattttgacaccttaaataattttaaatattttaaaatttgcatgatgtcgtaatcatactataaggaactctgttgtaaaaaataattagaggatttgtatgagagaattcgcaattatatgtacatttgttttggtaattattaatgatgaaaactcgtaaaccaagtggtcggtcgaaaaataaaaatttacagagaaatgttaaaaggtactagtggtgcctagtattttcttatgtgtcagtatcgttattgatccaactaagtatcgaatcccacataatttaatataatagtttttagggagtatcgctagccaatcgcaacgtgacatgttgagaaggtactaggcaccactagtgcttaatagcaatgctcagagttataatgatatatcaagaaaggtgatataaatgatgaaacgtaaaacaaaatattgtcaaatattaata

SEQ ID NO: 108031 - DNA, 696 bp, Cannabis sativa
cctaagacttctttgattgccatattatattgtgcattatgatgacctactcttactcttaatgtaaccttttactacaaaaaattagtttggttggcgaagttagttggtttggcacatattttgtgcacctccacctacaagttctattcatggaagtctattgagtagagagaaagcaactctctttgcttgttagggttggggttgggcgcaggccacattgcacactccataaactatttggcctggtgactgtccactacaatctatgaatggacttccttttaaatttatttatttttcaattttattatactaattttctttaggaattattacatgaaaaataaaaatttacactttatttacaaaaataccttcataaggtgtggacaatatttataccttttatgtacttttaattactaaaatacctcttacactatcacttacacaatcagacgaaggttgttgggtgattgttcgaaagttgcatcacacgaaagtttcaatcaaacgaaggttgctggatggttggccgaaggttgcatttgacgaatgttcaatccttggaagcatggatcgtgggtgttgtttaaattgtaatgcaacagttatatctgttgcgccaactaacatgcagcttaattgcaactaaaaaatgtaaattgtgaatgtgtatatgtaagaaac

SEQ ID NO: 108032 - DNA, 586 bp, Cannabis sativa
aatcaaccaatttagcttgcatataaaaattctattgaataaacataattaaacttgtgagtatattaaagtaaattttcaagagtaatataaaataataatattacaatgatgcaagtttatttactaatattttaaaaatataagccaattaaatatttctaatatactaatatttcaagagtaacataggaagtaaaataaaaataaaaaataaaaaatattaggaataaacttgcatcattgcaatattattattttatattactcttgaaaatttactttaatatattaacaagtttaattatgtttattcaataggatttttagcaccaatgtgaaagccaaattggctgattgatattaatactaggcttgtggtagtgtgatgcttatatggcgctgttaaaagtaccatactagaaggtgttatataatggccactcgtgaatttgttactgtccaataaatacttaccaatttttttggtaactaattcaagttatttaatgttaatagtctcaatactattttcgcttatttaattaaattatgataatatttattgtaacatttttttaaaaaa

SEQ ID NO: 108033 - DNA, 811 bp, Cannabis sativa
taaataaaatctatcaaaagtgacaattttattggggtttttacatggtatactgtattttggcattttattacttttatactgccacacggcagaaattataaaaattctgtacagtttatactatcttttatactgagcatattgccacttgtcattttgcatgcccttctctattttttttattaattaatttcttaaaaagggtgttaatcatggcagctcacattttttataaaaaaagtgacaaataaaataaaaaaaaattatatattatatttgttttataatcacacattaccccacatttcatcatttcatatttttttcatcatcttaagatgttcatctctctcccatgttcatcttcttcttcatgttcttctttatttttatttttttgtttacaaattcatacagttgtttgaactttagccctcaaggtgtgcttaataagagagagcgagagagagaaagaccagtagacagagagcctatcccgtgagaatatcttcaagaagaacaatagacaactcaaactttctaagtaaaaaaaatctcttttctctttatttattttttctagaataacataaactttagtggatttttattgttcatactaattatgtttaatttttcttttttagggttatagttagctctggttttgagagtggtttgtatcgtttgatggctcttatgatttattttgttattgttttaatgttgttttctttcattcttttatctcatttttttttaaatattattgtacaactctatattaaatagcaatagggaaataata

SEQ ID NO: 108034 - DNA, 1075 bp, Cannabis sativa
gagctacctcaggtactctgggcccacataactaccgagaaaacaacaacgggacacactcctttctcagtagcatttggctcggaagcattgctgcctgttgaagtgaacatatcgaatcacaaaagagagttttataatcaagaagaaagccagaaatttttgaaattgtccttggatctacttgaagaaaaacgaacttagtcgcagatcaccaacgcagcataccaacaccgagttacaagatacttcaacaaaaaagtcaagaaaagactattcaatgttggagactttgtgctaaggcgagtattttccaatactagagatgcatctacaggagtgttcaactcgaaatgggagggtccatatgtcatcgaagcagtagttggagttggagtttataaattagctcgactcatcgactcgctaataaaaaactacttgagcgtagaacatttacgaccctactaccaataaataaatgatctaactcacattattgatgtaaaatttaaatttaagttatgaataaagagaatcatttatcttaagtaattacaaagttttattctttaaaaattacttaaggggaatttatgtatgattaaccggaattcatcaggaaatacatggtataatgcaaacccgccatttctaattgtttttttgaaattcaaaggttctcgactaaacctctttgacaaaagtggaattgaactgttataactccctaaccaaacttttttgatgagagaggggtcgaattgttataacatcttaatcaaacctttttgacgaagaagggatcaaacaactataatttttgatttaaaacttatctaacgggaaaggaaaatcaaaagttgtaactcgcgtataaaactgaatactaatggttctcgcgagttaggaaagtactaaacgaggcatcgcgacgccttgataacagtacttaaaccaagaaaattgatatatagtataactattcatatgagcaaattaaaaatatacaaagtgataaaattattaaagtatatttaagtttgcttaaggcagattataactgctatagcga

SEQ ID NO: 108035 - DNA, 531 bp, Cannabis sativa
ccagtatctccagctcaagagattgctctaggacatggtccagtcctagctctaaaggctcaccgagcctgttcagtggattaccttgggcgtcatgttactcgagagacaatccatgaggatagaactagtcctatacctcttcctcctcactggaacaacctcctctagctcagattctacatcagaactctcatcccctgagtccatctctggttcagcatcagcaggaggctgagcggtcccctccaccattctaacttgaccccttgtggccaccctggccacgtaagggtcatatggaagcaccctatggagagtctatttcgttttggccataagaaaaatgtaaataaagagacgtacgtgtttgtcaccactattcaatacccgacactacctgcatggaagaaataagaggaggtgagcaacctgacaaagctacaaatatattcaagtcaacagtacatattggtacctttcaggtaaagcaaagtgtacaaggttaaccaacaaccacgtaccgtctta

SEQ ID NO: 108036 - DNA, 750 bp, Cannabis sativa
ataaaatacttgtttttgcacaatatagtggaataagatttactaatgtcagtgtggataatctctaataaagatagactacggttggcaatctcctttcttgttttagttaattttctacgagtgcaatcaacacaagtatcccaacttgaatcattaagaggaggaagaattttagctcgaagtaatcgatcaactctttctttggaaatatgagacaatcagttgtgtcataacaataagaatgtttccttaatataagatgggaagctaagagagtcaatgccaattttcaaagaccatcaaaataaaagtttccaataattttgagtcaaacataatattaacattatcattagaaaaaataaaaagaatatccttgtttaacttaaagcggaagagaaactaaattcctcttaaaagtaggaacatagaagctattgttcaagacaatcttaactctaaactgtaattcaagaataaatttgtcaacttagattacgtcaactacaacataagtgtccactttaagctttgactccctgtcacttggcttcatgagatcccttagcccctgattatgtttgcttcttttcataattttctctatcctatgttgggtttgagttgagaaacacagtgagaagattcgtgcttctccatttacaacttgcttttctcagctacaaattgagaaattaagttactgacattcaatgttttataataaatattgtaggttgttttgat

SEQ ID NO: 108037 - DNA, 586 bp, Cannabis sativa
cagtacaagcagccaattattcagcctagtttttattttttccaatactaccagtatagaaaatatcattgaaaacaaaagtagacgtaaaaagtggaaacaactcttcacgtttaatggtgttataagtaggcatcttcatattcatcttggtagtacattagtttaaaataaacttgcaaaacacagtgtcctaaaaaagtaacttagaataattaatatagtaattatttgaatagtgaacaacatcaagaattacacaaaaatttattgtatttattaaaaataaaaaaggtattgcagttcaatttcaatcacaacaagtgaagaaaaattaactcatacgttcatttacttatcagtcatcacacaatttttcatctccaaacaacaatagtacaacaagaaaaaaatatcattagatgtctaatgaaaatatatatgatataaaatgtcttcaatacttacaccatgcaaatcttatcaaaacatttaatgcaataaaaggtaataatacgaaaagttggatcaaaataagcaatgaaaaattataaaatatttatcaactctacctaaattgacttga

SEQ ID NO: 108038 - DNA, 562 bp, Cannabis sativa
ttttttcctataaagacggtgaagaatgacaactcacattcagcgagaaacaaccttgttagttagcataaccgtttaaggataaaaacaaagagctattgggtagttattatattatcccatgtgcataaaaatgaaacgtgggaaatgtccatgtttcatgaattataaattgatagatcccaataaaaataattgtcatcctatacacttataaatagggacagaatctaaggaaagggggacaacaaacttgagagaaaaactatactttacatttattaaagagaattgtattctgtatacatataaagatccctaataagaaggactcgtggaatatgtagattttaactacaaaatcatgtaaaatatcttgtgttcattattattaaattttatagtaaatttattacgtaaaaagtttatatatttagttaacaaaaatatgcattaacattaaagattacgattgtttgttgaatacatgcatatattgtggatcactctttgatcgatttgtgtgtccacactagttgatgtgagccaaaggcttagtctc

SEQ ID NO: 108039 - DNA, 533 bp, Cannabis sativa
gagtcgatctctggttttgagtcgctggtgcattgctagccataatatgaagtagtgttttggagcattaaaacggctccaaacctgccttgtccactgaagttttggtggattttgcaccagcaacttgtaccctaccgagatggtatactgctgcattatgatggactggttgctcattttaaattgatccttgagcctcactaaacatctccaataccagctggtttggcttgatgtttcataggcccaccaatcaccatcatgaagataaacactattaatccacctcatccacaaactatcttctttgttagcaatagcctagatgtacttccccactgccgctttattccaagagcctaatccttgaaaccaattcccccagctgcttttggttggcaaataaaatcccaagcaattgcacctgacccatggtactcaactttggcattccatagaaagttcctgcatatagcttcaatattcgacaccactttcttaggtaaaatcattacctgacaccaataaga

SEQ ID NO: 108040 - DNA, 890 bp, Cannabis sativa
  modified_base (235)..(238): a, c, t, g, unknown or other
  modified_base (443)..(444): a, c, t, g, unknown or other
tctattgtaaggtatatattttctgtaaatttaaaaaccaaacagtaaatttgaaacccaaaccgtaaatttgaaaaaaatgttaaaaaaatagtatatggactaattctcttaaatttattgtatagtatatcattttattttagataatgcatgtttaatttttattttattatacataaaggtgatatataatttttttaatatgatatatacaattttttttaataatatnnnnttattttattttattttttatcgtaggtacttacgttttcttgtatgatatatggtttttgttgtctatagtatatcatttattcaagatgatatttagtttctattttattatatataattttttttatgtattcatattttaatggtggtatatataattttcttaacatgatatatacattttttgagtattaatttagtanngttataatttttttgtggtatataattttattactacggtatattaattttcagtactacgatatatcaaatattgttgtatatatttaatgatctaatatatttattcttttttgttaaaatataataatatgcaatactaaaaaaattatataatttaattttattattattattatatatatttttttaaaaaaatatatgataaatgtatttttataattcttattagctaattattatatttggccattgttatagtgagatttctctcacttagaaactcgagaccagacccctctttgaaggacacgtgtatccagacttccaatgaagactgaaatgtccaggagaggcttctcgaagtttagacctcgcccaggataaaaccagcgaggtatcgcggatgcgacttaattcacaccgcataaccgtaatcctcatca

SEQ ID NO: 108041 - DNA, 541 bp, Cannabis sativa
atgtaattatttatttaacttttaaaaaataaattatcattctagttgtcactaactcaaaaaaaaaaagagaaaaaaaagttgaaagtatgaagatgtaccaacaaattccataaaaaaataatgcattacaaagagataaatcaagttgtcaaaactaagtaaaaaaaattcgtaatacaaaaacatattgaagagttgatattgttttgcatgttgcaataaggttgcaataaggtcaatataaggtcaatgttttttttagttactttgtattactttgtagttatctttttgttgttttatagttattttcatgttgtttgttaaattaatttttagctgtcttagttgtttatattttgctgaaacacaatagttttgtaattttaaaactttaacacaatatttttgaaaacttgatacagtaaaaatataaaaaaaaagtgtgatagtaaaaaggaaatttgatattatatgcttaaaattaatttatccactaaaaatatgctagcatattttgcatcatgcaaaatatact

SEQ ID NO: 108042 - DNA, 511 bp, Cannabis sativa
actaaactcataataacgagacttttgttggaaaaataaaaaatacaaagaaacaaaaaaataaaaatgacatagcagatcctattagattaagtggttaggatctgttatattagttgccacatcttaaggaagttagttattgttattgtagttagtcttaaccgacttactacactacatatattccttgtaatgcctttgttcaaattaatcaatattaaatcaattttctctattttctctcctattatggtatcagaagaaatactctgaagcttcaagaacttcattccagcttcaaagacttcatcaatggcaagaactcgagccactgctaccaccactgtccctcctccgtcagtggttgatgctgatccagctccaccaccatctttgccctttgaagaacactccaatcgaactgatgatccagctcccaattctcgatcacatccgatcgattccaatcaagatcaccgatctcatccgatcgattctcttcccaatc

SEQ ID NO: 108043 - DNA, 956 bp, Cannabis sativa
agctgcataccaaagattggtcaataaaatgttcaagggccagatcggacgaaatatggaagtatacgtggatgacatcctcgtcaaatccaagaatgctgggggggatatagatgatctagacgaatacttcaaagtcctcaacaaatacaacatgaaactcaatcccctaaagtgctcctttggagttatcttgggtaagtttctgggctttattgttaatgcccaaggaattgaagccaatttagagaaaattcaagccctcctggatatgaaatcgacaacaaaaaccaaggaagttcaaagtttaactggtcggattgccgcactcagcagatttgtttcaaagtcaacagacaagtgtgtcccattcttcaacatcctgcgaggaaataagcaatttgaatggacgaaggaatgcaaaaaaatcctttcaaaagctaaaaatgcaattcgtaaaacctcctgtactctcaaaacctctagacggagaagagttgggaatatacttggctgtcatggaacatgctctaagtgccgtaatgatcagggaagagaacaatatccaacatccggtctactacattagcaaaagaatcattgaagcttaaggccggtacccattgatagaaatgctcacctatttcctaatcctagcaacaagaaagctaaggccttactttcaggctcatcgtgttcgggtatacactgaccaaccattatgtcaagtattacaaaaaccaggcgcctctggacggttgctcaaatgggcagtggagttgggctagtatgaaattatctttcagccccaaacggcgattaagggtcaggccttagcagattttatggttgaatgtacgggtaaagaagagagcatttcagaaagtaacccagagttagtacaagcaccttaaccgtgcaatagtaaagataagccaacttggaggctacatgta

SEQ ID NO: 108044 - DNA, 824 bp, Cannabis sativa
aaacatacgtcgttacgctgataatatattaatttataaaaggataaaaataaaggaaaaatcaccttctatacggtaatttggtatagctgtaataattcttcaacttgaatttaatgacctctgctgatattatttgaagggatagaaagtttttttccaataaatctaagttttccccaaattgttgaaattcttgccaactttaatgtaattgaagaaaaaattagaaggttgaacatttgattctttggatttgtcgggagagagagatagcctattttaaattcagtagctctgacaatagatgttgaaatcttgccggagccaaagggatgatatcgtgtgaacatgtgatgctttagaaagcaagttttttggaatagcaagttttttttggagtagcaggtttttttgaaaaagtgtcttatagttacaaataaagtgtcatttaaccgtataaatggaattaatgtttgtacaccgtatatttgattaattcttcagccaccagtgtacatataaaaacagcccaaaaatttataaacaacaaataattacatgttctaatgatgacaattttgtcaaattaaagcatttccattattttttttctaattatgtaaacaaaataatatgattctagttttctttccgtacaatttaataaacagcataataaaatattattttctattttaaactgatttatttctctcattgattattctgattacagttacagtttagtaaacacaacataagtcattccttaaaaaaattagtgggagaagtattccttttttttatcccttatttgatcc

SEQ ID NO: 108045 - DNA, 725 bp, Cannabis sativa
ggaggcttatgagcacacctcttaatttttggcattttgacccctgcttaatagaattcagctacaaatttgtctttcaacagcccaattatcacagtataatcacagaataacaacacaaatccaatgctcctccaccctaagaatattcagctacacgggccacaatactcaccaaataacaccgtttaaccaaataaatttggaattgaaattctcaaacccagattcactttgatttggctgaaatgtgcaggcttcaacttcttgctgctgagatgatgcgtgtgactagcattcgatagtgaacacctcggtcgaatgtgcttgctagagcttgtgacggtggctggttcgtggttgtgcaggagcgaacttcagcagctcgaagatgtgcgaaatgagggctcggtggtgaaggcgagttcgaacctgtggatggatggacgagtgatggtgactcacggaatggtgaaggatgcagagtggtggttctggttgtgagtcgatgtggttgggcggagggtgtaggttgactaggcaaagggtgcgagcttggtggtgcgaaggtggtgcgatttttggaactggagctggacgtggtgaaggtcggaggtatgctgggtactgtttgacggaggtagaaactgttagtggcgtgcggctagggttttcaggagaggaagctgaaatggatgggctgatttgggggttttcttcttctt

SEQ ID NO: 108046 - DNA, 566 bp, Cannabis sativa
ataaatgaccgacctggtgaagaagcctatcgttttcatcttttccaatgtcaaacaaatccaaatcaaagggagatccatcgtactccttatacaacatcttctcatcatgtaagtgcaatgataaaacatactcagcatttacagcgttacttttgatgaatttccccgactttctcatctttaacacaactgcatccaactttgctgaatcttcatcagtattatccttcaattcattaaattttcttatgtgatcagtgaatgcttcaacaatcgctgctacttttcttatatccatggatagtaaatattggtcctctactatcaaacaaatcaatattatatgaatttatatataagaaaaattgatgtgagagcagatttttaaactcttcttttctctgtttggtcacaaaaatatcttatccttattgtaaaaagtcattctcatatagtcactcacgccacattaaacaattcaaattttaaaattattattatttttttaattatagcacatcatctttggaagttgaagttaaattaattataagatattggtt

SEQ ID NO: 108047 - DNA, 619 bp, Cannabis sativa
ttaaataaaataacaaaattgaaacctgtagggcccacatagaggttcagccacttaagggattaattaagccattattttatctttctttaattccatataaattaaatcctagccctagaaaaaaaatcctataaatagataattataggctcttattttcataagctgataactcaaattaactttgttagacaaaataagagaggctcctattaatttcaaaatctcttcttttctctccttaagatttcgaactatatagtgaagagagtacttgcccacacaattcaagtcattactcaagtatagtgtggaagattgtgaagaattctataatctaaggagatccaggttcaaatcttggtaatactctacgatagaaaggaacaaggattggagatctgaacgaaagaagacattatatttcgttgccaccaatgtaaggttttttttataacattatatgtgtttatttcattattttaggaaattcataattagaatgttagattatggttctataatcaacatacatgttagtaaatctaaatcctggtaaaacaagttccaacaactggcctcagagccatggtaatttattttcatgaaatatgga

SEQ ID NO: 108048 - DNA, 1136 bp, Cannabis sativa
atttaaaattcagataatcatacagagcttggaacgagctttccaatgatataaagaactcccaaatcggagttcggaatcaaaagttatgaattttcgaaagccaactcgaaactgcccaaaaacacgagggcggaccgcggtatgcccaaaccatgtcgcggcacctgggacaaaacccaggttccaccaaaaggggcgggccacggcatgctccagagcatgccgcggcatctgggttccaaacccagaaaccaacaagcccttcaacgaatttcagcaagaaatatcaatcttttcactccaatttctcaaccaaactttcaaattaacaaataggattactatcaattaatagatgctcaaataattcacttcatgcatcaaaatcctcataacaataccaaaatttagattgctcaaaacaacacaaatcaagcttaaacttatcaagattcaagtttaagaacatgaactgaaacccagcacaaatcccttaaaatccagcagcaatcctcataaaaacacatgattctaagctagaaataccctattgtcttagtccatgctcaacaataaaattctcaaccaaatcatgcaataatacactcaattcatcaaaatcacaacaacacttaagaacatgcaatcacaagagaaaaacacaattcaagacatgcttttaccacaataaattcagcaagaatttaccattaaattctacataaacttagcaagaagttacctaaattccaagctcaagaatccataattccaaagcttcaatcaacaaccaacttcaagcaattcttcaacaactcaagttgaaaatcaaatagggttaaagggagagagagggttcgggtgagagggagacaaatccagaaaattatctattttctccaaaaaaaaatcaacttttattaaatgtaaattaaatatggtcaaaagaccattttgcccctagggcttaaatactcacatacaccctcgcaagggtaaattagtcatttcatattcaatcatttccaaataaaatgtagatttcataatatcacatatattgctaattaattcaatccaatttgcatttcgggcctgaacccagttgggcccgaaatacccggttgtgacta

SEQ ID NO: 108049 - DNA, 636 bp, Cannabis sativa
ggtattttagggatatcataaaaattgtcatatcttacaaatattagttattatttgtttagaaaatttttttcaaccaaatgtaagcataaaaaatcaaatttccctttatgcatggttaattttttttctctactcataatatttgatatttgtggaatatgacacattttataatatctctaaaatacttccatttacatcacctccctctctctcttcttctctcttttatttcaccacattgtcaagccatcgggcccatcaggctataccaaattctatttttttacacaggcatcgggtcccatcgggcccaccatcggacccatcaggccatatcaaattctatttcttttacacaagcatcgggcccactatcgggcccatcggaccatgtcaaattctattttttttacacaggaatcgggccccatcgaacccatcgggcctttgtcttccttaattttcctgtgataccatcggaccggtgtcgggcctacatcgggcccgacaaaatcaaaccccaaacccaaattttttccaaatcacatccgacaaaaattaaaaaaaaaaaagatctgaaggttttccttcgacatctccgttcaaagctcggtggtagagggttggagt

SEQ ID NO: 108050 - DNA, 574 bp, Cannabis sativa
gcagggatcttggcctccgttgtcgacgatatttgaagctcgctgtggctctcaactttcgtgttcgacgactgtggattttggcgttcgacagcgtcttaaatttgtgcagggatttgatttttttttttgtgtagtttttttattgttcaaaatgtgttttgttaatttctggattttgtatcatttgatagtttgaactgttttgaatattatgcttgtgtaatatatgtcaaattttcagtttatttttttttattgtatttgttgaaatcattgaaattctatatatgataagataggaattgttagaagagtaactaggaaaacagagcaggtttttattgactcgggaatccgctaatccagaaagaaaataaaagggttatgaaatgactctttgaatgttaatttaattttacttttattattttattaatttatacaaattgaatacatgtaaacttgtttctaatgctattgtactgtcttatgagaatgaattgataatgtttgataaaatgaggatttgcatgtattttttatattattcttctaattcaaactcgcttca

SEQ ID NO: 108051 - DNA, 734 bp, Cannabis sativa
tcgaaatatcactttgttgaccactgaggctaactttgtgaaatacaagctcttcccagaggattttgtactgaagcccgtgaaggagaagaagaaggcgaagccaagctgagccaggctggagaaagagctcattcaactcaagcgtgaggctaagttgaagggaggcgacgaagccaagcagtatgctcaagaatattcagagcaggagcaatatgcttaagaatatttagagcaggagaagccgagcaagaagaagaagaaagctccctcgaccaaccaagcaccagtggaacatgctatcaggattaaggaacctgatttgcctgctcaaccatctccccctatagagggaaaaggaaaattcatcctggtggagcaagaagactcgtcaaatgatgatgtcccatctgtacttgtttgggaaaatacccctactcgcgtgtagggtactttaagttggacttacttctcttaaattatgctttcacatatattatgtctgcttctaactgcattgtttaatctgtgcaaaaatgtctcaaaagatgctctaggccttaaaggagagaatgggagacagctcggacttgtctcctccagccaagaagtctaaaggcagtgagactctatccaaggagaaggcactagttaatgaggtcattgaccttttagaggagcgacatgttgtggagcttccaactcagaaagtctccaagtccaagagttccaga

SEQ ID NO: 108052 - DNA, 543 bp, Cannabis sativa
ttcatagaaaattttgtaatatcaaatcaatcatcaagaattcacataaaccaacatgaacacatctaaatcaaccaaacatagttttaaatttatctttcttgaaaataaatcattaccatgactttaatgccaattgttggatgttattttaccaggatctagatttactaacatgtatatttaattataatactataatctaacatcctaaatatgaattccctaagacaattaaataaacacataaaagaatatgtaaactcttacaatggttgcagcagaattatatgattccttctattcagatctctagcccttgattcctatttgtagcagagcattatcaagatctgaacatggatcttctcctccttcgattgtgtttaacacagtcttccacaaaggtctgagtatcaccttgaatagagtgggctaatactcaaacatctttggaacaatatttttgagagagaatacatgtaatttttgaaatatacaaagaaacaagagaaaagagtaatctgacaataaaattactta

SEQ ID NO: 108053 - DNA, 912 bp, Cannabis sativa
cttcatattttcattcacaaaaatatagttgaccaagtcaactttttcaacaggttttgccattggaatctggtttaacaacataaaggagaagacagtcatatggacagcaaactgggatcaacagcagccactcccacagagcaaaacacttgctttgattgattttgccaactctgtttcccctgatcagcctgctgcctcagcttcaatgctcgattcgggtaattttgttctctacaactcagaatctcaaatcatatggcagagctttgatcatccaacagatacccttttgccaggacagagtttagagagtggaaaagatctcatctcagccatgtctaaatcaaatcactcacccggaagatttcatcttgtcatgcaacttgatggtaatctggtccagtacccgagaatgagcaatgtaaaagcctaccatgcttactggaactcacaaacttatgggaaaggatcacaaaatgtaactctgaactttgatgctaacggtaacctatatatgtacaacactactagctcaagtaatataaagacatttcattctgtaggttggggacacaagagtgggaatgttacttatcgtctgacaattgatgcagatggaatactaaggttgtattctcacagtattgttcaggtcaatagcagctggaatatcgaatggaattcgagtaataataggtgtgatcctactggagtgtgtggcatgaatgcatattgtgttcttgatcaaaatcaacaacccaattgtacatgtcttcctggtcacgatttcattcatcaacaacagagaagtttgggatgtgaaaggagtagcagcataagttattgcacagctgataatcgagataaagtttcacttgaagaattttatgaagttttgtgggaaaa

SEQ ID NO: 108054 - DNA, 566 bp, Cannabis sativa
  modified_base (420)..(421): a, c, t, g, unknown or other
  modified_base (451)..(461): a, c, t, g, unknown or other
tctgtccctattcttcgttgtgggatttcttcaccctttcatcctttcataaaagccatcctcagaagctacaatgtctctccctttcaactaaccccgaatagttatcgcatagttctaggagtctatgcgatgtgtatggaatatgttcgaagggacctaaccataaccctaactaaatcagaaacgttcttgacaaagtatgactaaccgccaatccagcctatactcagtactctaatcgcactgatgtggtagtagttaatccatactgtctgatagcctatcatatatctgatggtatctcggtgcaactctatgtacacctcactgttgccctgatatgctaatgtgatggctatataaaatttgcctcatatatctaatatgttatcctgacggcaactaacatgtacgctnnacatgtataagcatatgcatgacattatannnnnnnnnnnttgattctgaattcaggtgtgccgacaaacatgagtggagcaactgctcggtgaattacaggctcctaaatcacatcaatcataacataggtgagtgacacgcta

SEQ ID NO: 108055 - DNA, 803 bp, Cannabis sativa
  modified_base (452)..(452): a, c, t, g, unknown or other
ttgtagttgaaatcaaaatgtagcttacatttatctatatatataagcctacctagctagtaggatatacgtacgtgcacaatccctaaactacccttacaatattaattaagttctttctctttttttttttttcttaactttaactactactttctttatcatttttatcaaatttcatacctaattatttctttgtcatgcatttcacgtactgttttaatttgtcatttttatcacatgacataactaacttcttgtaatttttatttatattatgattctcaacccacaattaatggaaaatgctagttgtatcacgtaaaaatatatcaatatttgggtgattatttgatggttacatttttcttttacttataatagcaggttaccaataggtaaaactttcttttttagatcatcaatcaattataattaattattttcttaanataattaattgaatatttaacaagttcttttttagctattaatgattataaatatttttttatataaatccttactataatgattttaataattaagctctttaacaagttctcttttaacaagttctctttatttctttatataaaatatttatttatacaatatacaatttttttttttattttaattcaaagtgttaatctaataaattttaaaatatgattaaaaatattttcaatattttaaattttaattaaaatttctttatataaaatatctacataatttttattgttaaatatatatatagtaatattataaagaaatttttacaccaaaaatacaaatta

SEQ ID NO: 108056 - DNA, 1145 bp, Cannabis sativa
attccaaccattgcctctatctcacattcaaatcattctggataaagaaatatttgaggctcttatgatcggtgtaaatctcgcaattttcttcgtagagataatgccgccaaatattcaaagcaaaaactatggcgacaagttttaaatcgtgagttaggtatcactgttcatattcctttaactaaagggaggcataagtgatgacccgatcagcttgcatcaaaacacatcccaacccttgtttggatgcatcatactaaaccacgaacttctctttatcagatggtagggctaacaccagagctgtaatcaacctctgtttcaattccaagaagcttgtttcacacttgtctgtccacaaaaaccgctaattctttttagtgagtttggttaaaggtgttgagatcttagaaaatccctcaacaaactgacggtaataaccatccaaaccagaaaacttatgacttctataactatctttggtctcgaccaatccctaacggactcaatcttccttggattgaccttgatcccatccttactgacaatgtgacaaagaaaagacacttgggataaccaaaattcacactttttaaacttggcatacagtttatgttcccgtaatctctgcagaacaatcttgaggtgttgttcctattctgcttctaatatgagagtacacaaggatgtcatcgataaatactataacacatatatcaagaaaatccttgaatactctattcatcagatttataaaagctgtcggagtgttggttagtccaaaagacataaacaaaaattcatagtggccatacctagtgcgaagagtagtctttggaatgtcctcctcttagattcataactgatggtggcctgatcgaagattaatcttagaaaagactgtctttccctaaagttgatccaacagatcgtcgatcgtaggcaaaggatacttgttctagattgttaatttattcaattctcggtagtcaatgcacatgcatagggatctgtctttctttttatcaaataacatgggagctccccagggtgatacactagatcgtgaaaaccctaggtaaagcatcccctgaagctgaatttttaattctttaagctctgtcggagccattctgtaaggt

SEQ ID NO: 108057 - DNA, 644 bp, Cannabis sativa
tatgaatttacttctttcttttaacatttttatgaattttttatggatttttcttacaaattgtagagtactatttttttgctgcttttaaaaaaaatgttgtttgacattgcaagaaaataataatttttttttataactatacagagtattgtttttttattgtttcagaacaatgttattttgacgttactgtcatgggaaaataacgtaaaaataacattttttctagaaaaaaaatcctaaaataaaaatttgtaaaaaatgtcaataaaattatattaaaataaaatctacttttaagtatattttgtaaatttctttattatatatttggccccccgaatttcttatcctggctccgcacctgtatatatattaacataacacaaggacattaaactgaaaaatgacattatcatgataaatgaccattagtttttaaaacgagatcaccataaaaaatgaccccaaagacatccacttcgtacacatctcattctctctctatctctcttttttatttttttcctttttttattcattctgtctctatctctctttctaattatatattatatatataccattttaatcacaccccattatatatatatatatgtaaatatatatttacatgatta

SEQ ID NO: 108058 - DNA, 893 bp, Cannabis sativa
gacatatactcagccaaagtatttgccctttcgctttgcatctctccccataacaaggagccaactgtgtgtaacgcccgtatttgaaaatttgctaaacaaaattaatcttatcatattataattatatagccatatagttcgggagttcaaaacaaattgaaaattacctttacaatatatagttacataataaattttttttttacaaaatatagggcaactcaaaatattataaaaccgaaaccctccaggttgcactgccgcgatatgtacaatccttgccaagctcaaattcactgctcctccaacatagcctttcccttacctacacatggtagcaaactgatgagtcaacagactcagtaagatatgcatgccatatataacagtaatgatgtaccgactttatgcttaagccgtcctgagctcattaattaagcccaccaaatagtgaagaacgttcttaatggaagtacgaccactataccatatgcactaaagcaccgactctgtgctcgtgttggtaggaccgaccactgtaccatatgcactagagaaccaacttcgtactcgtattggtagggccaattgtactcccatgagttaccgagtcttgtaccacatgcactagagtaccaattctgtactcgtgttggtaacatcgtaactattctaaaatcctacattgtactaacacccttaaactacatcattactagtgttagtagtccaaacaaataataacatacattcattcacatatatatgctttatgctatcttacctcgtttccgtgctcaggtgtgtcggtcagcctgagtggaattgcagctcgacgtttcacaggtccctaaatcacatcattataattttggtgagagacacgctaa

SEQ ID NO: 108059 - DNA, 549 bp, Cannabis sativa
ccttgaaaattatagtttttgagccaaaattctaaacttgaataaccacaactaaggatcaccacaacctgctctaatccattcatctaaacataatcacacccaagaaaacaataacaaacatacacagcaggtataacaccaaattcatcaagcatgcaaaagttctacttccttaaacttcaagaaactaagagaaaggttgatggaagcttacccacaacaacaaatcactaaactttgagaaaatagcttgaaataccaaagaaaacaccaaggtttctgctgctcaaggagggccgaaagagagagggctagagagaaaatagaattttgctttttctttgattttttccaattttgaaacataaaagatgaaatggtttttcactaactaaatcaggcaaaataacataacatacatcacataatcacaaaattttaagtccattaaaagacaaaggattatggggcaaaatgactattttgcccctcccacactaaaagggttaaaaagtactaaaggggtagtttgggaaattctaaatt

SEQ ID NO: 108060 - DNA, 527 bp, Cannabis sativa
ctggaaggagttacaagcccgaagaccagaatcgttggtagagttcttcgccatggctgagtcgcataagagaatcgagaattctctggctgaattagaaagggtgaaggagaagcgcgagtcacccgtaccacggtcacgatctcgaagtcctagagggaagaaccccagaggtagaagcccgagaagacgcagccctcagaggcagcgaagtccaaagcttaccaagtccccttccaagaaggaaacatctccaaagagaaaaggaagaccacgttttattaattacactgaattggcagtccctcgcgatcatatttatgcgattgaagagaagaatggagtctttagaaagcctcccctaatcagagggaatcgtgacaaaagagatctgaagaagttttccaagtaccataaggacatcgaccataccactctggaatgctggttcctacaaaacgaaattgaagaattgatcagacgagaaaaatttggtaagtacaagaaaaacagagaaactcatcccc

SEQ ID NO: 108061 - DNA, 585 bp, Cannabis sativa
atatagctaggtattacaaggaagggccactcttagatagacaagtggcaaaatacaattggaaagctaataacagaattaggcacaaaaagtaatgcaatcatacaatcaaagattctaacagaaggggaatattcagcaaacgatgttgacagagagaatgctctgctaaggtgaggtgtaggccaacaaagctatgaaccatttaattcttaacaccacccctcaaacgaagcggtgaggcagtcacaccaagttgggaagttaggaggcgaaatctggaatgagatagagcttggttaggcagtcggctgtttgatcagaggagggtatgtatctaacttcaagttctttcttcaagatcttgtctcgaacaaaatgaatgtcaagctcgatgtgtttagttctggcgtgatagacaggatttgatgcaagagcaccagcactaatgttgtcacaccaaattatggatgtaccagccaaaggaaattccaactctttgagcaatgattcgagccaggtaatttctgctgtagcaagagccaaggctcggtattctgattctgtacttgatcttgacacaac

SEQ ID NO: 108062 - DNA, 904 bp, Cannabis sativa
ttattttgtaatatattttaattttctacaaacaaagaaatcaatttttgcatgcctattattgtttatttgtgtataaagtaaaaaaaaaagagatatttagtacataaagttgtaggatatatttgctaaaatgagaatgtggtaccattggataagactaaatacttatgattgtgttgctcaatgataagttttttttccaatgcccaaagttttaccaataaattgatatatttataataacattgtctccacttaagatccaacgtctttttttatttgtattttaattttcttgttatgtttaaagtaaaacaaagtactgatattagtactatttgtgaagactacacatttattgttgtaataagactacacatttgttctctttattgacaaacttataaataataatatatcaaataatttaatatttgttaaggtatagactatatttttctaagaatatctatattacttattcatagtatatattcactcactgacgtgagtatattaattatgtataaaaagtatgcgatgcatgacccaatgtttgttatgcatgataaatttattagaggagagagggatgcccatgttaagaatttaattatttgtccaagacccaaggttacaaaaacaataaattatataaagtgattttgtttttgcgaagagatgatgaccctttttattttattttttatttatattgtaatgtcattcaaaggcttttcagttcttattgtgtttaaagtaaagcaaaaaattatatagtacataaagttgtaggttatattaactaaaatgagaatatatagtactgttgataacaccacacactagtgattgtattattgaaacgtactgacctaagatgataataataataataata

SEQ ID NO: 108063 - DNA, 996 bp, Cannabis sativa
  modified_base (572)..(581): a, c, t, g, unknown or other
  modified_base (636)..(647): a, c, t, g, unknown or other
  modified_base (761)..(765): a, c, t, g, unknown or other
  modified_base (833)..(858): a, c, t, g, unknown or other
tattttaatctattcattttaataatgaaaattacttaatttaagttgatttaaaattaattaaaatttcatttccaactttaatttaatttcaaaaatcccttgtaaataattataaaattttgaaaattaattaaaatataataaaataaatacttgaaaaatatcttatttaagttgttctaaaataacaaaattttcaacttaaataattttttaaaatttaattaaataacaaattaagtatcttgaactaatcaccttaatttaaaaaatatccctatttaagttgttctaaaattaacaaattttcaacttaaaaatattttcaaagaatagttatataactaatttgctagaagattttacttaattattaatttcaaaatattctaatttaagttgatccaaaattagttagaatgactaatttttaacttaaatacattttctatgaaaattaaaataattaagtatctagaaaaatctaattagttataacttcttaatttaattaaatatagaaaaatagatatagtttatcctaaatatatttcattaaactaagtgtnnnnnnnnnnaattaatttcaaaataatctaatgaaaaactaatttcatatatttcaaaattaannnnnnnnnnnntcaattttattaggttatactagcactataaaaactgttacttttagtgacaacataaattttttgtcactaaatttgacttttagtcgcaacaaaaagttacttgtgactaannnnnagtatttagttacaagttgtcactaatttagttttagttacaacaaatattatgactaaaaatacatnnnnnnnnnnnnnnnnnnnnnnnnnntgactaatacttttagccatggacattttagtctcaacacaataatgataatttataattagccacaacttttttatctttagttacaaattttgttgtgactaaaaatacgattttttatagtgtactgtgattaac

SEQ ID NO: 108064 - DNA, 521 bp, Cannabis sativa
  modified_base (339)..(344): a, c, t, g, unknown or other
ataatggggctcacaaataattaagttcatacataattataaaagtactaataattaatgctaattgcctttgataatccatattataaaatgcggtcgttaccataatccccctgttaaaggatttcctcctccaaatctaatctgaataatttttgatattgagtcctcatatcagactctaactccaggtggcttcctccaccttgttgtttctccagagtactttgaccaaggcaatggtcttattccgaagaattttctcctttctatataggatctgaacaggctgctcttcataggttaagtcagagtgcagttcaagggcttcataactcnnnnnntgagtcgggtctgaaacatatttcttcaacattgaaaggttgaatacatcatgaagagccgacggtgctagtggtaaggctagccgatacgctacctgcccgaccttctttagtatctaaaatggcccaatgaacttagggcttaacttaccgcgcttcctgaagcgtccaataccc

SEQ ID NO: 108065 - DNA, 653 bp, Cannabis sativa
tttagctggccaaataaaaaaataatcctacacaatacctcttacacacacctttaactcacgatccacgcttcctaggattgaaacattcgtatgatgcaaccttcggtcaaccacccaacaacccaacacaaccgaaatgaaatccaactagaaagagaaccaccgttaattctgacgagttcacctaagaagacgactggaaccaatcaaaacaaggactgttttgaattcatgaaaaaaattgtagaaaaactattacaaaactaaaattcaatcagaaatcacgtttaattcgcataaaactaatgttctaacttcaattttctgatccataaaatgcagatctcaaaaagttgaactggagttcccaaacaatcaactcaagtataatccaaaaaagaaaaaaaaattacatcaacactatagtaaaatgttaatcctaggtaaacttgtattgttttccaaattttcaatggtgaatttattcatattaaatcatgaagagacatgtagatagagttacgtacgtcgaaacattattatgatttttaatgtttcataacagttgcattactgttgcattaatattttgctaacaattatttctccacatattactattaagacacaagtaattattgatcagtgac

SEQ ID NO: 108066 - DNA, 1320 bp, Cannabis sativa
  modified_base (457)..(461): a, c, t, g, unknown or other
aaaaaaattagatattcctaatattaaattcttagtcttataatataataaattaaatattataaaataaaaaaaaattgaaaaataagatatttttaaggttagaatatttcaaattttattaaaaattatataaaataagtttaaatagaaattttagcctaaactaaccaatttttcaaaatttcatgttatttttgctaaaattaattttaatagaaaaatatctaataagataaaatgttaaaactaacatatttctaatcttataattttaattaataaaatatatttcaaaaaataacaaatttttttttaaaaaatatgatatggttagcaaattttgaaatttaaataagattatttaaaagaagctaatattttaaaaccaaaataagatcattcaaatttaataaaaaaatgtaaaaaatgtgatcttataattaaaataaataannnnntctaaaatttcaaaattaaccataaggctatttttttgagaaatcaaattttcaaaatttaaagcctactaatatctaaaactaattttaattaattaaaattaattttattctgacaattagatttttaaatgaaaatttagattctacacaaaattctaccaaaatttgaagtttgtttcaatgaaaacgatttttgaatcaaaagatatgaagaaaacaaatttggtgcacatgggtatgcaatgcataccccttcgcgcgcggataggtgggacttgaccgagacagaggctgcatgtagcctcaattggccgaggatactcggcatgtacagggctgtgtccgagaattctcggtcagctccttgtctgaacaagggtgctgtccgatcgtgtcccaatgtccgcgcgcacacgtgtgcatccaatttcagatattttcatccaaattcaaaaaaaatcataactaatttataaaaaatccaaattaggttttgtaaaagcctaaattcattaactttttgtctactttccagtaaaaatattttcagaacgaaataaaaaaattatttttacaacatatactgcgatttccaaacaatcattatatgagcacataaaccatcatgaaaccatccaaatcaacacaaaacatcattttaattcatattttatgaaagtaaatcattaccatggctttgaggccaatttttgaaccaggatctagatttattaccatgtatgttatttaacatcctaaatattaatttctaaactaaataaagacataaagtttaggaaacctgacagtgggtgtagcggaatattaatggctccttccccccagatctctaacc

SEQ ID NO: 108067 - DNA, 632 bp, Cannabis sativa
  modified_base (210)..(210): a, c, t, g, unknown or other
tgagaaaactaaaagtatcaaatggtatttttaaagtgaccttaaaaagtcatttcaagacgaaaacacacaaaagtgatattttatatacattttatagtggaaatgtgggagtgagccgcaaacttaatcaaaatgtaatgagatattgttgattagttatttgattttgaaatcaaattataaatcaattttggctatgtgcatctncgaaaattttgacatattttggtgtcaaatttagtgaaaataattttaagaaggaaattaaagagaaattatagagacaaagaggtcttctatattttaaaataatcaagatattatcttgatagtgaaatgtgagaaagtgtgggggtgatatccaatatttatcaagcaatttggtaaaagaatggatgatatgtgaaatttaggcatgcttggtgcctaagacttgagtataatttagacatgtttggtgtctaaagttagtgtataaattttgatatgcttggtatcaaaatttgtgagaaatagagaaagtgtgaacatttatcttctagattaagttttcaaagcttaagtatacttaaggagaaaagtggtcatgtaataatggacattaattttggctagcaagattcacttgg

SEQ ID NO: 108068 - DNA, 649 bp, Cannabis sativa
  modified_base (40)..(49): a, c, t, g, unknown or other
tgttcgcttccccaaaactcactagggttcatctacaaannnnnnnnnncaagatgagtgtttggtcgggatatcaaacagtaaacgggcaaatatgtcgaccaggagtactgaatagattaaaagaatgaagaatgttcaaaaataagccaaaacccaaaagtttaaaatttttgggtttagggatatatttcacgaagcttccaatgagcaaggtgaaagacgaacaatgtgcgatcaaaggaaaacgtggtaaactacgaagctatacagattattacagagaaaatcacaaagttttaaacctagattgtctatcaatattctacaacaattcaaaaacgcatgtataaaaccttgaaattaaacatgcaaagtaaaaagagaagaagattgaaaacttactcactattcggcgtctaagttcaatccagatgaagctgtttgggtgctttgggtggaaatctcacggcagacttgaagtaaaaatctttttctctttgagttttgtttagtgaagaaattagtaaaagtaaagttatgaggaaaactcaaccctatttataggcagagaggtgaaaaaggcaatcatttcaaatgcctttagatgcattggttccctcccaaaagtaaatattgggaaataaaa

SEQ ID NO: 108069 - DNA, 670 bp, Cannabis sativa
gtaatcatgtctgtaggcagtggggaagttagaggtacttcgaaacgtcttctttgtccatttggaagattatgaacttcaggaattcgacttcgaactcgaaatgcatgaggttggttctcagagttgttaaatgagccattgctatcactagatgaaccgttagttgcagtgttagtattattttccagctgctgatacatagcagataatgcatttgaagaaggtattttatgtgtatgatgcaaattatacaaccataacacctttatatagctcctgagaccgcctctactttgaaaaatagtgataggataaatttattatttaagttttttaatttattatataaaaagaaaacatcactttgatacacatgtccattgattatgactcagcatataattattttaattaaaaataatatattatttatgaaaaagtaatacatcaataggtgaggctctagattgtaatcattaagctaatctaaagcactctctttctctcatagcaaagagaaaaaacttctctggtttcttatgtgtactctctttccaaatagtataaaacctatggtatttattaagatttgatccaagtcttaatatgccttacatcaaatttatatacaaactccaatttaagagcaacacatgggtgcgtggga

SEQ ID NO: 108070 - DNA, 622 bp, Cannabis sativa
ccggcctctgatgttcagcttttatttgctaacaagttaagaacttggacacatagtctaccacatctcttttcatcccataccaccagaaatagggtgttacatcctgatacattttcgttgttcgtagatgcagtgaataaggtgtggtgtgagcttcctcaaggatttctttcttgagttcaacagcatgaggaactcaaactcgagctttatatagtaacattccattattcgagattaaaaagtctttaggccgacctgccgtcacctcatctcgaatcttaactagcttgggatcttcaaactgtgcttttctaattctctctaggaaatcagactagagtgtcaagttatgcaactttgcaaccacaaactcaattctcgcattaaccatttctgaagccagttgagaagatatcataacagtagtgaaaacctacccgggacctcttctactcagtgcatcaaccaccacattggctttctatagaatctcataaacgcaatctttaaccaattccagccatattctctgcctcatatttagatctttctgggtgaaaaagtatttgagactcttatgattagtataaacctcgcatttttcaccataaagata

SEQ ID NO: 108071 - DNA, 529 bp, Cannabis sativa
tttattagctaatttattagatttggccattttcttaatttttttaaaaagtggacatttactaacttagttaccaaatttagggtcatttagcatctcaacccttttttttttaagtaatttagcgtcgattgtgaattgatgcaaaatttacatcggtacataattgacacaaaaatccgttcaaccgatgctaaaattcaatttttttttaaaaaaattcatctttaattagcgtcgatttttattttagtgttgaagaagcaattgacacaaattaattattatttgcatcagttaacaattgaagcaattgttagaattgacttttgcgtcgatcaaattaattgtttaatcagatgcattaatcgacatacaaacttcttttctagtagtgatatcagtatataataaactgtaactaaaataaattatattattattaataaagtgtggaactactaaattatatttatgagtacattattattagtattatttaatcataaactaataataataataataa

SEQ ID NO: 108072 - DNA, 1479 bp, Cannabis sativa
  modified_base (1412)..(1415): a, c, t, g, unknown or other
ttcagttaactatcactatgggttattcatgtgtacactcttgtacacatgacatgtttatattggtacacccaatataattatttaaaaattatttttaaaatttattttaaaataaaataaaatagttaaaaaaataaaaaatattataaattttaaaataatttttatatttttaaaataataatattaggtgtactaatataaatttgacacatgtacaaaagtgtacacataagtagtctatattgaaaattaactgtaaaaaatggatgacactttaaatttgcgagcagttcagtagtttggagggttttaccgtcaaaatttgaacttagagggttaagtacaaatggagtgatagttgagagaatttagccgcaaaaaactcattaaaatttaaatataaataccatataactgattaatagaaatcaattaatccttctattttattattatatttttttcattaaataaattatccaataatttatttaatttaataattaaaaaataattaataaatttaatttgaattattgtaacaataaaataatcaaataaaattaacataggcctttatatgtcaccctacacgtgtggtccatattttaaggtccaaaattaatttcttaattttaccacaaataagatttattatttattctgccaataaataataattgattaactctcattaatatcttatttcccaagaattaaaataaatattattttcactaaaataataaatttatctttttaatattgaagaataatattatatttaactaattaatatagttttatcaaataaaattagatagttaaatactatttaattatacaattcataattgtcgtaactattcaataaattattatttcgctcataaaaattgatgtcacatagaaattaattctcactcaaatttactcatcaaataaaaccttctcatgtacaatgtagtataaagctaacttggggaccatgaacctatatttcaaagctccaataaacacttgattattatcgatctctacgatagaataatctagttcattaattctattgttaatctattataaatatggaattgcactctttgataatatagaattatatttacataattcttatttatagtctattgatataatcaatataagtagttcgccctccaattattagttcataattatagttggtcaaaattattattttacggttctaattatctcttaacgccttacataccattaattcaatgtgaacagttcatctataacttattatagatttagatccaactattagcactcctagaattaccattataagagaactaatatctgatccgttaggaaagcttgcattctattattgtatatgttgggattttatgccnnnnataaaactcatttcaatacaatctgatttgttatcaatagtagattagaagtcatttatgttta

SEQ ID NO: 108073 - DNA, 533 bp, Cannabis sativa
caaaggttttcagcaaacgaatcacattagaagcttttctatcattggctcggcaatataaatagctatcatccgcgaatagcatgtgcgagataacgggagctccgttagcaactttacaacctcaaagttgacccgatctttcaaagtttttgattaatgatgaaaatccttcagcacatatcaaaaacaaatatgaagaaagggggtccccttggcgaattcctcttgtaggtgttatggaatctacttctcttcaactattattaactgtatagcggacagaggagacacaagttaacactaggtgtgtccaatgatcattaaagcccatcttgcacatcatatctcttagaaagggccactcaacacgatcataggctttgctaaagtcaagactaagagccatgaagccttctttaccccttctttttctttttagatagtgcattacctcataagaaatcattatattatcggtaattaatcggccaggaacaaacgcactttgattagtagatatcagctgagga

SEQ ID NO: 108074 - DNA, 730 bp, Cannabis sativa
  modified_base (27)..(29): a, c, t, g, unknown or other
  modified_base (302)..(311): a, c, t, g, unknown or other
  modified_base (350)..(351): a, c, t, g, unknown or other
aaaatctgcgttaacagtttggtgctnnnattgagagcctctgtgaaaaagcttagaaaaaaaaaacctccattgttttaaaaaaaaacaacctccttcatggctgaaaatccagaaaatgttaacaccccacatgaggaaaccgatcatcgttctggaaaagagctcatgggatttagaaaacctaccaacccggagtccagaaggaccactcgttccaggagggttcaacccgagggtggccccagcgcacggaccacacgttcctgaagaacttgacccgacgttggtcctagtatgcnnnnnnnnnnctcgaggagaacttagcgtgggaacggtcagaatctcgnnacgagggattaagagctcaatcgtggaggtgcccaatctgtgggagaaagaacttatgaaacagaaagtcgcagcctgagacgccgtctggaagaggcgcagtgtcgaaatgctgagttagaacgtaaggcaacctcagctagggcagcacaggggatgaatacccaaaatcaacctgaacctggagtgagaagaccacgaggcagacctcgtggctcacgaaccaggagacaggaaaaggcccaggaagaacaacccagggaaaatgagacacccccctgaaaatcaagatgaatagccagatgggagacaaccggaaactgatgaacgagaaatccctcatgaaaatgacgaggatcttgggactcaactgggagaa

SEQ ID NO: 108075 - DNA, 533 bp, Cannabis sativa
agaagcactactaatctcattattatttgaaaagaaaacaacaatattattatcacaatagattagtataggagaggaaatagtatccactagtcatatctctaaaattaaattctttaatcataaagcttgtactgatgctccataacatgccacagattcaacatagatagtagatgatgtgattaaagtctatttaatactttttcaagaaatagctacaccagcaaaagtgaaaatataaccaaaattcaactttaaatcatctacacaactaccaaaatctgaatatgaataaccaacaactcaaagattgtcgatatgcttatacacaagcataaaactcttcgttctttgcaaatatctcatgactttcttggttgcaacccaataatcatggctaggatcagataattatctcctaagaacatcgactatgaaagcaatgtcaagtctagtgcaaacctaagcatacttcaaactccctactacacttgggatgttcttccttagttttctattcaagtcattct

SEQ ID NO: 108076 - DNA, 841 bp, Cannabis sativa
tcttccaaataaagccaatttcctctactcgattgaagatgtttataagcacttttaaccgagtaaaaccccgacgattccatgttccaataccatgtatctctttccacaaaagcacctaactgaatgttgagaattaaacccacatctctttccaaaaacatgtctgaaatgagttcaacatcccaagatctttccccaacagtcataagactattaacaaacttattttgaagcccttgattctcagttatgacataaggattggactcatggggaagccacggatccttaagaacattaactcgagaaccatctgcaattgatagtcttgcaccttctttaaccagtccctgagcagcccaaatactcctccaaataaagctcagattttgtcccaattcagcagaaataaaagtgccattcgggtagtaacgtgctttgtaaatcttaccaacaagcgagttttccatagttagtaatctccatccttatttacccaaaaaagagaggttgtaatcccgaagatcacgaaatcctaatccccctacattcttgtgttggcaaagacgtttccaactaacccaacttacacccttgcttgtgttcttagattgagacttccaccaaaacttcgccatcattaatccttcaagactcgaacatatctcttggatcaaaagaaaaacgctcatagcatagctaggcaatgcttgagcaaccgacttaattaacacttccttgcccgctttagagagaaacttagtttcccagctaaaaattctttgctgtaaggaaaatgtgttacgtaaaaattataaacactacgcaagtatacgca

SEQ ID NO: 108077 - DNA, 693 bp, Cannabis sativa
tagacattgggaatgtcgagaataatcggaattttagaatttctcaaaataccctatgtgacttcttatgattttatggtgttaaggggcaaaaagggtctttttagaaagatgtgttttgtcttttgtgggttatattaatctaattttaaagtttaattaaaattattttagttgaataaagcttatggagttatctcatttttaaaagtttatcaaaaaaaatcatttttgtctctcaactctctctcattttcgaacccatagaaccagctagggtttgggttttcttcatcaattctaggtgatttctagcagctctaagtgtaatccaagccaaggtaaggtctcttgtagctccttctttgatttcttgggttttaagttatggaagtatgcatgctttgtggtttttgttgttgtagctgctgttagtgtttgattgtgttttctgtagttaaattatgtttggttatcttagtttgagctggttttagtggttgttgattagtttaaccaagctttgagttttgaactcaaacttggatctttaatggtggattgtgtttatgagcatattagctagttttgttgcttgagatatgttctttgtggtctatatagcaggtctggaagttattgtggtgtttggggttgatttggttgaaatatgaaatttttagtcattcctgc

SEQ ID NO: 108078 - DNA, 731 bp, Cannabis sativa
  modified_base (555)..(557): a, c, t, g, unknown or other
gggttccttatgcttcagcagttggtggtctaatgtatgcaatgttatgcactagacttgacatctgttatgcagtgggaattctgagcaggtatcagacgaatcgaggacatgaacattggaatattgttaagcatatcttgaagtacttgaaaagtacaaggcaattcatgttagtgttcaagggtggtgctttaaatctcgaaggctataccgattcagatttccaggcatgtcttgatgacaggaaatctacatctagaattgtgtttactctcgggggtggagcagtggtttgaagaagtgctaaacaaactgcaatttcaaactctacgatggaggcgaaatacaaagatactgcagaggctgcaaaagaacttgtttggcttagaaagttcttctcaggactcggtgttgttcctggaatggaaaaaccactatttttgctttgtgataacactggagctatagccaacagtaaagagcctcgaagctacaagagaagcaaacatatagaaagaaaataccatatcatcagagagtatgtggcaagannngatgtactggtggagaaagtggacacagaggataacctagttgacccattcccaaaagtcgtggcaggaactgcatttgaaaagcaccgtcagaatctaggattaattgaaatgtactgaatattttatattagtgcaagtgggagtttcttgggtttttatgccctaaataaa

SEQ ID NO: 108079 - DNA, 1474 bp, Cannabis sativa
ttggaaactttgctgaaaaactgtctaggttttttgtatctgtttgaacggattgattgtctgtttaaacagattttgactttcctttttgagaagattttcacttaatgatctgatcgtttcttgatggcttgaccacgacctagagggtttctaaactgtatatatattcatcctaaggtcgcttgttttggttagctctcttggtgtatcaattctatattacttttcaaagttagagagtattttttttgtgtgtgaagaacttcggtccaacaagttcttagtactttgttattgtgttactttgtattgtttcttgttgtaattgtgcaggttgaacaccttggatattgttaatcaaactttgggagaagtcttgttcgtgagtcatctttttggaaggaaaaggtgcatgtaagtcactcttcgggaggaatattgcaagttagtcactctttgtgaggaagattgtaggttagtcactcttcgggaggaagatttcaagtgagtcactctttaggaggaagattgcaagttagacactctttaggaggaagattgcatgtgagacactcttcgggatgaagtgtgcatgtgctatgaattgaagagagttcaaggtctcggcacttctaaaatttgattagaagaatagattacaacagttgcggcaaattcaaagagggagtctttatttgtataagtcaattttattttgtaaacacttgttaattatctaataaatttctttctctgggcgtggccccgtggactaggagcaattcgaaagagttgttgataccacgtataaaatattgtgcgtcattttaattttctacattttactttctgcagtatatttttgttctatcagattttgtgtctgatagaacagagatagagtatgttcaaacaattttattacagttccgcattatttaaattgtttgataatttcacttggtaattattaaaaaaggaatttcaatgatgaagaacagaacgtaggttaaatgaattatatacttcattgatttattccctagaatagtgtatctccaccaatctcaaagttttatctaagttaaataaattgcatacttcgtgaatttattgcttaggtaaaagacgtaattattgagcgattcgccttgattacatacaatagggagattagaataattggctgcttaagttttatttgcaggattaataatttgattggaaactaaaattacacttattaatagaaattaagaatgattgtcaagggtggagaataacatttaactatttatctcatatcgtagtctcaattataatttgtttttattttctttttatgatgtttaagtacaactcaaaaccccccctttaatttctgttcgatagtgaataagaaattaatcatagtcctcatgggatcgacccgtacttgcttttataatgaaataattgaaagtattggaat

SEQ ID NO: 108080 - DNA, 877 bp, Cannabis sativa
  modified_base (338)..(339): a, c, t, g, unknown or other
gcttgaagtctgtaggagcgaaagaaaattggttggtgcatctgggtattatgactctggaaggataaacttttgaactctgaagagacattttggaagcataagccgcccttttatacacgaagttcagtgacaagaaagccaaagattgagaaatctaaccgcggggaatcgtgcagaatatgaataggcgattcataatgatcttcgaaaccataccgaaaccatacaaccaccagaatcgaaggaggcgtcctttccaagaaaggatttttgcaaaaagcccttcgtaattattaaaaagctctttttgctaaaaaagaactttttaaggggcnnttgttatacccgaaattcagctagaggacacgtgtcaacgtaaagggaatgtgaatcggtgccctatctttttatggaataactcattaattgcgtaagtatcagagtatatttacaacccattgactgtaaggtcttaggtgaggaatcaatgtatgaactggtacttagtgtattaacgagaaaccatatatcgctaaaggagaatagcgaggcaccagagaagagtaacacataccttagcttacaataagcaaactaagtgtaaaagtcggatcgactcgaagaacaagaatgcgagatgaccatctcgctacgaggaaacttcctatagtttcatccaactaacggaagcgagactcataaccctggaaagtcagaagatttccatatacccgcaatcgacgtaagacatatcatgtcgacctcgaaaagaagaatagttctagcttgccattgggatcactacaatcaagtttttgtcgagacatctccagattcaacaattaaagacgtgtttaatacacgatatttttga

SEQ ID NO: 108081 - DNA, 1104 bp, Cannabis sativa
taagtacaaaataatacgtactatattgaattttgtagaaaatattagcaagacaaagataaacttttacatttattatatatgttattataattttgtagttgttgtgatgctgttttaaaattttttgttcatttgtttttgttcaccatatgaatataggatgaaagttggaagaccaagtaaaagaaaaatttgagttgaaaggtaggagaaaaataagtgtaacatgtggaaaaatgatataataatacgagtacttgccaaaactgacatccaaggcattgatgaaaagagtattttttaggtggtttggaaattaattcttataattcacaagtccatcttattctaggttgataaattgtagtagaaattatatgaaatatgagaataatttaaagatttactttttgatggcacaattaaataatattaatggggtatggattttttgttttgtttacatttttataggtcttttttatgccataattttgtaaataacttattaaatcccatattttatctttttttatcacaaatgaatgttggaggaactctgccgtttagagattttagttctataattttcaagactcgatagtacaacctcctaaagccacagcctttgcctttcgatttagcccaaacaacaactagaagccttgaagatccgactcagcccccatcaaatttggaagcctctctttagattcgttgatcgtcgtgaaggttccaggatatagattctaaccaagtgcaagttagtcgcatctcagttcagaattctttttcaggttgtagcgacgactctagacattcttcctctagattcgatcgacgttaggggtgaagtgaaagagttagtggatttggtggctaagcaagcgaggagagcaaggtttcagctagccaatgatgacgaacgagtagcggacgaagtgtttgggataatgtcttagttcgaaaaaggaattgaacctgaattgagattgattaagcttgtattggactattttgaaatcagaaactagtttgattataacaaggagatttgattcttagaagaagaaattagatacgagtttcctgattgcaaag

SEQ ID NO: 108082 - DNA, 1138 bp, Cannabis sativa
atagtcctacacgacatcccctgatactgaatcctacagacttaggagtatgtctcctgtgtcatgcctgggaaaggcacccgacaaaactcaaactacctttttgcttaacacccactactctgatatctattattcgcgattggcagcgcacacccagttattaacgacgtcagacaatacgattttatacgaacaacggaaaccttctaattaagctaggcctcacctacccaaatcaatattataatgtattttaccctatctgtgtgcttattttctcatgcaaaccctatcagagtctgctcgataacccagttttagcctataagtaagactttatcccttcatgccaagttacgaatttttgacaagaatacttgtgtaaaatactctatagccaaaagttcaataatattgactcgtacactaaagctagttaacgtcacaaccacttaaaaattcttatctcatttactttataatcattttccccttagcttaatcttttattaattcgtttttttgaaaatttttgtaaatattttggtatttttattaaaaataaaatatttaaataatgtagggaaaaaataaaagaaaaaactgatgtatgatgtaatgtaaaaatttgaggtaaagttaaaaaatgttagtaaaatattttaaagaatagagtaaaaaagttaatgtgagtgctcttataatatgcattttttaaaaatatttttttattttaataatatttacttttttaaaaatttccttaagaaaaatatcatgcaattctgatacatacaattacgttacacaaataaaatctatcataacatatatatgtaaatgtatgtgaaaacatcacaaattttgtgtctccctcccccaaatatgatcacacttgaaaaaaatataagatacaaagtttggtgtgtaataatatatacatattgatattggtttggagaaatatgagtcataatatattgaatattatatattatatatttatatgcaatatatataatatagatgatgttaacacgtagatatattatatataagatgtatatacataccaagtgggtacgtagtctagctagtaatgagcaaggctggctggcatgaatgatacaactgc

SEQ ID NO: 108083 - DNA, 619 bp, Cannabis sativa
gatgccaaacatgcactaatattccacaacttttttctctctcttttgttcattatataccatatattacatataaaaccaatataccatactcttaaattaatataacgcttttacgatttttatatttttcttaatatactggaacacataaaaaagatatatcatagtacaaaataaatataccgcacacttaaagcaatatttcattattttaatttaattttattttctttatttttttatgatatttcatatcacatataaataatatacgttaaaataatatgaatatactacaaatttaaactaatattctattaattttttttttatatatatagtgtatgacatagcatataaaattcatatactacaaatctatacagatatactacagtaaaaatttaatataccataaattaatcatagtcaaaaatgaatatactaaaataaataaatttgtacgttctcttaaattaatacaccacaaaggagacaagaagcttagaaggggtagaaaattaaggtaaaatttttaagattataattgtatatttattatcaaacttttaagagttcattttgctaaatatttaaaaaaaaagggtaaatacca

SEQ ID NO: 108084 - DNA, 855 bp, Cannabis sativa
cctggctttattgcatcataaaatgagtctgaattgtccaaatactcaattctcatttttgtgacacatggtaatcttggaagacttaataatggacactgtttatttccgtcaattataatatctactaatgaaggaaggaagcgaggcaaaactccctcgaacttaggacagtcaataatcttaagggttttgagcttaccgtatgttgttgcctcttcattttgcattgaatgccattgctcccatgatgacatgttgctgaaccttaatgtttccaatgatgaaaatggctttctcccagaacaattcccgtaaaactcagcacccaccgtcactaccgaatcgcaacttgagatgtaaagattttttagtaaaggaagttgcccaaagggtggcaaataggagcaatgcttacacccattaagagttacttcagcaatgttgctaaatgaatcatttccaacccaattcggaaatattttgccagtatacttaagaatctgaagctccttcaaagttctataaggtgaaagcatttcaagcactccctctccatgttttggatcaataacaacatcattaacactccattctaacctcaatttctcaagttgcttcctctctagtacaataacttgatctggtgcttttgtaatatttgccacattttctaacttcttaatggaaagctctccatgtagactttgaagttctgccaattcttctattttagcgccactatccttccccacaacaaaagttgtcaaaatttggagacccgtcaatttacttatttcacttggcatctcaactaggcaattcaaacctctgataataagatgtctcaaatta

SEQ ID NO: 108085 - DNA, 1462 bp, Cannabis sativa
gtaagtttaggatatcttttcaaccattcagtccagtctgatgtatagccatacattcgatactagtatactttgttaatgccctaaaaatggcattccacatatcattatgtaagtaaactttattgttgattatcgcgtcagtgtaaatctaatgcagtgataaattatggaactaaaaactttgaagtatataattacaattactttctattgtgatgacatcactgtgatagtgaataactatatgtctgaatttaacaaaaattgtatagtaaaaccataattatgaaaactacatgtaaactcaaatgctttctaatcttttatcgatagtgaataagattatattgaaatagattttatttagggcataaatcccaacaaactctcacttgcactagcataaaactagaagtgcatttcaattaatctattgtctcgatattcatatcaagtgtagtgtgtttgactttaccaaatattagaaattgtaatgttgtgataagcaaaaaactttcttcaccattacttctttttgtattcataaaatactatgaaatgtcgttttcctatatgtattactcctctagagatactaaattctttactacatgataagtgcatatgaatatacagatgacttaattttcatcttgtccataatggaataaagataaaaataatcaaaaactttctttagtttgaataaatttctagtgcctttttaaagcaactaagtcatttagcttcacttgtggaactaaaatactgtgctatttatgtagattataaataatactttagttacatttctttccttagtttaagaattagtattttttttttatcttttatggatgattgactaatgtcttactcaataagtattttatttttaataataactatactattttgtttaatttaataattttttttatttatatatttatgaaaatagttttatttgtactattcagtactcttatattgttaattgttcaaattaaaaataattttttacaactaaaatattttcttttaatttttatttgttcaaaaattaaaattttatttataaaaagtgattgtcatatatgacttgattgtcatatatgactatttgagcactcttgattatatatatatatatatatatgtatatatgtagatatatatttatgttaaaatttttgttttcaccaacacactttgaaaaaataattaatacaatagtataaaagtgatattttttaaaatttattattttatttatccagaaaataattggtattattaaaataacacttgcaaccttttttcaggcccaataacattcaagaacccaagaagcaaataataggagagtcaaaactctcttttctcttcaatatctcggtcaaagcaagaagagtcacaatgactctttctcgccctctgttacttctctttcaaaaat

SEQ ID NO: 108086 - DNA, 714 bp, Cannabis sativa
tgttagttaattgcgttctatggtttcgtgagctaaatgaaaataaattgaagtgtgtcaagggcgtaattgaactgaaattctggattgtatgcataagtaaaaattttcacaatcatgttatggagtttatttgaaaattactcatattctggagattgacttgtttaatttgtttttcatttagtgttttactcgaggtcaagtaaatgtttagtttgggagaatttgttgggttatttttagtattatttttggattaattttagggtaaatggcggcaaaacccccaatacttttgttttggtttcattaaacccccacaacccaaatttttgcgggtaaacccccaaaaccactattctgttagcaatttaccctttccgtccaaatttagctgttaagtgccaagttggcttgtccacgtgaacacaatatacacgtggcacaattttattggtccacgtaaataattatattaaaaaaataaaattaaaataaaattaatttaaaattaaataaaatattaaataatttttttttctttttttttatttttctttttcttttctttctttttttgtctctcctctgttactccttcatctctttgtctatctcaccaccaccattactcctcttcaaaaatatcatcaccaccaccaccatcatccaccacagatgcccaccaccaccactaccattcacagccac

SEQ ID NO: 108087 - DNA, 1084 bp, Cannabis sativa
  modified_base (87)..(91): a, c, t, g, unknown or other
  modified_base (422)..(429): a, c, t, g, unknown or other
  modified_base (833)..(839): a, c, t, g, unknown or other
gttagaatgttaatcctctcagactgcggcccatttgcttgatcttcaacagcacctccattattaccgttgttgcctccattgttnnnnncattagcattctcagccatgattttttatgttttagcagttaccgaaaccctttcttgcctcttgtttcttctattttcctacaagtcttctcgatttcaggatcaactggcaatatgacaccttgtccttaacgtcaaatacaccttcacatcctgaaatagacaaagacaatattgaaagaaacaggttagcaattagcaagaaaaataaaccaaagtagaatttaatataatcttatgcaatatcaatctttaaacgattcctggcaacggtgccaaaaacttgttacgaaaaatgtaaatagtacgcaagtgcacgtaatcaagtannnnnnnnacacaggtgaggtcgaaccacaagcaattggattgaatatcactagactaaatttatgactctatttggcaaaccaatatttttcaagattaaaaaagaatgaaaattcaagaagcttaagtagacagatagaaatgaatcaaaatgagaagataaggaagagaatcccgttgatatgtttacccacttgttaatgcctaattactatcccttttcttgatgtgaatgacagattatacaatttaacctagctcctttcagatcttctaggttctaaatcacatgttctctaattaatctcttaattagaatcatatgaaatcagcattaagcaataatctaattgtcacttaggtcacgcaaatactttcgtttcacatcaacctagattatccaattttagnnnnnnnaattctcacttttcagattttgatttgagatcatagaacatgtaaaaggtgatcaagcttaaacatgaaattaacacaaataatgataatttcacaatcaagatgaaggaatgacaattaacattaactagggaaaactttaaacaacattcatcatcttctctaattgagaatttagttcatgttcaaatccataaccattcctaaaacagaattcaacataaagaaattaaaaaggaaggaag

SEQ ID NO: 108088 - DNA, 924 bp, Cannabis sativa
catttttgtttggcccaaatcttttttctcctctcatctcttccttgctttctttatacatcaatttgaatttaattttgaccatacataatataaacttggcccaaatcccttctctcctccttgctttattttctctttttaaatggatgggcccataatactaattgccaattttgcatttaaattcttacaacaccacacacaattatatttaattaattaagagactaaataaataaaaatttgatattaaaaaaatattaatcaaaactaataaagaaatactaaaattaatatttattcaaatctaaataaaaagactattaaaataaactaaaaatacttgagaacaaaactaatttaatgtacaaaaagatataaataactctattttcattgagttatcatttagtttgagactcattaatcctataatcttttgttatattgagaaaatgtttacaactttagcattccatttggatgatctagatcttttagttcttgagattgactccaacttgttgggtcaaaatagagttgatcatgacagtaatttgtttggatcacaggaaaatgattgacatagaattcatgttgagtgaagttaagaagcctcaccttttcgtttttcataagcaaaagagggacggacctgagaaacttacactgatgctgacttattatgttttggatgggtcgatttaccaagcaccacaactttgcaatgtttttgctgctcgagttgtaggtgcttttttcttacagagttatgttgtattcttattatatctttataactgttaatgatttctttgaggcacaacactatcacatgtaacttccaattctacaactttcaacatgtgtgtggaagaagggtgtaatttgaagtcgtttggattcaattgttagtttgtt

SEQ ID NO: 108089 - DNA, 777 bp, Cannabis sativa
ctccagcctgcgaagaagggtccgaagatcctctcttttgtcttggagactggtcgcgagataaagaagcaatattagcctcaagctattcggttgatggcatatcctacagctccttggtcatctcgacaactttgatctcaggtgctaggagtttcttgttgacttctcccagctctgttcgcacagctccatgttgaactcgggcatccttggcatccttcttggccaagtccactttcgttcgcattgtgttggaaatggcaaggctcttagtagcaaccgacttagctcgggaataggcataagccatcttctaaccagtttgtgcaaaaagaagacattacaatccaaactagtgaaagagaagtgaaagggaaatgttagataagacttactcgtcaaagctctttcaaaactcctcccatgaccagctccaagaacaagtcgttgtccgccccagccaactgttcgttcacctcaggaccgaccaactcacatagtgggtgatcatatctctgcctcttttcgtctcctggggcaatattagaggtggggcaggagccttaactagtttagacccgcttctgatcagctccgatcctccctttgcttgctcagattctccgaactccctcctcaagaacctttagatatagtaattttcgtgataggaatgtccacggcaggtcgttcctcaaaaagatcaatgacctctctagctggtgccttctctttggacggagtctcacggcctttggatttcttcgccggagg

SEQ ID NO: 108090 - DNA, 574 bp, Cannabis sativa
acctgtttcaaaagcaccttaccgcatgtcacctactgaattgaaagaactaaagatacaactccaagggatgctggatctagggttcacccgaccagtatgtcgccttggagagctttggttctgtttgtagagaagaaagatggaactctttgaatgtgtattgactaccgagagccaaacaatttaactattaaaaacaaataccctttgcttagaattgatgattagttcgatcaacttcaaggcaaggtggtattctctaagattgatttgagatctggttatcatcaattgagaatccgggaagaagatattccaaagacagctttctgcactaggtatggccattatgagttcctggttatgtcattcggattgacaaatgctctggcagcctttatggatctcatgaataggatatttaaaatttcctagagtaactttgtaattgtgtttatcgatgatattcttgtgtactctcggttggaagcaaaacatgaacaccacctttgtatggttttgcaacgactcagagatcataaactttatgcaaaagatcggaagagcgtcg

SEQ ID NO: 108091 - DNA, 637 bp, Cannabis sativa
aactaaatagtgattacaaatttgaactaaataaaatctagtatttacatagttatcaaaatctagtatttacatagttatcaattgtgattttatcttttcttttggtatttccttgttctcgagtttattgcctaaaattcaaaacagatttttttcaaattatttaaaataaataagcataaaacaagaatattattataattataaattgacaacaataaaaaaaatatataagtaccaaaatgaaaaacaacaacaacccagtctaacataccaaagagacacaaaaaaacttagaggactacaagttacataaattacacatacacacatacaaataatttattaatgaaaccaaagagtataataactttcttctaatttctcaatcaagcaaaaaaataaggtatatttatcaaatatcataaatattacattaactaaaagaatatagagaacttaaaacactacactattatgatttgataaaaaaattgtggaaaaaaaataatacaatggatcagtaacattaaggagttcaacatcattcccctacaaagcaaccctagccaccaccctactgaatcttttagaataccctacaaagactatttgatgaaaatttgaatacccc

SEQ ID NO: 108092 - DNA, 570 bp, Cannabis sativa
  modified_base (27)..(49): a, c, t, g, unknown or other
gatctttttattaaacaaaatcttaannnnnnnnnnnnnnnnnnnnnnnattcataaacattgaatttaaattctatgtgtttatagtgtattatctctttgcagagaataaaataccatagattttgtatcaataataaaatacaaacacatacaaacatgataaacataaaatataattgttgtttgcatacaagttaaagaaaaatgaagctcaatctcataaatggaattcatagaaaaatttcttaaagggaaaattttattaataatctcaaaattgtcataatgaattgtttgcataaatatgaaatagggaaaataatctaaaactaataattgaaactaaatttttcataaactgaaacaattaaattaaaaataaagaagatccgagcttcatcttcacttggacaatctccacccttctgtccaaccatctgactcaactcgctaggatagacatcccagtttaagtagctggagctgaaataagaagaaaatgaactttgttattagatctagaattaataacccaaggggataataattctctaaaacacatgaatt

SEQ ID NO: 108093 - DNA, 554 bp, Cannabis sativa
attttggttatcccaagtgtccttttagggtacattgttagtaaagatgggatcatggttaatccaaaaaaggttgaatccatcagggattggccaaggccgaagacaatcactaaagttaaaagattagctgggtacaactgccaatttgtagaagggttttttaagatttcaatgcccttaacaaagttaactaagaagaatcaacagtttatatggacaaacagatgtggagctagtttttaagaactgaagcaacgattaatcacaactcctgtgttagctctaccaatagataaagaaaagtttgtgatttattgtgatgcatctagatagggtctaggatgcgttctgattaagttgatagggttattgcttatgcttcttgtcagttgaaggagtatgagcagcgatacccaaattatgacttggaacttaccagagtggtctttgctttgaagatttagcgacactatctctacggagaaaagtgtgaaatctataccgatcacaaaagcctcaaatatttttttactcagaaagatttgaatatg

SEQ ID NO: 108094 - DNA, 734 bp, Cannabis sativa
  modified_base (34)..(47): a, c, t, g, unknown or other
atggccacgtaggataattttttagtgacctgtnnnnnnnnnnnnnncaaaattaggacttaactaggctggacagaagacaccttaaaaatgtaaatagaatagtactttagagggttttcccaccaaaatataaggttgcatggttttttacaaagtacattgatagttgagggggttttcactactacaatttagcctttcagtgacaccatttagtgacttgcacaaaaatacgcgtcagtaaagagttaggagtaacttttagtgacatgtacaattaaactctaaatgtctaatgttaatctcatataatgcatgtcactataaatattgactttcagtaaaaagtaaaacccagatttttctgatttttattaatttaaaaaatgatggcctacagtgacacactaagcgtgactgagtaaatgtgtaccgacacacattgtgtgtcactatatcataatcatatattttttttaaaaaaaaaatacagctgtaattagtaaggaaataaaaaattaaaaaataaaccttatcaaattacaacccatatcagttaaataagtaaataaaaaaataataaaaaattaattaaacacacatgctaatattaagggtttacaaaccctatcagttcagccaaaagaggaggcgcctctttctgctcccttatattctcaatcgcctctttttcctcttctccttttgcgccgcacactgtgaacgacgaa

SEQ ID NO: 108095 - DNA, 551 bp, Cannabis sativa
agagctttaaacgctgtccattaactttgaaagttgatggaccttcaccttttaactccacagctccatagggaaataccttgaccacgataaatggtcctgaccatcttgacttcagcttaccaggaagcaactttaaccttgaattgaatagtaacacttactgcccaggttgaaactctttcctaactaagccctggtcatgccacttcttggttctctccttgtagatctttgcgttctcataggcctcattacgaaactcctcaagttcattcaattgcagtagccttttttctcctgcagctttcaattccatgttgagagtcttcatggcccagaaagctttatgttctaactccaacggcagatgacaagcctttccaaacaccaaccgatatggagacatgccaatcggtgttttaaaagctgttctatatgcccacaatgcgtcgtctaactttcttgaccaatatttccttgttctctgcactgttttctctagaatcatctttatctcccgattagaaatttcagcttggccattactt

SEQ ID NO: 108096 - DNA, 538 bp, Cannabis sativa
tcgtttgtcttattccagttagagtacttggaagagaggagaattaaggacctcgtgaagaagcattcagaattcatcagctatccaatttacctttggactaagaagaccaccgagaaggtgattagtgatgatgaggatgaaggaacgaagaaagaagaagagggtgatattgaggaagttgacgaagagaaagagaatgattcgaaaaagaagaagaaagttaaggagggtaaccatgagtggcaactcatcaataagcaaaaaccaaattggctgagaaagcccgagggaatcactaaggatgagtaagaaatttgaagcaccacattgcaccaatcacagtaatagtaaaaagatgaaagagaaaacttacttggatgatagaaaacttaagaggcaaggatcatcactcgcagggaaacttaagaggcaaggatcataactggcaggtgtgatattattgcttcttcttcttcctcttcacaatttatattttagaaacatgtttatgtatgtaagaattactatgtgattg

SEQ ID NO: 108097 - DNA, 515 bp, Cannabis sativa
aaattaatttaaaattaaaaaatagttataaataaaaaaataattttcttttttttttctttctttttttttcttttctttcgtcggtttcttttttctttctttttttcttttcagttttttccatttacagttctctctctctctctctcttctctctccccccataaatctctctctctcccccacaaaccaccatcacctaactaaaaaccaccaacacctcaccaaaaccaccaccacataaaaccaatcaaagctcacctaaaacagaaaaaaaaattacaaattacaaaacaccaaaatatagtttcttaaaccaaaataggtgtttttccaaatcacaaaacacctagatctggaaaaataaaacaacatttttaagaaagagaaatgaggagaggagaggacttacgagagcacaccgagggagagagaggcaccgtcgaggtggttgggggttgttggagaaccgtcgaagtggccggaggttgtcggagaaccgtcaaggtggc

SEQ ID NO: 108098 - DNA, 821 bp, Cannabis sativa
tttctagtgagagaatgaaaagtgaaaagtgaaaaggagtttccctccataagtcttatacagcttctatgggaccacttcctcacttgccacacagtgttcaactaaaaagtatatagaagtacaatgcagttaacttactaaaacaaatgagattagatagtcaagagcattatttcaaagagtaaaaatgcagcaatatttactcagttaaagatacatcaatcccaactaagctagaaagtccctatatgcacaaacgttcgcacaaggacttagggaaaatattatcctaatttttatccacttgacgtgtcatatctatgtggtcgatatcagcacaacgtggcagtataactcacaaacaagaaggccacgccatttacttagcaattcaactaatggggattcccgacactcaaatgggatgacgaatgacagaccaaccaccttaaagaggctggctaggccactcctggctggccctatggctagcataggacatcctacttcaagataacacaacgccagctagctggcatcttgcaaatgcatggctagtaagacattggcctggcaggacttggatgtacagcttcatgtgtggtcagcaagctacattgtgaattggaccttaacaacccacaaaaatagagggaaaatgtctatttttaaggggcattttagtcatttgtattttactaatttaatatgtaaatatctgcttatttttcttgataaaaggatttaagctctcctatataaagggccttaaacaaaccctaaaatgttaagagctaattgaagtcctaagctctaag

SEQ ID NO: 108099 - DNA, 925 bp, Cannabis sativa
  modified_base (224)..(226): a, c, t, g, unknown or other
ccgaaggactttatccttttgatcaaggctctcataactaagtatatgagtagggtctgaaacgtattttcttaacattgagacatggaatacgttatgaactgctaaaagagttggagtcaaagctaacctatatgccacttgcccaatcttcttgagaatctcgaaaggtcttgtaaacctaggacataacttgcctcttttcccgaaacgtttgatccccnnnattggagatactcgtaaaaacacacggtcccctacttggaactcaacgtctctgcgtttcggatctgcataactcttttgcctactcttagaggcaagtattctagctttaatcttttgaattgcctcattggtccgctccggacctagatactttctttccctcgtctcatcccagtggatgggagatctacacttcttaccgtataacaactcatagggagcaatccctatcgtactctgataactgttgttgaatgaaaattctatcaacggtagatacttactccaagagccttcaaagtccataacacaagctcgtaacatatcctccaatatttggattgtcctttcggactggccatctgtctgaggatggaatgtttgtactgaatttttattttgtacccattgctcgttacaaactttgccaaaacttggaggtgaacttcggatccctatctgaaactatagattttgctagcccatgaagccttactatttccttaatgtacaactccgctaacagatccactgaataggttgttttaactggcagaaaatgagcagacttcgtgaatcgatccaccacaacccaaatagaatcggataaacctgcggttctaggtaatccaaccacaaaatccattgtgatgtcctcccatttccattcaggcagggttaaaggctgcaacaaccc

SEQ ID NO: 108100 - DNA, 1890 bp, Cannabis sativa
  modified_base (26)..(27): a, c, t, g, unknown or other
tacgtttctactttttaaccctaatnncccctagatcaatctcagccgtcacatactttgtatatatactattattactattaaattattattttgattgtgtatttttgtaaagtgattataattaaataaattaataaaaataaaatgaaaaaaatattaatcataatatagtcatatatataatttaggagaattacttaagaaatactcaaaagcaacaaaaattatacgtttttaaaaaaattcttattttttttttaccttttatcaacttttttcccttagaaatcgttgtttttaggttgttctaaaaaagactgttgtttacacattgcaaaaatatagcataactttacggcaacatgaaaaaaaatgttgttttctctctaaaaaatacaaatccgtaaaaaatatataaaaaaaatcgtaaattttttgttgctttttgtagttgttttgttgttgttttcatgttgttctttaggtgttgtaaaattattttctagctactttagttgttctttagttatttttttttactgaacacaatattttttatggttgtcattaggttgtttttttggttaatttttgttgttttatagtttatttagttaatttatagttgtcgtgaagttgttttcttgttttttgcagagaaaagtgtaatttttaactttaaaagcgtatttttgtaaataaaaattttaggttgtaaaattgtaaataaaatataaaaaataatatttttgaaaatttctctttaaaaataaataaaaacaacacacaaataaaaaaaatatgtaatatatattcatttctattgaataaacaactaaataaaaacaaataaacaactgtataacaactctaccataatatgcaaattacagagacatgtaaataattccacaaattttatcaactccaaagaaagaaaaaacaacactaatgtataaaataaattgggaatactcatatagaaagtaaagatgtaattgtacaaaggatcaaaaatagtgttaaacatagaatagaattattttggccaaaaaagattggtcaacaagttagagattggttccattcattgtaaaaaaaagagagatgttgttcatgagatctttaacataaagatgctcttcattgtaattgattgtacaaagtgttgtggattaataataaacttgttgattcatcaaaaaagaaaatgtataaaaaaaaattttacaagcaactacaaaatacttgtataccatctcaataatgcctataaaagaactaaacatatactcatttttttacttattgaacaacttaataacaactaacaaacaattaaatgacaataatacataaatatacaaatcaatattggacaccaacaaattgtgtattctgacacactcaaatcgcacacactatttataaaaatgacgtgtttcccatatatgtatctatagttaaaatttaatacatattatttgtgtgtaaaaagtgtttgttataaatattaataattatttgactcttgtatttgtataaatatgggttcaccccattttttcttcatctttttcttctttcttctcatctattttatattatttcataacacgttaccaacacgagtctctgcccaagcttcaagcatgagtgtctgtaatatctgttaactccaaaaggatatttttgtaattttatttagctgagagtatttttattattttacatatttatggatttaaatatgtatgggattatttttatgatgatataatattggatattattggcatgtggataatgcctaataaatatatatatatctggatattattatatgggtgtgtgatttgctttattttggaacatattattattagt

SEQ ID NO: 108101 - DNA, 723 bp, Cannabis sativa
tcaaggtactgaggtttctctaatctttcaatatgaacacttacctgatttttgttttgattgtgggataattgggcataaagccatggattgtcctttaagagattttgcgggagataatccacactttgaccgagggagattcggttcgtggatgtgtgctcctagttccccacttcgcgtgatgatcgatttcgggttcaacgtaaccgtgagaactctccttcgaatagaccgattatgactatgggtgaagcttcatggattgtttctacggttgaaaagaattgtgctcgttactcaggacctactccggaggagcttgcacctacctcggtcttagaggctcgggaaagagaggaggagttggcctcccatgactctgatgttcttaatattgccgtggcacctatgggtaatgtgccgagtggggttaatttggtggggttacaacagaataatagtttgggccgagagaagagtctgaatagtacatcttcggatatggatagtgtgactgaaatggtgacacccgtagattgtgggaagaaagtgactgtgggtgagggtgataatggcaaagttaatgcttctactagtgctactgtggacttggttaatgcggtggaatttggtgaaggaagtaatcaaaagttgactaaagaacaaaagggtaagggtgttttggcacattcctctcatgatgagatctcttttagccac

SEQ ID NO: 108102 - DNA, 778 bp, Cannabis sativa
ttaatacttattttaattttattttcataatttttttctaactcatgtatatatattttttttattcatgtatatatatatattttttatttttaaaaagaaaatttcgtaaaaaaatttattttaatttttatgtcataatatttaaaatgtaatttaattttatttgataggtatattttttaagtttatgaattggaagaaaaaagttgaaaaaatttagtataactaaagatatagattttatattaaattaaaattattaaaatagggtgcctttagaaaattttggggtgtaaataaaatttctcttacgattttatatttattttagaaaattgttattagacactaatactgatgaaatttatcaactgtaaaataataaaaataaaatcttgtaaatttttacatgtattaaattgtattttcaaatattttaagcgttaaaaattctttaaaaaattatttaaatttgttaaaacataattactttcattatcttaaatgttattaattgttcttaagaaaatttaaataaatatgttttaaaatactatattaatatataaaattttatatttattgatatttgtagttatattaatttagaatataaaagctggtttgatatgttatattagattgtattgtattgtattatattaaattatttttatataatattttattaaattttaatttatactaaaatattatatatttaggtatctataaaaattaatactacacgtaattttatgtaaaaatattacat

SEQ ID NO: 108103 - DNA, 526 bp, Cannabis sativa
aaattaaaaaaacaatatataaagtaatttttttttgttttgctaaaaacaaattcattcttatttacggataattaatagtttgctataaataatatcaaaatatgtacgtagaaatatggcattacatcaatgtattttatgtttgcagagataatttaatatatgatatcttgaccaaccaagtcaaatctaaaaatcacctaatcccaacaaacacatgaccatattgctaatccacaaaaacaaattcctattctttatgattataataatcactatttatattttctaaaaggctacaaattttataaaacttaaaaataaaagggtttttacaaaaatattaaattttaaataaaaatttataattttattgttacacgtttttttttttaaaaaaaatattttctttttataaaacaatagtaaaataacaaatcagaacaattaaagcaacagtggaacaactaaaaaaaaccgtaaaaatttaatacaatatataatatttttaaaaaaaattcta

SEQ ID NO: 108104 - DNA, 734 bp, Cannabis sativa
tttgacagatttggtatttgaagggcagttctgggttcgaatcttagttgaggggggttgggccttcggtgttttacagatttagtatttgaaggggagttcgaatcttgtctgttttgtgtatttcatggatttactttgtagctatttcgaatttcggatcttattttgaattattatgagttagaattaatgttcatacctgtaaatattgaatgattgttgtgtattttatttttgttttgtgttttttttttttttttgctagaaatagtttgttgaattgtatatacagtacactgtataaactattatatgaagaaataactttccatattattttgtagttttaagtttagtgtctttttcattaaaaataaaattaaattaaattaaaaaaaatttatatattaattcacaacaataacattaggtaataaataaaaatcaaaatttggaaaaaacacaataaaatattattttttgtagaaaaatatttaatatagtggcactttttgtgtgtcactatatctccaaaactattaataaaaataaaaaagaaaaagaaaaaaagggatatagtgacacttcatgtgtgtggctgttactttttcagtctcacaaaaactgactctatacgcctatagtgacgcgcagaaaatgaatgtaaaagggttcagtgacatgtgtgaagtgtcactaaaaactgtatttccagtcaccctcattagtga

SEQ ID NO: 108105 - DNA, 524 bp, Cannabis sativa
ttgtcatttaacaaaacacagggtctaatctgtaacttttgcaaaacacaggatccaaaatggtatttaccctatttttattgcatagctttttatcgatgtgctaagatcatttgattatggatttataaaatttataaatttatgtatttctaattatacacatatgattcctccttagaaatgaaataaattcatagctatatttattgaacctgaagttcaatgtcatatagtatatatgatttttacaaatatttatttattgtgataaattgaaatccctacaagtgtataaatattattagaattcattatttttaaaaattctctccatcagggaagagaaatgcaattgggatcaataaagatttttgtaaaattatccttgcacaaagtatataagaacaatatagttaaaaatgatatatgccaactacaaattaatattattcaaagttgagttagaatgagtccaaaaatgcctaaagcgtaaatgaacaatgtagaaactattaataaat

SEQ ID NO: 108106 - DNA, 564 bp, Cannabis sativa
  modified_base (214)..(217): a, c, t, g, unknown or other
caacgaggttaatgaaaatcgtgaatatttaaaatttgtttatttacttaaaaacttaaagtattacctagataacattttgggatcccgtttacaaaatactttacaaaagtttgctatacatataatcaaaagtttgtcgctcggcgactatacagcaaaagcctcgatgtcccatatatcgtacgctctaggcttaaccgccccgacatgnnnnatcttcatctgctcgctctcacggctcctcaactttagcttagcccttacctacacatagcaatatcattgtgagtcgacagactcggtaagaaaagcataacataaaacatgcaaataacctgggttataacctggcgcccatacacctgatcataaccctaatccccgtgtcccacacggtactgagtctaaaacgttcataagacaatactatcaaccataatgtcagcgtatactcaatatgttagtcattctctagccatattgatgtgacaacaacgattagtattttagccaacttacatttatcagtaatcagtacaactctatgtatactattactgc

SEQ ID NO: 108107 - DNA, 614 bp, Cannabis sativa
cttggtgaaaaacttgatgattctgttcttgtgagaaaaattgttagagttcttccagagaagtttgatactaagctcttggtaatggaggaagctaaagactttagcacaatgaaggtggaagaattaatgggttccttgcgtacttttaaattgaatcaacaaatcaaacaaaaggacaaacccaggtccattgttgataaaggtaaaagtatccctttaaaagttgctgataatgaaaattctaatagtgaatgtaatgatgaaattgctttattaaccaaaaaatttaaaaaatatatgaacaagatgggtaataaaaagaataattcaaaattttcaaaagggaatgcttcttttaaaccttctgtaactaaaaaaaaagggaattcagtgcagggaatgtgaaggttttgggcatatttaatctgagtgtgcaaacactttgaaaaagaataagcaatgtttcaatgtcacatggagtgatgatgaaaccgaaagtgatgaggaaaattctaagaatgttgccctaacttctgttttgtctaaagtgttgtgtgattcacaggtgaaacctagaatggcatgtttgaataataccactaaacaagaag

SEQ ID NO: 108108 - DNA, 554 bp, Cannabis sativa
  modified_base (200)..(201): a, c, t, g, unknown or other
  modified_base (505)..(505): a, c, t, g, unknown or other
attaaagttcattatttaaaaaatgtatttctatttaatcatttatgttatttatattttaataataaaaattataaattaaagttggtctgaaaataattgaaaaattatttccaaccttaattaaattttcaatattgaattttcaaaaattatatataaatatataaaattcgaaaataaataaataaattaaaatnnaataaaataaaatttaaaaattatctaatttaagttgttctaaaataactaaatttttaacttaaattattttcaaataaaaaatttaattaaataacaaattaagttataaacacctaatttgaaaaatattccattttaagttgatccaaaattgaactaactttcaacttaaaataatattccaagaatctctcaataactaattcctagaattcctcaacttaattttgaatttcaaaaaaaaatatccaaattcaagttgataaaaaaagttagttataaataactaatttacaacttnaataggaatatttaatgaaatttaaataattaagcttcagaagaatcta

SEQ ID NO: 108109 - DNA, 767 bp, Cannabis sativa
catacatgcacagtccattcagatttcttgatgtctctaactaaatgtacaatgtttaatatcaatagtaattataatattgcccataaattctaacttggatcggctgaaggaccgatatccctgtccccttgagtgataaccagcacttaagcaagacttgtacacttttctcctttaacataagtctttcttaactacgtgtaggctcttttcagatgacccactaccccaccaaaaaaaaaataagatatggctctacattggctcaaatgacgcctttttgcatcttgaacactcaggataaggtcaccatttcttattctcactttgaccgctatcatggtcaccctagaacctttcgttctatcccataatttgtggttcatttagttttttcttcttgatctactagtaagttggcttcatatattccaccacatccagtggtacaacaggaagtgtcagtaatataagaatagacacaagatgtgcctattgttctctcagatctcagatctgttttcccttattgtctaatcatatcctgcacaacagaatttacatgttcccagcattatggcaatgaagaattctcttccttaccgttttccctgagctaagatagctcgctaatcagactatttgattgcccatattgcttaacttatcacacatttagtccacatcttctaaccatttagaactcaaacgaatatcaatatcaatatgcatataccatacacatattcttatcaaaattttca

SEQ ID NO: 108110 - DNA, 558 bp, Cannabis sativa
gagtcattgggaaatgaggaagacagttcagacagtatcgaatggggcatgattagaagcattggcacgttagcttggtgttggcatttaggtgagcgactgtagtaagatttgccttatcatagtgggaacctatttacagtgcgagtatcttggctagagagcctcggtgcatggatgcactgacggatgcttgcgagcatgactcagcgggagttgttcaagagacggaagtgtacacaaggcacacgatcgcatgaaaaatgagcccattattactcgggtggttggaaggctgaccttagcttagagaagtcaaagtgctgcacgagtgtttcgctgccgtaaaaagtgagcctataacactaggcagtggggttagttgagattttggtgtgaatgtggtggagttacttggagtttgattggcgttgcgtattgcttgataatttggcttttttatttacattattgaaagtgatttgacaattgtcataggctggattaattgttctaattccaataatgtatgtgagccaattattttttatgttattt

SEQ ID NO: 108111 - DNA, 520 bp, Cannabis sativa
gcctgagggagacggaagatgtaaagaatttgcttgaagatgtaatttttcgaagtactagtatgaatatgaataccgagctcacttataaacaagttggaaatgtggctatgatggttactagctgctatggaaaacttcatgatgaaacatataggcagatatctcttagctttgtcaactatccattctggaaatcatggattgaaagttttcagaaaataggatttgaatcctcacaagtctcattggttcaaaagttctataaagcattggagcaaacttactatgctgactctttcggggaaagtcactatgtatcaccgagttgtttcatgtacatcgtggagcgccttctgattctgatattccaattcaaagggtattttttctcaatcaaatcttcgctacttgaatgtctcataaaccaggaatggaatatgaatgcctcacacatctctgaagatgactggcaaaacaaatttggtggtactcttgataccattgcagccattgttgc

SEQ ID NO: 108112 - DNA, 816 bp, Cannabis sativa
  modified_base (751)..(764): a, c, t, g, unknown or other
aaagcgacaaatatcaattgcaaaagtccttagagtacaaactaattgttacagacggatcaactcaagaataagtgagcgaggtgctcgtctcgttatggggatctcatataacttcatcctgttatcgtcagcgaggcttacaaccctagcaagttaagaaactaacattcaaatgagcttcgaagaactctttgtaaataagaatcgcgatcgacgcaagacatacatcgttgacctcagaaggaaaagtggccccagctcgctattgagatcactgaaattaaagtcgtgtttaaaacacaattattttgacccagtaaaagcatgaaaatcacagctatatgattttcaaatcataaaccgcatttacactaagttatatgtaatcaaatgcaaagattttagggatgattggtgtaaacatattacagtcaactttgtaattaagtccactatgtaattataaatagtgacaaataagattaaaaaggggaaaaaaaaaacaagagaggccctgaaaaataatcagaaatctgaataagattaacttgtggactatgcagaattttcactacaaaaccatttaaaaaacccctgtgttcatatttttatttctatagcttttatttattttgcgtgaaatcactactgtgaggctcaaatttagttaacgaaaatatgtgttaacataaactaatacaatttttaaattctcattaaaataataaaataaaactggaaaaattannnnnnnnnnnnnnggtctaaaattaataaataaattaatttttaacataaatataattttcctat

SEQ ID NO: 108113 - DNA, 823 bp, Cannabis sativa
  modified_base (742)..(743): a, c, t, g, unknown or other
ttattattattttctaaaaagaaaaaaggtaaaattacaattttcttgaccttcatgtttggcccctccttgggtctttgtctagttccgccactgataatgagccacaaaaatagatataatatactataaatacctatctgatgattaataaatattgttatgttaggtcttaatttttttttatacaatgcatacttccataaagttgtattagagtagttattatttaattattaatttaaaaaataataataaaatttaaatctaatacaattcaattataatttttaaatatataacatttaatatagttttaaattaatttatgaaaaaatatatctaactaattttattaaacaataaattaagtatataagtttagatattttaaataatataactactaaatttgttataaaatatgattaattaatttatttacgtcttatttaaatttaaattaagatttatattaaaagaaataattatttaattttattgatacttttaaggggaatcactctgtatactatttttttaaaaaaaaaattacgttttaggttgtttcggtagtttttatgtgaattttagttgtgatttaggttgcttagtcggttgttatatagatttatgtaaaaatgtaaaagaaaaattactttaaagtgtaaaaataaaaaaataataaataattatatgtcatattttaataaataaattaaatttaaatatttaaaattanntttttttaaaaaaaaatcattaattgaattatttaacagtgtatgtttaaccgttaactttaaaagaaaataaaaaaaaa

SEQ ID NO: 108114 - DNA, 584 bp, Cannabis sativa
  modified_base (537)..(545): a, c, t, g, unknown or other
ttatattgaaatgggttttacttagggcacaaaacccaacaataacttccttcaaaaccccccctaagaccagttccaaggataactcactgtccgctccagacagctaatcactcactttaggaagggaccgagttaggtagtgttgaagtatgtctttgcctctcttggcctccgtgaaaagcaccacgattgttgaaggagtcttaacttgttcagatctatctgagctccttcttgggtcagtgcaccaagtgaagttctctagttctcgtctagagatggttcttctcgagccttcctgtcccatgcctctcgaggctaggagtgaaggctcgcaactctactcgttgcatcctactaatggtgggtgccacttccaaactctcgtgtcaagcgactaggagcttcttacacgagatagctctaagcatcttgcaaaaaggagttatgaactcatgcatcaggtaagtctccttttctccttcttgttctcatcatttttttactcctcttaattgttggaaattattttannnnnnnnntagatctactcacaagtatgttcattaacaccctaaata

SEQ ID NO: 108115 - DNA, 814 bp, Cannabis sativa
ttttattttgttatttggctttatcaattggagcgaatcattgggaccctttgatcttggtctacctacctccaaaaatctgttcagtggagagaaagattacataaatagatttggtaagtaaaagtttgaaactgagaggttactcctgtttatcaaaacacattcaaattcagtaaaataattgtttaataatagagaaaatatgagttaacatttgatttgtgttattctatagtaaacaaagaccagagtactttttagttcaattcaatgtaatgaataacggtgaaaaagattgaatcttataccaaatagcattatctttggtatattttttttaatactcttttgttgaaatcctgtttttattatgttattaatcctgtttgtattactttagaagcttcaattggtttgaagaaagaagagaaatgctacccatgattgcctacgaggaagagatacacaacacaatgaggttgtgcttttacttttgaaaaatatgttttcagcatatacatttaggtagatctaaactattttgtcatatatgtttatattctcttcatttgatatttaaagtcttaagatcaacaaaatattttagctagttataaactatttctctgtatatattattcttgttataactttaaatgatgtagctaaatatcctaatttagctatcattttcaatatcaattagttgaaggagcaatttatgaacttttttttttaggtcttttggctttagttaatatatttgattatatttatgttcgatacgtaataaagttatttgcattgatga

SEQ ID NO: 108116 - DNA, 979 bp, Cannabis sativa
aaattgctgcttcatctaacccggaagcccaatgagcaagcttgtcagcaaaagtatttgcagaccgagatatatgggaaacttgggcagtagggagaagagacaaagcgtccttaagttgcttcagaatgtctccaaaagcggagatgttttcacgggaagagcttagcgcatctgtaattgccttgcagtctgtctcgatctcatgcacatggaaatgctcctcgatgcaccactgtaacatccgaagaagagattttgcttcaagtgttgccacagtcccgccgcctacataaggagaagccaaatcaactacaacaaggccttcactatttctgatcacaaccgccgaaacctgctttcgaacgctccttagctattgatgcatccacattgagcttgagacatccttgcactggaggggtccacgaagtaggaggtgagagtctgctggatgtggctctgggaggttgccctgatgaggggagattgtagtcgtccaggaaattgcgcgccagagtcagaatggcatgggctttgtcttgtacctgttcttttcgtgctctgttcctgttaaaccagataaaccaagcaatgcagagaaagagttctacttcttctttgggtagagaaacaaaccatatgagcaatatcgtaaaaatcaatctcataagggtatgaaaaaatgtagggatagaaaagcgtacctttccagactcttcgaacacaattgcagtagaacaatgcatgagacaccgattcctccatgtttccacaccgttcacaaaccgaggatgggataattttcctagaggctagacttttgagggtagggagggttgagttggtggctcggaaggcaaaatgttttaccttgggggggatttttaggtgccataaatttttccaccaaggcgaaggggaggagggtgagggaatgtcaggaggtgtaaaggaggagaaactgaggtggtaacca

SEQ ID NO: 108117 - DNA, 565 bp, Cannabis sativa
  modified_base (57)..(61): a, c, t, g, unknown or other
aattatggtagaactatgtatgtaaataaattggtggcaaaagtatttaagtaatcnnnnntattatagttaattattagtataaaaaaattgataaaaaatttcgtaattaaaataatttttttaaaataaacacttatgtaaaaataattcaaattaagtttttaaaaaataataataatttaaattataaataaataatttttttaatttattaatattattttattttttaaaataaatatatttttaaatattattataatctgaataaagttttgattgtatataagcagtcttatcataagagtatacaccttacatcataataaccacatgatctaaaattaatggtcaaaaaagcttccctaccggtagggaacttttgttaggtcctacatagtcttgccctatatatttatatgataaataattaaagtaaaattagcaagatgtaatttatatgtagaaaccttaaattgatgattagtgagtctcgaagataatatttttatcaatgactgattgcgataattaactctacttgattgatactcttctcttt

SEQ ID NO: 108118 - DNA, 591 bp, Cannabis sativa
acaaaacaacataaactgcccttaataaaacgaacataatctctcaatttttttttatccaaatgacttggttcaacttgcattggaaagataattttaagagggatctaaatatggctcaaggtcacagcccaattctaaagtttttcgggtccaaaatttgctctcaaggtagactggtattctttactcgggaattgcatagtgtaattaagtgaggggtgttggaggacacaaccacagcccatgcagcattatatgagaacagtggcaacccaaaatacatgttttcagcacttatcactaatgtcatgaattttaagccgagaggtgacatcttttgtcactccatttcaaattagtgcatccttagtcgaaaataaccatttccccaatgtttgtgggattttggcctagaaacaaggggatttttgtagatatttattttcttataattttttattcattattaaagatgatatacgagatttgttagtgagacaccccaacatgtgggggatcactaactaaccccacaacctaaataaggagagtaagaggctgaaatgaagggaccttctcttttggact

SEQ ID NO: 108119 - DNA, 949 bp, Cannabis sativa
  modified_base (744)..(748): a, c, t, g, unknown or other
ccgtaagatctcatatgataagtgttttgtaagttttcgtctttattaggctctcccctacagtgactacttagaggtaaatttacagaaaatgaaacaatggtggaaactcataaaatgataataaccttgactctcgcctatcgggacaatgttaaattctcattttgatcgaataaaaggttgttaaaatggtgtccattttagatgagctgactactctattcaactaatgttatccttgactctcgcctaccgggaccctgtatttcattatgttagaaaccttggaaaagaataaatatgtttagttttttgtatttttgccaacatatttgatgtacttgttattttctgagttagtgtatgaatttattgaaccgaatgatttacttctgtttattgatttttgtagtgtcaaaaatgtccaacccacaccccaatcctcatctagagtatgcctttaggaatgaacttcaaaatgtgaagataactcctagtcaaagtattacttcacagttgcttatgatgaacatgaaactccagaaagcagctaagctgggaatttttttatctcaagagcagagagttcattgctccgacaatcctactacttcaagctcagttgagaagaatagagaaagtgattccacttcctcaaattatccttcacaacagattgaaaccgcaataagaacaatccaaaaacggttaaccaatgatgctttagtttttgaatcatgnnnnntagagaatgataaatccatctggattcttgattctggatctacaaaacatgtcagttgttcattgcaattgcttgagaactggaattatttgaaatccggagagttgaaacttaaagttggtaatggggagatggtatcttgtaacaccctaactaatttaggcgtattacgtgatttttacacgtactgtgcagctcgtt

SEQ ID NO: 108120 - DNA, 778 bp, Cannabis sativa
  modified_base (571)..(574): a, c, t, g, unknown or other
  modified_base (626)..(638): a, c, t, g, unknown or other
gcagttactattttgatggctgacttattcataaaattatttttattttgctactaatattctcagatgagctgtgcctaaaagggctcattaataaccgtatgtatcttatcaagtaatagccgtataatcagcataaattataaacatttattacaatttacgtttttatattatattaggaaagtatgtagtatctatattaattgcaattcacatagaaaattaagagtaattattttaattgtaatttacttttcaaatgcatttgattgctactaatatttcaaatgagctgtttcaaagggctcattaatagcaatgtaaaccataataagtaatagtctatataatcatcattaattataagtattcattactaattatgttttatattatataaggaaaacctatagtatctactctaattgaaatatacattggagaattattcgtaatttactttaattgtaattcatgtttgaattgctactaatcagtcaaatgagttgtgtgccaaagggctcattaatagcagtgtatatcatatcagataatagtcaatataatnnnnattaattataaatatttattactaaaaatatctatattatattaggaaagtnnnnnnnnnnnnnattaattgtaattcacatagcaaattaatgctaattccaccaatgactcaaatgagctgtgttttaaaagccttatggttggtgtgttagtttataatagaaagtgtttgattgatatttttaaaatagagaactcttcc

SEQ ID NO: 108121 - DNA, 566 bp, Cannabis sativa
aatcaggacagggacctgggaaacaaaactaggatcgggacctagtacataacccaaacccgaacttgaacctaggacccagctcgtgacacggcacatgaaatggatccagacatggacctgagattgggatctagccctggacccaaaccctgacaatgacctgaacccacacccggaccttaacccagtcccaaacccaaaagtggatctgaacccgtaccgcgtgacccgaaattggaaccaaaaccagaagttgaccgggactggaattaggacttggacttggaatcataactgaaattggacctagacccagtctcggatcccaaaccaaacctggacttgggacccgaacccgaacctgaagttagacccaaacatggaaccagagtagggacacagaaacaggttcgggacctagaaccgcaccccagtctcgatcgcgaacccaaactgagaaatgggactttaaacctgaaccagaaccagactgagacccgtgacagtgatccagatcttgacttgggattcgagtaacaaggcctggaacaaaccagtagtcg

SEQ ID NO: 108122 - DNA, 685 bp, Cannabis sativa
aaatatcaaatcataaaaatattaccatatcttggtgtcacatgataatactttaaattgaatttcgcaatcatttaacacattatgctcatttacaaatcaaacggggaaaagtccacttgcaagatctgttaactaagatttccagtaaaaggtggctagattattccatcagataatacttataccggcgagaaaagttgtcggtataagtcacttttgtcggcaaagtaccttagttttgccagcaaaatatggtaaactaaccgccaattacaaagtgggaacttttggcggtttaatttcacttttgctgaggaaactaagtgcgcctgcaaaagtgaattaattattggcaatttaatttcacgtttgttggcgaataaatgcgtcggcaaaaatagtgaaaattttggcggttcattttccgtgcagaaaaatgtgcaaaaaattaggtaaaaaattttgctgacgagtttaagtgtgctgacaaaattttttacaattaatgaaacgttgcgtttcattttataatttagggtaaaactaatttgtcaacgagatgaagcgcgccaaaaaaagttttttttttttcagctttaacttttgttggcacgtctaagtgcgctagcaaaaattgaagctgaataaaaaccaacaccgaactctacccccatttctttct

SEQ ID NO: 108123 - DNA, 677 bp, Cannabis sativa
  modified_base (630)..(631): a, c, t, g, unknown or other
tatgattgagacatgcgggggtttttaaatcctgagggaaaaggggtattcatgatatgtggttgatacggctcaagctcctcgtccgaatcgtatccagattgcctccctaactcccccacttgatatctcctgaacttgtccttcaactcgtctattcgcaattggatagaatcctcttgctttggaccgagttattggcgaagatcaagttttttccgattcaagtgctcttgcataatcggttgggagtaattactggcagacctcgttttactcacagattgcgtcctgcttacggacctcgtcttgctcatggacttcgtcctcatgactcgcagatttactggttcccgtaccttctcgatcatcagctcgtcgagtactttctcctcttcgatttgatcgactatgggtccttgaccgccctgaggtcacacttgcttcttcacgctatgttctttccccctgagtgtggtttgtcgcatttcccccattagggtctgtacgagccctccctctatgggttcgggaagaacgctggtgatttcttgcaggtgacctacgtcctccaggttgagtcccaagacattcctcattttcatgaggaatttcttgttcatcagtttnnggttgcctcccattctcatttttgtgagagggttctggtcgatcat

SEQ ID NO: 108124 - DNA, 880 bp, Cannabis sativa
  modified_base (670)..(673): a, c, t, g, unknown or other
gccactattatgccaagaggactttctcaatttacattcccctttatcaactccatcatttctgctatctatctttataggcagtttatgttgcttatctgcctcaataacacattcttttcgtctttcttcatgccacaattcatcccctcgattcaccatgatgttatcctcatgccacaaaacttttatttcacatagaatatcttccatttcttcaatgacttcgttctcttcgacccctcccaactcttctatatcatcaccgtttgagctacttaccgacatttcttccccgtgataactttagttgcaatccttttttttttccttttatggtttcaatgaatttttcaccaagtttgcccaagtttgtgaatcctccttccttttgcaacgtgattttcgcattgtaatttctaatccactaatccaaacaaacaattaacaaaattcttccatccctttgagtctctttcttcaggtataataatcgttgtcattttgtttattttacgaactacgaacactccctttcctccgaagctgctccatgttctcctaaaattcttccattattccatataaccaagttgttgtatcaatggttatggtgatctcgtagcggatcaatctagtacttttgcatattgtgatcaatcatccatgnnnngttaaggtgagcatgaacaccttatgttgcgctaaacaactatcaacacctaaacgatttttatatccaaaaccaatgggtgataaggatagatgtcttccaatagctagtagggccaacgaattattagagaaccttccatgtccattcggacaatgaaagcccctacactgcatacttttccatattctgataattcctccatac

SEQ ID NO: 108125 - DNA, 936 bp, Cannabis sativa
cccgaaatattaaaatgtttttttattaacaaatcaatactttaaataattaattactaatttaatacgataaaacttttagtaaatacctattcgtattcttcttctgtaataaatactattcgtattaattatgataaaagtcctataatgcctattcgtattctttttttgtagtaaatattattttaatcattttcaatttcaaaaaaaagctctcagcctgctgcctattcgtattcactattcacttcagtgacagactcaaccactagaccgtctcacccacaccagttgactgacttgactcgtccaactcacccacaccaaaaaatattaattataaaaaaaaaaaggtcaaaacaatgttaaaaataaaaaaaaatggtattttttaaaaattaaatttcctttcaacccagaaattaaacattcgggctcagcccaacaggacccgaacccgacaatgccaaactcgaagagcccgatctgatacccgacacatccgaacacctgaaaactgggttcggttgtgcatttccaagacccgaaccccgaaaacccgacccgtgtgcagccctacgcaggagggtttaatcgacccaacctgccccccgttaagacagatattgagggatgaggtagagatacattggaagacccaattgcaaaacttttgaggactaccataacaagaaagcacatggtcaaggaatctccaactcagcatgtcataagctttcatgaggtctattttaatggaaaagtacccttccttgcccttcctcctgttgaacgagtggataatttcttgcactataacattattgtcttggatattcctacccgacacaaaagcagcttaagtaggataaatgagaaatggtaaaataggttttattctatttgccatgatcttcgagatgaccttgtaca

SEQ ID NO: 108126 - DNA, 605 bp, Cannabis sativa
  modified_base (36)..(47): a, c, t, g, unknown or other
attcatatttaagatgttaattcaacatacttgttnnnnnnnnnnnntcctggtaaaatattcccaacaacggcggcatggccaccagcgctcaaactgctggccatggagcaactggtcaaactgcagccactggatagacaactactgggcgtaccacaaacgccactgccgcaggaggcggcgctagtgatggcaccactgaaagaggtaatactagaaattttgtcccacctactgacggtgtgggccacgctcagactggccgtggccctggtgtctttacgtcgcggaatgaatcccatgtggacatcgagggaatcgaccccgagatggattagctgcgagacgcgataggtcagatgcaaggccagttccaaactgtgcaccaagaacaaaatcaagctcgagcggccttgactgaaagtctcactaaaaaaaggagagaattccaatcttggcttgaagattatgctcgtgagatgaggaggcgccaagacgaccaagatcgtcgcacccaagaggttgccgacttaatacaaagctacttcaaacaaaacactcaagcgatgggtactgatacccacaatcaacaaatacctcaa

SEQ ID NO: 108127 - DNA, 643 bp, Cannabis sativa
  modified_base (617)..(617): a, c, t, g, unknown or other
cccagacctagaaccgaacacagacctagcctcagacccaaactgagacttgaactcgggcacggacacggtcgaactaaacctagaactaaatcatggacacgaacctggacacgaaccaggacacgaactaagacccagactgggatcgaaataatggacctagatcttgaccgacgtgacccagaccaaaacttcgacctgcactcgagggccaaaattggactaggacccgaacctagaccttaatcggagtccagaccaggataaaaaccaaggacttagaccaagaactgaatccatactcagatcgggattggaacttgggactcggatccaacctagaccaagacccaagacacgaaccaacacccggggcctgatctggacccagactaaaattcagacccgacccaaactcagacaaggactaaaactccgacccgaactcacacccaaactcgaactcagaattgcaaatggtactagaaccgaactaggactaggaccaggacaaggacctaaacccaaaccctaacccaaatcaaaacctagacaaagcctaaagtcgaaccgagacaaggactcgaaccagaacctagaccgggacccaaacncacacaataaccgggacctggaccca

SEQ ID NO: 108128 - DNA, 676 bp, Cannabis sativa
gagaattggcggggagtgctcttctcgtccccattcccgttaagaattttaattctcatttccgctaaagattttaatccccatccactctttttcatatcaagaatggggcggggaggggcgggaaattccctaatagaaaaataaaatttataataaaatttttaatataaaaaatattaaaatacataaaaattaaatattatacattaattattattcactaaacttattattatccaaaacacaacttaaaattcataaaaaaatactaatatactaaaaatatacaaacacaaacataaataaattataaattataaaatattactataaacataagataaaatactaaacggatccctatcggagtggggagtgttccccgtccccgccctgtttaacaatccgggacaaaaagttatctccctccctgcccagttctacatttagacgagaaatttccgccccattaggggcgggtcctcgcggggccatccccgtgtggaaaatgtgcatccctatgcatgagattcaatttcaaaccagttgacaataaaaagaataactcatatatcttatatatgataattagtgtacacatattatcaatacgagtctctttaacaaataaaataacatttttttcattattaatatttaaaataaaaaagtt

SEQ ID NO: 108129 - DNA, 865 bp, Cannabis sativa
ctgaacaagaagaatctgattctgctgattctgaaatctgtgaagagtctcttgttgaatcatacaaagtcatgtatgaaaagtggattcaggttacctctgaaaatagagtgttgattaaaagaataaaaacctgtctcgtcaaattgaaatttttgagttaaaaataaaagaatatgagatggattattgtgttaaagatgaaaaaatcactctcttaaagaacgaacttgaaaattttaagaaaaatgttcaaatgcttaatcccggatcttctatttttgaaaaagctcataatgcaggtcaaagaggtttagctggcatcagatcaaatggtatgaaaagttctggaatcatgaaatttgtaaaatctagtgttccaacgaatcttcctgatgctgcaaatttgaagtctgctgcaacagattcaaaacctgtcgttgcagaacctgtttctgctgacgtaaaatctccaggatttgcaaaaagagtaagattagagtgtggggaagtcacttttggcaatggcttagctggaaaagtcattggtatgggaactctcaattttgaagggttacccagattgaaaaatgtgatgttagttgaagggctttgggctaatttacttagcattagtcaaatttgtgaccaagggtatactgtctcatttgacagtgatcattgttatgtacttaatgatgataattaatgtattttgcaaggatttcgatccactaataattgttataccctcacccatttgttcacttgtcattcagccatcaacaacaccacaaatttgtggcatgctaaactcggacatattaattataaaaatctgaaaaaaattatcaaatgtaggtat

SEQ ID NO: 108130 - DNA, 580 bp, Cannabis sativa
ataatatagttacatatatttttaagtgtttaataatttaataattaataactaaaatacggttgaaaaccctgtatgttttttatccatggtcgtctattataagtacttaaatcatatttggaatgtattgtttttttcattaatcctcaaaaactagtttcttgcaaagaagactcatcgcgatgggtttgctacattgcagtgatcttatggtatgatacactgctacagtatgcatttctttcttgttcttcaatttttatttaatttatagtttggttgctcaaaaatgttgaagggtttaattgggtttgcaattttgagtttttctgcaaaaatagagataacacagttgaattgaacagaattgatttaaatttaagattttcctgacactaattgtgtatacattggttttaatttgttgtcaatgttatgatatttttaatttgtaatttggtcttatttgtacgacaaaactaattaagagaacaagcttttaacttggttgtatactatgattgtgttaattatataatcaatcataattttatattaatctgttatttactgtata

SEQ ID NO: 108131 - DNA, 531 bp, Cannabis sativa
attactattttaacaaatcaaaattatttttttcaaactttcatatacaacttctatccttacccttgactgtgtttcgaaatggcgattcgggaaccatggacctataattttaaactcaaataaactagatttatttattgaatctcatcaaccaaataatcatgtttattaattctatgattactccactataaatatggaattgaacttttagtaattatagaattatatttaccgagttttactgtagtgtccattgatatattaatgtatttgtgttgaattagactttcgatatatcttgatagttgttcgatgcgtgctcgacatgtacttatgtaaaaaataatataaaagtgttatctaaataagttaatacggaacctttcaaaatattgtgtcatcaggatacctttcaaaatattttatcatttaaaataagaaagatacatttcaaaatattgtatcatccaaaataagttaggtacctttcaaaatattgtatcatccaaaataagttagggtaca

SEQ ID NO: 108132 - DNA, 640 bp, Cannabis sativa
ttgagtggtgaaaaatctcaaagtattttttttttttttctaaatttaagtttgatcctaaatatgtttcgaagaggattggtggtgctgtgtcttctgatgaagttaatgatcaggtcaatgtattaaaaaccggtttctatttgcatttcttttgtgtatgtttatcattacatattttcatgttttttatgtatactattcaagtttctcatggaaagttggaccagatttgtgttgaattgaattctatcaaagagtgtcaacaacaaattaaggatggtatttctagtttgagtgagtttgctaaattagtagaaattatcaatggattgaagaagaaggagaatgatggcagttctaaggattctgaatttttttcatcccctataagagaggtaactagtttctttgtttagtgttttttgattataggtttgttgtttatggttttattatagtttttttttatcatcttgttgaaactagtttctgtattgaatgtgttattatattgttttccacagttgtttgaaacaggtttctgttttgggttcggttgagatacggtttttctgtttattgacactggtttctggtctgggattaggtctctgtccctgtgttttttttttttttt

SEQ ID NO: 108133 - DNA, 6431 bp, Cannabis sativa
  modified_base (5812)..(5820): a, c, t, g, unknown or other
gggcttagtagagcccaccaactgaggcggagggggagatttgttgggtccgccccttttgttgggcttggaccatttaagggcttaaggcccattatgtttaattcaatcaacaaaaagaaaaaaaaataaaaggggttgtaagcgcttcgtgagcagcaaggcagccaaagagaaagaaagaaaaagagagggaaagaagagaaagaaagctagagagagaaaagggttttgccattttgcattgaagatcaagtggtggattctcatccattttagctcaaatttttggtggtgaatccttgcaaggtgctcttcaaatctaccggttccgatttggcgattgtcctctctaaggtgctcttctataatacccacttggtgagacccaaactttttctatttgtgtatccatcttttgagatgatgatgatggttgtattggtgatccaagattgtttaatcttgatgttgttgtgagcctctagttttactagagaagaactttgtaatcccattattgaactttggtgatagtggatgatttgagcggactacggtgttttttattgtttgtggtgctttagttgatatttgatattgcatgttgtggtgtttgataagtatcccatttttgacatacaaagagggaaaatattgtggttaattgcaataggttttcccaacatctagtcataaagcctattattatcagaattatgctaactttagcaatgagaaaggggtggacagtgaggcaattagatgtcaagaatacttttttgaatggatatctttaagaggaaattttcatgaaataaactcttgattttgttaatttgcaacatctaaataaactctgtaaactcaacaaagctctatatgggcttaagcagactccaagatcatagtttgacaaactctcttttgctctaataagtttgggctttcattcaactaagacaaatcattcattatttattcaaattacctctcatagctgtttgtatgtactggtttatgttgatgatatcttggtcactggtaacaatagtacttaagtatcccctcttatagcaactctcaactcaaagtttattttgaaagatcttggtaacctcaattttttcttgggcattcaatttattccaacttctaatggtctcatttgtcccaacaaatgtatttacatgacctattttgcaaaggtgagctacaaggagtaaagacacaaagtacccccatgaacaatgctcttagactctctacctttggaagtgatcctgtagtagatccttctgcctatagatctattgttgggattctacaatatgctactatcacaagacctgacatagcctttagtgtgaataaagcttgtcaatatatgcaaaaccctttgcaatctcacttagtagttattttaaagatatctcaggtatttggctggaacactagactataagtcttcacattaagaaagcctctcatttgaacttagaagtctattgagatgttgattgtgtcaataatcctgatgatagtaggtcctcaattggctgctgcatcttttggggtgacaatctcataggcttgcaatctaagaagtagaatacaatctctcggtcctcaactaaagttgagttacaaagccttgtctctgttgtttctgaaataagttggattcaatccttactatctgaattgcacttgcctcctgttacagttcctatgatttggtgtgacaatttgagcaacattatgcttgctacgaatctagtactccacgcccgcaccaaacccatagagattgatctctactttgtacgcgacaaagtgcttcaaaaagatatttgtgtgcagcatgttcttgctaatcatcaactttctgtctctcttacaaagcttatatccaactctaagtttctttttctaagagacaaacatggtgtggtttattccattgtactctgtttgaggggacccgttaatgatactattttagctaagctgttataattacttaataatctgttagatagttatgttgattcagttaggattagttgcagcaagtgattagtcaagtttctctgttcttgattaactaatgaatcttgtttagcttttctaatggtatagaagggttttgtaattcttttctcaacataatcaagaattcattttgtcaaattgctcttcacattcttcacaatcgacacatatttatatagatttttttatataatatataaattgatgtaaactttgaagaagtccacccaataaaattttgaatctccaacaccaattatagccgctgatatttgttctttttaactttggttgacttgtcaatattccagcttaagtctattttgttcattaatgttattcttaacaatcacattgcttctcattttagtatttctgtcaagaataatcttcttataattttatcttatcttggaattaacacatgattaattgtatattttccaaattagttaatgattgaaaattatacgcatcattagtgattcaaatgctcaattccaaaattgcaacgacacgaatttttctcaacctcaaatgacaaaaggaaataactaatcaagggtgaagtgttagttttaacctctattcaattgtattgttatcaattatgtgatattgtacatcactatctatccatccaaataattcccttaatttactatattgttcataaatcttaggagtcaatttcggtttcaaggtaggggaccaaactttttgggacaaaattttcaactatactggtttacatttatcattatatatgtaacacaataatttaggctaccccacatgaattaatgtccatataactgttacaaaccatttgaatagtattattagtgggaaatttatctttgtaggctagctaccaattattaatattcaacaaggttgaaaaactttttggacatgtgacttgcccatctattacgtctaataataatggggaccgattcattatatcgaacctattttccatttattgtgtgttagcggttttataattggcaaaaatatgagtaatttttgtaagtgttttttcgacaacaatgttacttctaattaaagtagaatagctataatgtaaaaatataactaagagttaaatataaaaaatgtcaaaaaattatattcaatagataaactgaaatagctaaaaaatttacttcatatataatacttagctaaatattaggagtgttaataaaatatacaatccaatctaattcaatctgcacgatcacatttaattaaattcacaaagtacagattggtaaatttaaaattcatacttgtgcagattaaatattaataaacatgtaaaagtaaacgatccaatctaattcacatatatatatatatatttaaaaaactatatacataccattaatattttaatataaaagataggaatttaaaactctaatacacatgatataaatatatttcaaaaattagtagatgaaatgtatatttcattcttatttataattataatataatcttaaaaaaattaaacatttctttattcatataattttttttctttctttgaatttgattttttttatttattttaatttattgttgaggacataaaataacaattatttattttattttgttgttagttatgtgaaaaaaaaattaataaataaaaataattcaaattaaaaattaactaatttgaagtaactgatctaatccacacttttacgatattttagttgggaatagtggtgacaacatttaatctaatttaattgaaccctactgatcaaatttaatccaattaaaaaaattgaatatctaattacaattgaattagattggatgttaaaagctagattctaattagattggattgattattagatgtgaatctaaaaatctaatcaaattacattgatatatattaaaataattatttatatttatttatatataaaatatataaaatatatatttttagtggtttttttttgttgaatattttgtatatttatttcatgtattttgttttattttattatttgtcagtgttattgttttagttattttaaacttttagttgcatcacacttgtaataatgatattttaatgaagtattaaacttaaataaagggtaatatttaggttttttttttcttcatatttttaagttaatattaaaaattagatgtgtaattgaatatctaatttataaattgatctaatctaattagtaattagatttgattagattttgtataattagattatattggatgataattttctaatacaattactaattgaattggatcagatcagatcatattaatagaaaaatattagattggatcggaagtccaatcttagttgggattgctcttagaaactaataagtggcgtttagttggaggtaataaaatggaataaaaagtaaacaatctttatttttcatttctttatttggttgtaaattaaagtattaaaatgtcattccaataaaatagtcgtcctattattttggtggaatgactatattattttgaaatggaaggaaatacaattctaatattggatgagaaaacataataattttttttatgcattttaaattttattgtattacatttctttttttatttttatttctattttcattcttgccaaccaaaccttacgaaaaataatgaagtcttacattagccgaattattattggtagaaaagcacttcggtatcctttttatttctttattttttcttctaaaaaagtatcccttttattcttaataaataaagggcaacttacaaaaatattagattttgagtaaaagtttacatttatactgttacacggcaaaaattatatttatacagtctttgtatttttttttttcttttatactgtagatgccaaaaatcacataccaagcctctatcttccacacccacagatataactaccgcagcaatacgagaacacctgaaaaaaccattgattttggcaagatggagcaaaaatagagaaatcgacgtcaaataaataatcgtggcaaaacatttgtaaaacaacactaaaacaattttaaaaaactaaccatcttctgcacaacctcaatactagatacaatagtggctatatttaaaagcccagtcttggaaaataagaataaaaaaactactaaaacaacacaaaaaaacaaatataaaacaatgaagcagatataaccacttcaaaaaatataaaagaaccacaccctcaaaattttttagccaatgagcttgtcaaatgcatttataggagaatcaggaaaaaaaaatacaaaaacaatcatagagaaggaagaagaaatgtatttataatcttccacacccatgaatggaaccgccatagcaacacgagaacacttgaaaaacaaccattaattttggcgagaatgagcaagaacagtgaaattgacgtcaaatgaataaatcatggcaaaacaacactaaaacaaataaaaaaacaaaagaaaaaaggactaaaaaactaaccatcttctgcacagcctcaacaccaaatgcaacaacgactatatttgcaagaacagttctgaaaaatcagaatataaaaatcacactcttatttttccctaaaagggtgactgaaaattagaaaaactaaaaaaaaaatgaagaagaagatgaagaagaagaactgaacaagaaataaaataaaataaattatatgttaatgtagagagagagagagagagannnnnnnnnagagagagagagagaagagtgagaaaaaagataataagtgtatgaattttgaaacaacaaaaaaagaaacctatgaaaaagaagaagatgatgatgagagagaaagaataagaaatatgatgaaaaaatgaaatgagaacacgtaatgggtctcatctttatcatcattaattttaagtaaaaataaataaataaaaaaaaaacttgtcacaaagtgacaacatcaatcaaatcaaaattttatatatctattctatataaagtgtggctatgtaatagaattattggtttaacgatgtttttaggtttctacgttaactttaacagaatattgtttattaattttataatattattatatatatatctataacttaaataaaagtcacaatattttaggctttttatcattaaattacatatataccccttagaagatatatataacctaacaacaatataaataaattacattcacatgataatatttggagatttttatcaacattgaattacatgttagactttttatttgggcttacattaagttttattggttttattaaaacttgggttgattggatagtactttgctgtgttagcccatgttg

SEQ ID NO: 108134 - DNA, 841 bp, Cannabis sativa
actttccctgactgcataagaacacaacctaacccctgtttggacgcatcacagtaaatcacaaacttttcatcacttaccggtaagtttaatacatgagcggtagtcaacctttgttttaattcctctcacacttgtcagtccaaacaaacttgtaattctttcgggtcaattccgttaagggcgtagaaatctttgcaaagccctcaacaaacctcctataataccctaccgacccctgaaaacttctaacttcagttgctgatttaggttgaggccagtctcgtaccacttcaatctttataggatctactaaaataccacctttacttaccacatgccccaagaaactcacctgaggcaaccagaattcacatttcttaaagttggcatacaacttatgctccctgagacgttgtaacaccattcgaagatgtctttcgtgagtctcttctgtgtatgaataaattagaatatcatcaataaaggcaataacaaaatcatccaggaagtctttgaacattcagttcatcaagtccataaatgctactggggcgtttgttaattcgaaggacattactagaaattgatagtgtccataccgggtccgaaaagctgtcttgggaatattctcttctcgaatcctcaattggtgataaccagatcgaagatcaatcttagagaagacggtctttccctaaagctgatcaaataagtcatctatccttggaaaaggatacttgttcttcattgttaacttgttcaactcccggtaatcaatgcacattcgtaaagttccatccttctttttcacgaacaaaactggtgcaccccaaggtga

SEQ ID NO: 108135 - DNA, 603 bp, Cannabis sativa
ctttctttatctgcttaaatctttataggtctgatggtgcacgggattgacaatggacaacaaattgcaagattgggactaaggtcgattgtaataaataatcttatatagagtccatcaatttatcaaaatggtttaacctaataagtatataatttataatatatcattataagtgtatcgtataattatatcaaatgtaacctttattgtactttcttaatttgtaaaaagagtataatatgtattgttgaccgaggttttcggcaaccaataaaataataagagtttcaagagctgtaagaaattaagagaagaatttttacgtggttggggcgttaatgagccttagtctacgagtctgtatatttatgagtatttaatacagagaaagttcttagtgagtatttactcttcttgcacttatgcaatccaaaattctcgacccccattaatgagctttgagggggtattagtgtttttctggggtgatccccaaaatcatagtacttgtatttctgtaactatcagtaaagtggtgtattcccaatgaatataccatgggtaaggcatggtcaaatccctaggtgttgtagggatttt

SEQ ID NO: 108136 - DNA, 619 bp, Cannabis sativa
ttctccacctccaccactttcacgttaagtggattttatcaacaaaaaaaaaataaataaaaaaattggctataaagagagagagggtgggggacggttagagaaaaaaggaaaaaaaggttttggaaaaaatatctttggcaattgatacgtaagagtgaacagagaaaatagatctgagagaagagagaaaagagaaaagaaaaaagagagaaaagaaaaaagaaaaaaaactgcattattccaagtgatttttcaagtttgtaggtaagcaaagatccataaatggatctacctctctttcttctttctctttatttttgtttactgcaaatagtcattccagtctccttttttttttttttttgacaatgaactttcattgaatataatcagagtttagtacatcatagagaaatggaggaaaatcatccatccaaactaattcgccatccaccctgagtgcacgaactgctaactcatgtgcagccatattggccgaacgacgaacataaattagagatgccttaggaaaattggatagtaaactagcaatatcatctaaaatagagccaaattcattacagaaggaagctcttctagaaaaagctgaaatcaa

SEQ ID NO: 108137 - DNA, 645 bp, Cannabis sativa
acttgggtttcttgaaggaaaaaatacggaaatggattcaaggttgggaaggaagattgctttctcgagtagggaaggaattgctcataaaaactattgcccaatctcttccttgttatgcaatgaatcttttcttaatccctgtggaaacttgtaatgagatggagcaattgatgtgtaagttttggtggtgaacgtctaaaaataacaaaggcatccattggaaaaagtgggatagattgacggtgcataagtctaaaggttgtatgggatttcaaaatctgagagactttaacttgagtttgctttgtaaacaaggatggagactttttagtcattcggactctctcatcagtaagccttttaaagctaggtactaccgcaatggtacaattttaaatgcggagttaggtagcaatccaagttttgtctggcgtagcatttatgaaactcaagggattgttcgaaaaggggccggtgtagagttagtgatggttctcggattaatgtcttgttggatccgtggctcctagataatgataatccaagtgtaacttctattaatcctgctcttgttgatcaaaatgttaaagcgcttatggaaactgattcactggcttgggatattgacttggtgcatgattt

SEQ ID NO: 108138 - DNA, 1009 bp, Cannabis sativa
aatgcaaattggattgaaatatttggcattttatttcttgttgagaaatctaaaaattaattgggtttattatatgtgaaatgtcatttttgcccttgtgtgtgaatatgcatgctttatagccgtaggggcaatatggtctttttagacccttgaattatgttgaataaaagattggatttttggataaatgaaggaattttatggcttttgtttccccaaacccgaacctctctctccctccttaagctattttctaaattggagaatttcttgaagaattgcttgtttgagcttggatttgaagctttgtgtttgtggaatcttaagcttgcttttggattaaagttgaggtagctttctatggttttaaccttgttttaattgctgaattttatggttgaagagcatgaacttgatgatgatgatgatgataggtttgcatgatagtggtttcttttgttaagtttgagcatgttatgcttagttttgatgttgtgcttggttgagctctacatggaattttagggcaattctcatgtgtttaattcaagttatttctagtgtttgattgctgctggaaatctatgggtaagctaacttcttgagttttctagcttttaaatttgagttttgatagttatgttcaagattggagcttgattttgtgtattgatgcaatatgaaattatggggttttaatgttagattttgatgcatgagcatgtattttaaactctctatatgattattaaagacctatttgatggtttggaagtttggttgtgatttgggatggtttagttgagtttttggggctgattttcgtggtttattgctggtttttctgggttttaaacccaggtgccgctgcatggttttaagcatgccgcggcgcgcccatttatttccgggcagatcttttttgcaaacttcaaacaaccataattttgtgatccggactccgatttgggagttctatataccgttggaaagctcttttcgagct

SEQ ID NO: 108139 - DNA, 1286 bp, Cannabis sativa
ggaggaacaaaatttaattgggtttcaatcgtaccattatatatataacacaataatatatatacaacatgatgcaatctgtgttatttccaaagctatatctagaattttcttccttgaaactatgatttatatattattgtctgtgctctaaatttgttgtaaatttctcgtgtcaatttttgtcacacctcaaatataatgataacttataaattattaccgcttgtaatttaaaatatttatttttttaaaaaaataatcattaaactaaattaacataaaaaattaagtaaaattaaactaaaaatttttaaatcattttttaaattaattaaatacttggcactaatatgataatagtttaactaatggtataattatagtaagtggtgccaaattataagactatattagtatatgtcttcacttcaaaaattatagcaaaatagtctttgtggattatttattatttatattattaaaaaaatcaataatattttttcatatttatttttagaattagaagaaaattacttaaatattatgaaatacctatattagttctgttaaaaaaatttatttgaaataattatgtcgattttttttttaattttttatgagttgttgtgtattattggtatatagattttgttgtacaatatatttctatttcgttgtatagtatattattattcttagaaaatatttactttttattttgctatatataacagtggtatataattttgttagcatactataaatattttaatatatatataattttattagtatgctacacatatttaattatttttttatatattttaattgtataatatatagttattttaaataatatttaattagtttctattttattatatacaacggtgatatataattttgttgtcatgatacatatattttaattgtagtatgtaatttatttagtgtagtatacatatatatatatagtataatttggttagtttagtatatatatatattagtaatatataattttatttttattattattgttagtatatatgttttggtgaatgatatatgtatttttgttatacggtatatcattttttttcaataatatttaagtctactttttattcttcttttgttgacatggtatataattttattagcatcctatatattttttttattatatatatttcgaatgtaagatatatgtttttattttattatatataatggtgatatataattttatcgtagtataattattttatggtttaatt

SEQ ID NO: 108140 - DNA, 918 bp, Cannabis sativa
  modified_base (160)..(177): a, c, t, g, unknown or other
aagtagaggtaaatttgattaattgattaataaaagtggtatttttcaaattacccattttttttgttgtttttttaggctggatgcctttattatatcatattttttattttttcgtataatctttttatttttggaagataataataataataataannnnnnnnnnnnnnnnnntaataataataataatatcttttgtaaaaaaaataataattatactattatcttaaaaaaaattaaaaaataccatgttttatgtggtgtagtgataaggatatatttacaagcatcctttcttgtctggattaagggttctaaatccaccacaatctctcttaaaaaagattaaaggtgtggtgccatctgtgatgagaatccttgaggtgactattaacgacacaattaaagcaagttgaaatataagacccttatagctgacacgtggtctttggaattgtcaaaaatgactgatgggatggggaaggcatatgcaaaacgtgaactccttaaaaaaatgagtttttccaaaaatactggattttggttaaaagtttacaattttactgtcacacgatttttttttaaaaaaaaatactatctttttataaaataactgtaaaacaacaaaacagaataattaagaccacaaatggaacaactaaaaaacaatcgtggaacaacagtgaaaacttaacacaatacacagtataaaacttacacagtatttcgaaaaaaatatcatctcacagtaaaaaagtaaaaaaattagaaattttagtatatggtataaaaaccccccaaaaattgaggaaattgcattgtatacccactttactttatcaattctaatttttacctttattttcatattcttagagatatacccacttttatatataatgtccccattatagc

SEQ ID NO: 108141 - DNA, 641 bp, Cannabis sativa
gcatgaattgacataaattagaatattttagccatgaacaaattttattggacagtaaaatagtgtattcaatatttttattattaatcaaataaacacatgatcttaacttaagataaatacattcatcaaactataacattcttttctttaaagttaataaataaaatgttataggcaacaaaatttaagcacataataattttggggcatttacttgtgtatcatctcaatataggaagatgacaagatttaaaaataaaatatataataatttgtcaatttctaaaaataggatacaggccttagatttggcattcattaacaatgttgcattgcaaaaaagtaataattcaacaatttttttaaatatcgttgcagtaagtgcagctggtgaattctggtcttgtattttgcatctattatagacaataatattatagtaaagatatattttaaaaaagaaaagaaaaataaaaaaagttactccattagattgcacacttggcatgagactcgtgagtaagaaacacatgcagaaaaacaaattaacattatatgcattcaaataaatttattttaaaaaagaaaatgtcaatattgtaatttaactttagaaagcctaaatcattctctaaaga

SEQ ID NO: 108142 - DNA, 530 bp, Cannabis sativa
  modified_base (40)..(72): a, c, t, g, unknown or other
atttattatcgtttaagaagttcatatttaggttgttaannnnnnnnnnnnnnnnnnnnnnnnnnnnnnnnngtaaaataattccaacagtcttatcaatcttgaaagagattacccttgctttctcttcctctacaccggttgcttgtaagcgtcaaagcataacaacatgcttgtatacaaactccattgaatcttttatcttaaattcttcagaaagataaatttcaaacaagtgtatttatatgcacactctttgtttattttatcttgtctttttttcttcatctaatttctctctacacaattaaaatttatgttaataccacttctattcactaaaatacccatttatacacaattgagaccattgttaagaataatttttaaaatctgtagatctctattttattaataaaatctaattatagcttaaatgctatcgtagaggtaggcaaatgatattctgtcaaactacttaaatttgtgtattacatattctatatatatatatttatatgtatacgtgt

SEQ ID NO: 108143 - DNA, 644 bp, Cannabis sativa
gagattattaatttttctgacaagcacattaatattctcactcatgtttctaatatgcctacgtggagactcattggaatatatggtgaagcaaatagaagccagagagaaaatacatggggtcttattcgtcaactttcacatgatgctcgttggccttgcttgttcatcggagatcttaataatatcactagtcatagtgataaacaaggaggccgaccataccttgagaggcttattaagggcttttccaaagtccttaccgattgtcatctcatcgacatggaactccatggtcaccctttcacgtgggagagaggaagaggcaccgcaaattggactgaggtaagacttgatagagctttggcatctctttcttggcttgacaattttttaactgcaaagttatttaatttacatgcttcctcgtcggatcattgtcctattttcttggatcctataattcaaaatgtgttcaatggtgtgaagcaattccgatttgaaaatgcttggttgagagaaccttattgtcttcaacttgttcgtgactgttggtatgatgatgacactcttcctattcaatcgaagatctctaagtgtggcgaatcccttgcagtttggggtaaggacatcacaggtaattt

SEQ ID NO: 108144 - DNA, 713 bp, Cannabis sativa
acagtctctgataaagtggcccaccataccacactggaagcatgttttggccaggtattcaccttgatggtgtttcttacatttaggacacttcaagtatgattgaatgtatcaccacggctttgacagccgcctttatttccctgaaacctcttatttgatctagatgatctggaagtcttagattttctcttctgatcaagaatactaccaccagtccccttattgaaattaccactagcacttagaattgatgttgtaccagcattcttagtagtttgtttcttaatttgtggttcaacctcttcggcaatcagtgctcgctctaccactttcttatacaaagtgtcgtgattagtggtcatcttcaagtcccgactaattgtagcatccaacccagtaatatatttttgttctttggtgaaatatgttggtaccaaatcgcaggcaaacttagacaagtgatcaaactctagtgtatattcagccactgacttatcaccttgaactagtttcacaaaaccctccatttgagttgtacggatggctatgttatagaacttttcttcaaacaagttcttaaattcttcccaggtcaccgtactaaggtctcgagattgacctactaaaccccaccaggtgcgggcatgctcttgaaacatgaaagcgacacagttgacccactcagctcctagttcctactacccccatat

SEQ ID NO: 108145 - DNA, 662 bp, Cannabis sativa
cccaaatcaattgaaactcacaaacccttaatttaacaagcgctgccaaatactagcctccatttcactagcagcatgcccaatcaacaaactaattgttataatccgagcaaaaatttcatggaaacctaatcggctgaggtaaaagaaaatcaacacttgttttaccattcgatcaagttcaactacattcaaattatttataactcataaatcgaagattattcaatgctttcgccgtaatacacacatgcaaatatagaaatgagatgtacctggaagaaggtagattaaaccagaaagattcttggggacgatgaacaaaatagcgtctgaagactccgaactctgaactccccaaatgaaccgaatgcgaaagaaattttttattccagttataccctcctacaaatggagaattacaaattggactaactagcaaatagtgggcaaaattggactaattagcctcctaaggagaagtttggtttcaaaccccgcttcaaataggagaagtaggccatgctaatgtgtcttagatgatccacatctcaggatcaggcgctgatgagcacattgaactatccatgtggcttagagccctcacatcccagcccaggcacaatgacgcaattattaggggcgcgctctaccactgagct

SEQ ID NO: 108146 - DNA, 839 bp, Cannabis sativa
atcaagatcctaaagtcattggctacaagaaacgaagttgttaagttagttagacaataactaacttaactaactctcctatgagtgagatctccacatcggcattagtcttagtatgcccgagaatatatacgagctttctggatcacggaccaaaggcactcgtcgaataggctttcgaatatgatagagccagctggaatcgactatctagaactaccttctaagaagaataactagctgtccgaaactcctttccagaggagggctatctatcctaaagactgaactcggagtggacatgatagtcatccaagaactctcttccggactcaactatcattccacaagacttcttccaggatggacaagttagttgtccgagaacaacattcaggagacacctagctttccaggaacaatattggagatattttttttttggaggaactataccacaaattctacctcacttcaaattaaaagaatgacgatgatgaagaaagaatgcagccatcatggttggtgttccatgaatcttagtatactaacttctgagattgatcaagttcaagcaatttttaaacttgtttactgtcaagaccttagtcccaatgtcagcaggattatcttatattatgactttctctacatcaatcatccttcctctatcttctctctaatccagtagagtcttatatttatatgcttgctcttttcatgataaattgggttcttacaaagatggatgaacgactggctatctgaaagcacagtcactccccatttgatttgcttcaactcataaagaactccctaaatgttgggttttgtgccct

SEQ ID NO: 108147 - DNA, 750 bp, Cannabis sativa
  modified_base (694)..(695): a, c, t, g, unknown or other
tgatatgagaatgccaggctatggcatagattgaaaccattgttgggtttcttcctagtggcgtaccttattaggtacgtgcgacactgacatgtgaatgctaggttatggcatatactgaaactatttttgggtttcttcctggcggcgtaccttattaggtacgggcagcagtcacatgtgagtaccaagttatggtacgagctcgtctaattaggtaatgtgatatattggtgccatgttgttgcatgggctcacctgattagttgacacaatgatattatgtatgatgttaaattatggcacgggctcacctgatttagtgatgcagttatgcgatgtatgagtgccaagccatggcataggcttgcctgattaggcaatgcaatacaggattatcagattaaagcatcgacttgcctgattagacaatgtgatgtaatagagatggtcactttataaggtaacatatatataatatttatattattagataaatatgatttctattattgatataatggttttgtattactaaatatccttacactgatgtttattcgtagcagatgctagtagtgatttggatttcatcttatgagtaatgcgtgatcgtttgattctaattttctgagtataaatgataatattctaataataaattaaatgattgttattacttttcttgctgagnncttgtggctcacgggtgctatgtggtgcaggtaaaggcaaagaaaagctagataa

SEQ ID NO: 108148 - DNA, 762 bp, Cannabis sativa
attgagaatcataattttaaaaacaaaaaaaattacttttaatattttttttaaacagttttaatcaatattttagactctgactagactcggaccgaacccaaacctggtcccagccctggcaccgaactcggcccctgacttggactcggactcgacctttgacctagacccagcttaaataaaataaaaaaaataaatataaaaataaatttcacaaaagacacttttgttttttgtttttaaaattgaaaaacaaaagtagttatagaacgcattttttgtttttcaaaaataaaattttatttttatttttgtaattaaaaaattaaaaaaaataaaagtattatcaaatgccaccttagattgtcaattaaatttttagttatataaaattaatatttaatttaaatatactaattaagaaaattacataaaaaaatacaaaatgacattttatttacaaaaatacttcaataaggtgtggacaatatttataccttttatgtgcttttaattaccaaaatacttcttacactatcacttacacacacaatcactatcatttactgtgtataccacttattaactttttttttctttttttttttctttcatttttcgttttaaaatttaccatttagttttttttttctttgtcatcctcagtttttcattataaaaccatcttctagccattatacattcaaaacccacgaaaatcaccttccacacataacctttgtcatcttcttcttccaa

SEQ ID NO: 108149 - DNA, 716 bp, Cannabis sativa
cgggtttgagcggggttatggattttgacaattttacccctagctttagaaacaccaagttataacctaaagggcaaataagtaattttaaataggggattgggtggctgcctagatgtgtgacacatggctactaagtttcagccaaagctaaggatgagaaatgcattttctcattttcgaaaataaggaatttatgaaataaatcaagaaaaccctctctttaacttctttctcttcgtaccagccaagcatagggaattctttgctggattttgtgttttcagcaagaatttgaggaggaactaaccaaggtaaaccatagttgctcactagttatggtttttctcaagttttagttggtttcaagaggtgattttgtgttataggggctgttaaggtttaaagattgtgtagtctgatttctaaggttgttttgagttgattttaagccctggatatcagttttgagctatggtgtgggaattgagtaagcttgatttttgaaactcaagtttgggtctttaatggcataatttgatttagtggttttttctgtgaattattggttgggaaatgttgtatatgcattgtacaagtatactggaaagtttggtagagcttggtttggttttgaggtcatggggggcattttttgagtgcccagcatagaaccggaattctggttctggggaacctgtagcaaccggtcgacc

SEQ ID NO: 108150 - DNA, 564 bp, Cannabis sativa
ggaatttgtctgagaccgtagcttttgaattgtgcgagcagatcatgtattttgctcagatttgctatcatcttctctccccgagctttgtattctacatgatttaccaccagctgggaatcactgcagattttaatgtgtttggccttcatctcctgggctagctttagcccggcaattagagcatcacactcggcttcgttgttagatgctttgagtccaaacttgactacagcgtgcaggtgttgcccccaaggtgtgacaagggcaattcctgcaccaaataattgatctttagttgacccatctatatgtagtttccaggtcggcttatcttcactgttactttgctaggtgtttgtaccggctcagggttgctttctggtatgctttctttcttgcccgtgcattctaccacaaagtctgctaaagcttggcctttgattgctgttcgcgattggaaagtgattccatattggcccaactctaccgcccacttgagtagccgtcaagaagcatctggcttttgcaatatttggcgtaatggttggtcggtgtataccc

SEQ ID NO: 108151 - DNA, 982 bp, Cannabis sativa
ttttttgcattgtattttttttttatgttttttttatgaaactgttcttttttctttttttaaattgaagaattagtttaattttttgttgattaaattagttttaaatgttgtcacattttttaaattattttttcttgcattatttttttttatgttgttgttgaaatggatttttaaagttaatattattttttttttaatataattacccttgtgtttcttcttattgtttgtgtatgaaactggttttcttctcttttagtcaaattattttttttcttattgttttgtgtatgaaactgattttcttctcttttaatcaaattatttaattttttacaggcttattatcgggatttgtctgatggtgttggtagtctagaattgtcagttcacagtgttaagtctgcggtacatgttttaaccattttttttgtatgttttaaaatcggtttatgtgattttgaatcttttgtttttctcttttaatataactagtttctttttgttatgtaggttcatgaggacaatgttgattatagtcactattatttgtctcctgatgttatgaaagttgttgacaatacaatcaaggacattttgtattcaaaagatcagtcttcttgtggaaaaaataataatatgaaaatagttttgtttgatgattcttatcaaacaccaaaaaacccaaagtgtattcggaaggagagtgctattgtattgtctccttttataactgattttggatcatctgattcagacaaagacatcttgaagaatattttggttggagataaattgatagttgatgggcttaatccttttaaaaatgagattggatataataacactagtgagcagtgtttgaagttcattcaatggttagagcataagataaatataaaaaggtaatttaagttttttagttttttattttgtgttttgtatatatgtgtttttgttagctttctaatttttt

SEQ ID NO: 108152 - DNA, 3390 bp, Cannabis sativa
ccctcttggacacctacatagcaaatgctatagtcttgtgttccctaaatattgcagggttaggttgagaatctagtttcaaaagagcatgtctttgcctccattcttaagtaatacttgtttttgtctttgtcttactcttgagggtagctcaaatgttcaagcatgtagtagcgtatgtggtttgctaacacaggtctgagttttgactccctcttggacacctacatagcaactgctatagtcttgtgttccctaaatattgtagggttaggttgagaatctagtttcaatagagcatgtctttgcctccattcttaagtaatacttgtttctgtgcaggttggattgactgccctcccgctggtaaagaaatatgttgcatgataccttctaaggttccacttggtgaagcatatcatgattgtattcaacctggaaaacgatactcgttcaaacaagtgattcatcaacagagggtgttaggaagaaaggttatttttctgtcacaacatattaccagacttgatttttgtaattttgtttgattaaaatttttctgatgtatattcattatttcagcttggtttagtgattgatttgaccaatacatctcgctactatcaaacaacggatctgaagaaagagggtattaagcatgttaaggtcagtagtttgacccccatattatttcatttcttttttggtgtgtttcctcacagacattttgagctaaacttttcctgtgatctagattcaatgcagggggaggggctctgcacctgacaatcagtctgtcaaccagtttgttcatgaggtttgcttttttatcgatacatccatttgttatgcataaatagatgctttcacgcatatacaatattgatatatattttttttaattatttcaactatcatcttattggaaccataatcttattactctattatcttattggaaccataatctattactctattagtaatttatgtatagattgttttttgtggatttcatatttgccacctctttgtgtacatcagcccggaagtgtatggcaacaaattgacaatttcttttaatgtttgattggcataattagtagttgaactgtgtgcaacaggttcatgataatatgtgcttctttatgttttagtcttgtagtatttatagattgtttctttactatttgagtgttttattgttaattgatttacagagtaagaattaatcaataatgtaaccttgtgataagaaacttccatttctgtttattttttcttttccaggtttcacaattcatttcccgtcaaaaacactcaaagaagtacatacttgttcattgcacacatgggcacaatcggacaggttatatgattgtccatttccttatgcgttcccaaccatactctgtcagtgaggtcagtgatgtgcttggttttacatgttttagtttggttaatcctcgatcagcatcttatgccttccttctttgccttccatgcaggcaatagcaacttttgctgaggcacgccctccaggcatctataaacctgactatattgatgcactttacaccttttatcatgaaaggaggcccgaaaaactcatgtgtcctccgactccagaatggaagcattcttgtgatcttgatcttaatggggaagcattggccgatgatgatgatgatgatggagtccccactgcttctgttgaggtatgcatgttttatttagttaactacgactctgtcttgtttttatgctatatgaatgtcatagtaaattagaatctaccgcacaatgtgtggtcttactcttttagatgattggactaagcgcagtccttgtgtttagtatgataggagtacgctttaagatgaaagaaaattatgcaagaagatatggttgttgcttttgtaaattgtcaaattattacatctatcattaattaccaattacaggggatagatgtcacagactcaatgactcattgggtgcatgtctaagtaaatacatttttgccttgcagttcatgttaaatgaatgcagatggctaggtaatatggttagttgattttgttttttgatagtcctggttttctattctatcccaagggcaaatgtttgtcatcttgttcattattgaccatctacttaataatatattttattattttattgtattatcctcttttagattctgataaatgttttaaaataattattttggtttattctatgaaatttgagtagtattcgtatattatgacactaatttgtatcaattttgatttatatcttctgatatttcatcagcaaaaatatcattttgtcttgcgctttttttttttctgaacaggaactatttagggttgactaattataaataacgtgcaattatatttagtattgctcttctaggactaacagcaatcatgcaaataatgtaagaaccaagaatgaattttgtcaaaaaaataaaaaataaaaaacagaagacaaggaatgaatgacatagattatattttgtattgtattggcttttcaactatcttataatatacaccatgttccgatatggctattgtatctactttctttcaaattgtttgtgcagtgcttgtttatatatatatgcaaaaaagttgtagtcatcatagatctttatccctgcctcttgcaggagactcaggatgtagacacggtgatgtcaaatgatgatgttttaggggatgagataccttgggaccagcaagaatcactgcgacatttctgttaccaatctcttaagttgggtggtggtggggtaggaacttcatcacagctctatcttttttgctcttcatgatccttttataattggtgaatttaagttttttttaattaaagtctagatattatttaggctgctgtatcgttgtacccttcagctataacatctataataaattacattccattttcctccttccatattttctattggacatgtgctctctaaatttagctagatgtgtattcttttattgaactgatttaaccttatttttttttaactcatgtaatgtatgtggactttgttttcactcttgtgctattctttgctatttgttgaactgttggattttcattttctgcacgatcctagtagttggcattcagtttggttgtgtaagaatgaaaaaaaggttttaaatatagtttttcctaggttcttgatcgtgcaatttacattgactttttattttcaatttcagataagagggaactctcagtttccagggtcacatccagtgtctcttaacaggtaatacccttgttaaacctttctttgaaattgttttcttggggtttattattactgcttttctccattgtaccaacacg

SEQ ID NO: 108153 - DNA, 694 bp, Cannabis sativa
tccatgtcctgaaatttgtgtattcgttataatttttagtattaatagttgcaaataactattttaatctaataaaaaaacttataaacgactaactttttcaataaacatctaattcaattgtatttgtatttttttataaaactaattcttatgttttttcagattgtgttcatagttctaaacaactattttaatgtatcaaaacaactatttttttgacaatcaacagtaaatgatatttaattcaacagtagttgttcatttgtaaacaaacaaccattataatcatcgaaaacaacatatatacaactgtttccaaataaaaaagaaaaacagttgattatatttatatgtatagtatttttttcagttgtaatctaatcttatttatttgttaagagtaaccaattttctatatcattaattatttatctgatttttacaatttaaaaaatatgtataaccatgaagatttttttttaaaaataacttaattaggaagaaaattattataaatttttgtaccttgtgtttgatctctcattcgtttttgagttaactttgaagtttatccgatcttcttgtattcaaattctctaaccaatacgatttgaatttttgattttaggttgtttttgtattttttcttatcaatgaaggtagaaatctctgtgttcttattttttttttc

SEQ ID NO: 108154 - DNA, 727 bp, Cannabis sativa
  modified_base (29)..(74): a, c, t, g, unknown or other
catgcaacaataaatgttatttctgatcnnnnnnnnnnnnnnnnnnnnnnnnnnnnnnnnnnnnnnnnnnnnnnggcataaaacccaacattttgtgcttttagttccttgttgtgatggttataaattgtggaattgaatttggagtttaagcatgcttttgattgagttgatgtaacttttgggcttgagttcgtgtggctagaataggatttctgggtttggaacccaggcgtcgcgaccccactcactgggccccgcggcctgcccttgtgaaatcctgggttttcaacccaggtgctgcggactacaatttgggtgttccgcatatcattggaaagctcgtttcgagctctatatgtttatttgtatttgaatgctaattttataaatatgtggaaatagacttagggattaaccctatttttgaatcccaaaaattgtggctaggattattggcacttggttaggagcacctgagaatttagaatctccacgtattcgggatatcaagtaagacagtagttagcacgtagagttaagcgtggtggcgctcatgttgaatattataattgtgattaattaagaaccaggattagggttattaacttaaagtgagcgactatatagcctaggattattacccaagtgattattgatctttaaatgctatgccatgctttatatattgatttaaagaattatgcgttcaaggcataatttggtt

SEQ ID NO: 108155 - DNA, 521 bp, Cannabis sativa
tggggcttttgaacgttgatggatattataattccttgttgagtttcatcgataagggcgccgttgatgtaggcttcatttcgcccactgcacatttcgcccactgcccaatattgcgggactcatacataatccattattttctgttttgtttttgttataaacatgcgcccaataacaagttgctactattttaaataattaaactaactaaaaaataaataaataattaaaataattctacgaactctaagttacaaaaaaaagttatttatttaattgacgaaaatttacattaacagtttagtgatttcattaaaagacttagtgataaaaattcaaaaaaatccctcatcataaacacaaatacaaatccatattaaatgactgataacaatcaacacaacagtaatcatcctaaagagaaaatccatcgtcctggcaaagaacgtatgggatctcaaagaaccaacacatatgaaacaccatgtttaggaaggaacgatagtaatttcaatgtt

SEQ ID NO: 108156 - DNA, 607 bp, Cannabis sativa
tttatccactatgtgccccaaaaatgagacacgagataaccagaatttgcgcttcttgaatttagcatagagtgtatgatcttgtaaccgttgtaaaaccgctctgagatgcaactcatgctcttcttctgactcggagtacaccaaaatgtcatcaataaacataatcacacacctatccaggtagtccttgaacacccaattcattagatccatgaatgctgtcggggcattagtgagtccaaaagacatcacaaggaattcatagtgtccatactgagtacggaacgcactttttgggatatcttcctctagaattctcaactgataatagcctgagtgaagatcgatcttagagaagatcatcttcccctgtagttgatcaaacagatcatcaattcgaggtaaaggatatttgttcttgatagtaagcttgttcaactcctggtaatcaatacacattcgcagggttccgtctttcttcttcacaaacaacacaggagcaccccatagttagtagctcggtctgatgaatcccagatttagtaactcttgcaattgtatcttcaattctttcaattctactggagccattcgatacggtgct

SEQ ID NO: 108157 - DNA, 725 bp, Cannabis sativa
tttctatccttgtttaccaaacaatgtaaaagaaaaatattatttttttcttccaaatttttctatggttcttaccaaacatagtattaatggagtaactaggactagactggttagaataattggcttaattgcatgaatgatttataggttataatgagatattatgctaaaactagtaccttcttaaaaagaataatttggaaacgtttaaatattaaatgtgtcggatatattatctattaatataaaaattaattatttgtttgtattaaaatggttttttttagggtattaaaaattaaaaatgatgaacatttaaaaattaaaaatgtgtcggaattggcttagtggctcgtgaccaccatggctttctagttcaaggccgaatggatcttttcgaggggaatgctacatctgaattggctgaagcaattgaagttcgtgaagctttgagttggatcaaagattatgcatggcaaagagtggtcattgaaactgactgcttagtggttattcaagcactgcgaagctctattcaaatgatctctccttttggtcaagttatttctatttgtaagcaactcattattgatttgccttttgtctccgtgttgtttgtgaaacgatcagctaatgtggtagctcataactttgcaagagcttccatattatttcctggtcgtcgtttcggtatggagtttattcctaccgatttgttacct

SEQ ID NO: 108158 - DNA, 668 bp, Cannabis sativa
aggatgtcttgtgactgcgtgttgttgacatgccccgccagggcctattaatggcttctttgagttttttaaagccaacagctctatcaaggaactccttcgtgttgttggttgagatcctttggatgtctttccaaaagtcactcaatgggagtatgccccccagtatggtcgtatatcggccttcttctatgaggcctttgacttttgtagcctcgaccatgaacctctagatgtagtccttcaaaggctctccttgtcgttgcttgactttgacaaggtcttctagctatgatggtacaagtctcgaagatgagaattgtgtgaaaaattcttgagagaactcggccaaaagagttgaatttccctggggtgagtttggagtaccattattgagttgtttccaacaaagtggttgggaattagtgaaatcgcacatcaccagtaaccttttggagatcgggttacatctcaaagtatttaatgtgagccaacgggttttctcgcccggtatacatcttccataccggcatcttgaacttgggaaagggtaaggcatttttatatgccaagaatggtgattcccttgatcgatcaagttcaaggtctaaaggtttcagaccacctatgccttgaatcatgcccttgagttggtccaactgtgcttg

SEQ ID NO: 108159 - DNA, 636 bp, Cannabis sativa
  modified_base (34)..(44): a, c, t, g, unknown or other
agattcatgtccaaagttacctcaatcgaagaannnnnnnnnnntgaggaacttgatcttgatgagcttatcgggtccttgcaaaattatgagctatcacagtccagctggaagaaacccgagaaacagaaggatgtagtgaaggacaaatctgatgcgagtattgcacttattcatcatgaaaacaagaaatcggtcctagaggaattgaatggcattcctgacgaaactgttgccttgttaataagaaactatgcaaaattcttgaaaaagtactacacaagaaatttcccagctgataaagaaaattctctcaagaaaaacaaaggtggaaatttcaaacaaggacaaccttctactaatcaaaagaatcgaggaattaagtgtaaagagtgtgatggatatggccacatgagtgctgagtgcgctaacacactcaaaaagaagaaggcccttgcagcaacctggagtgatagtgaagaagaaaagaactccactgccagtgaaggatcggatgaggataagcaggtactggcattcatggcctgaagccgtcacccagttgagtctgaagatgatgcagtctctgcttcatcagaagctgatagcgtaggtcgacaaaatgcttatgaagaa

SEQ ID NO: 108160 - DNA, 959 bp, Cannabis sativa
  modified_base (917)..(920): a, c, t, g, unknown or other
tcaaatgattgaggcttaagttattatgtacagttaattaggctatattataacatgtaaaatttaggaaccgagtgtcttgtaaaaataggttttattaaaattattatcagcaaaataacttcaatttttctttttaatttttatcaagaaatatattttcattaatcaaatcggcggattacaaactcaacaagttacaacactacagaaaatatatttcttgataaaaattaaaaagaaaaattacatttgctctcaaagacacaaaaattacagttcttcatattccatatagagttcctgtctatcacaacagaatacacatctaacaacaaaaataatcacgttttgtagcacagcaatcaaaaattatattgtgcgccataaattaatagagagtacaaatttaatgtggttcttttagaaattttacaatttcatgctgttgttagtttaacaaatttcccaactacatatatatatatgaataagagtatcttcataagtacactattgttttgaattgatttggaatctctacatttcattctaagaatattaggttgtgtttggttggaggtaatgaaataaaatagaaaggaaatagttttcattctatttatatgtttggttgcatattggacaatgcaccaccttaaaagagatgtattgatgcacccttaacttgtttcggcattcagaaaaaaaatctaatctattttttttttttcatattcatgcacgttataactatttaagatatcctacaaaattttgagaaattcggaataatttacaataaagaaaacaatgttcaaacagttggttttacacgcgtaacgcgtgcaatacaatgtttggacatagttttcggcgtattaaacttttccaaattttttaaaattttgcaggannnnttaaataactataatgtacatgaccatgagaaaaaattt

SEQ ID NO: 108161 - DNA, 548 bp, Cannabis sativa
aaatatgcgtgtgagcgtaacacgtggtgtgtcatagagacaaatgtgaaatggcattaattttatatgatgtgttattatgattattgatattttattctgtcttgctgggcttgtctcatgggtgctctactgtgcaggaaagggtaaatctgtctcttatcagccatgagtgcgagatctaggcgatgtatgtacatgttcgggccacactagaccaagcgggttggggtctactagtgatgtacttttgtaagtctaattttgccggttaggtcagctagtgaaaagacttgtaatattttgaaaagtatttttgggatcccgaaacatgtaattttttattgtaaagttaaagctattacaagttttattttcattctattttcgtttaaagtttaaatttcctgtgcttttctttctagtaatcccagtttatgggattaggggttttataattggttgtcgtgacgtgcctaattgttagggcgttacaatagtctaatatatactttgatgtatacgagtcctaggtctagttacaacaa

SEQ ID NO: 108162 - DNA, 911 bp, Cannabis sativa
gctcagtctttggtggctatggggttcggtggtgtatagggatgggggagaatatttcagttttgggggagccttggttgtaagatcactcaaatccgtgtatcatctctgataacccggcacttgtgaatgcaaaagtgtcgaatcttatgcatgaagaaggtggaggttgggatttggagctgttaaatgatttattcctggagagggataggagacttattcttgctataccaattaacttgtcttcgacggaagaccatctcacttggcacaaagatgtatctggcggttacacggttcgaagtgcttacaatttgcttcaggaaagtcaaggacaatggcatagtactgaagattcaccgttctgggagagtttatggaagcttaaagttccaccgaaagccaaaaatactgtatggagagcggccatgaattgtcttcctaccactgttatgttgcgaaccaaaagggtagaggtaagtgctatctgtcctatttgtaatggtgaccaagagactattgttcatactttaatcacttgtcaagtggttaaagaatgctggaatagggtgggcattgggacatcttatgtggatagggggagttttttggaatggtgtacaactatctttaagggactgagtgaggagaaaagatgcatgatagttatggtgtgttgggcgatgtggggagctctgagttagtgtggaataagaaggctgttttggttgataatattgtggcttctgcaaatagaaatctttatcaatggagaaacgctcagaactccttcttggagtcatcatggtccttgtttaaggaaggtgatggtgctgagtgctggtctacacctagtactaatagtgtaaagatccatgtggataccgctttatttggagatgaacaag

SEQ ID NO: 108163 - DNA, 527 bp, Cannabis sativa
  modified_base (26)..(54): a, c, t, g, unknown or other
ctctttctctcttcatcttcttcttnnnnnnnnnnnnnnnnnnnnnnnnnnnnnatattattttataacaatattatatatatggaattttttaaataaaaaattatataaatgagagaattaaggagaaaatagaaataggtatttagagtatttttagaccgtcacgtcaccgtctcatacttctcctttatataaatatatagatagattgcggtataaatatttaatgttttaaatattatacacttaaatactttatatttttgaaggcaaaaatacccaatgttacaattctcttacatctgttactaccacttccgttaagttataaatatggacatgtggaggacccagatgcattatatttatttattttatttgaaaatttaatattcttaatatcaaaaactaaatgctacttatttcaaaaaaaaaaaatgcaaatccaaattaccataactcagtgaaccagtacagtatatgtgaaaattattttttcaactagtttttttttttttaaaaaa

SEQ ID NO: 108164 - DNA, 670 bp, Cannabis sativa
atggttgacacgtgtcgaatacatctattcgtgattcgatgtgagtcagaccaggcatctcttcggttttcggctaattaatgctctaacttaattaatacctcgagatacggtttattttgcacgctttgacggttattctcttgaggcacttgattgctttaatttcccaatatttatttttgggggaaatcgaagcgtccgaaatgattaccccttttcactagtttgcctataaataaggctggaacttcttcagaatttactttcaccattttctccattaaaaaaactcaaagcaaaaaaggaattttcttcaagtctgttttgaaatttttagcagaggcatccgggcagcttcgtctggactacgtttagacttcaaacagtaagtgttcaacctttttctcttttaactttgtatctttaatcactgggtttccattgtagaaaatacatttgttcttgacttgttgtagaagatacatagaaaatctacgctcgaaactttgtagttttctctgcaatagttcgtacaacttcatggtttacgacattttgactttgaccttgcaatgttcgattttcaccttgctcattcgaagcttcgtgaaatttaacccttaacccaaaaatttaaaactcttgagttatcacttaatctttgtgc

SEQ ID NO: 108165 - DNA, 806 bp, Cannabis sativa
aagcagtattgtaatgtttgtgacacagtctttattgtaatgtttgtgactttaaatatttattatgaaaaaatatttactttttttactcttaatttcataaattaattaattaaatcatttcgtatattaattaattaaaaaatataaatatttaatataattttaaaaataaaaacaaaataaatttaaatttttttaaaaaaacataattaacaatgacgacaatgtcgtcattgataacataatcaatgacaatattgtcgtgatgtgcacaaatatttaaaaaaaaaataaaaaattaagtattatcaatgatgatattgccgtcattgatattgtatattgccaacgattttaaatgtcgttgttgataatactttttgtcaacaaactttttctgacgacttttcatcaacaaaatgtcattattgatatgcattactaacaaaaaaggagcatttcactaacgaaatttgtcctcattgatctatgaattaggcggctgattatttaactcatttttctaattctaactttggtcgtgtctctaacagggagatgtcccaattgaattgcaggctattattttaatttatggacattcaaaaattttattatttatcaaaaaaaaatgtatttggtatttttaaattataataagtatataagaaattttagattactcaaaaaaaaaaaaaaaaactaatttgtatggtttgttaacataaaattataataaataaaaaatatttttttaacaaaaaaaaaaaaaactaaagatttaaattttatttattttatta

SEQ ID NO: 108166 - DNA, 536 bp, Cannabis sativa
  modified_base (286)..(293): a, c, t, g, unknown or other
taggatgttaatcaaacatacttggtagtacatatagatcctggtaaaatatttccaacagtaatatcactctaataatcagcatactaattgcactaaagtccactaaaggacaaaaagctaaagagacaaaatgaccattttgcccttcccacaactaactagtcataattcacttaggagtatttttgtcaattctacaaccccgactattcccgacattcccaatatctaactatattgccccgttgtactaaaaatatactaagatgtgattctaatagcnnnnnnnngcgttccaatgttgccgagcacaaaacatgcaaaattctaaaattccatatatgacatataaaatgcattctgaattcaaataaatctccgtaaattgataattcataactaatatacaagtttcataattaaaccctaaatacctgtaaatttccaaattaaagttaagcggtgtttacaattatccccccttaaaaggatttcatccccgaaatctaacctgaacaactctggacattgag

SEQ ID NO: 108167 - DNA, 599 bp, Cannabis sativa
aaccctaggccattaaactgctcactttagggtaataaccctaatctcggttttgtaatttatcataaatataatattcaatataagagccaccatgcatatctctatgtgaaactactatcttacatgatgtcccacaaacgtggagattccaaatccccgggtgctcctgaccaagtgccgataatcctagtcacaattttcgagattcagaagtataggattaatccccaaatccactttcacatcatataaaattggcattcaaaatacagataaacatatagagctcaaaacgagctttccaacgatataaagaacgtctgaaactgtaatgcgttattgctaaggcacgctacagtactttttcaattacagtgcaatctttgctaatcaaataattttcttgaaaaacgtgtcaaattaaaactttttatattaattaataaaatttataatatattaaaatatttacaagtgtcgggatcccgttttcaaattttttaaagttgatattccaaaatacaaatattacaggtcgcacagcgactacaaaatataatccccaaatgtcccgagaccaaacactccaggttgcg

SEQ ID NO: 108168 - DNA, 521 bp, Cannabis sativa
  modified_base (487)..(490): a, c, t, g, unknown or other
atttgtcctacacagaaccgagttacatggagtaatgaggtttgggggagattcaacacaccaaagcatagttttattctttggttggctgtacaaaatcgtctcaaaaccaaggacaggttgcagcagttcagtatcattgttgacccgatttgcagcctatgcatgttataacccgagacacttgagcatcttttcttcagctgctcttttactgaatattgtcttcagcgggtgaaaggtggctgtcatggggagcacaaaccaacagcctctcccaactacttaagtggattcataaggtaaaaatcagcaagtttaggaagaaaaccatggcagctgctgtagcaagcttggtttactccatttggcatgctagaaatgaccaaatttggaatactcatctagaaagtaaagaggcaattgtacaaagaatcaaaaatagtgtaaaacatataatagaattgttttggccacaaaagattgnnnnccatgatagagattggtttcattctttgtaa

SEQ ID NO: 108169 - DNA, 559 bp, Cannabis sativa
aagtaatagactcacaaagagtgaggccaatcccacaagggttgtagttaagtactttaaaattaaatctttacttctatttggtgatgtcaaaattaagagaaaatgaaatttagaaacactaaggaaacagtgaaattaaggagcaaataaatcaataagaaaattaaggatgattaaagttagtgcttcgatttcagttgtatctattgactatggtctaatatgattatcttcctattgccaatttctatgcaataacaggtttagtaaggtaatttatagtcttctcagatatataaactaggattgtacataaatttttgtaaaccgcacaattcaaacaacccgcccaaaccaaaccgagataactcgatgaaaaatgcaaactgaaaaacccgacgaaaatataacccacccaatctttatattgggtgggttgaaaataatatcaacccgaactaacccgaccaacccaattaatagagtttttcataattataaatgtttttattatatataatctatatattatataatttatatacatatttataaa

SEQ ID NO: 108170 - DNA, 628 bp, Cannabis sativa
  modified_base (571)..(576): a, c, t, g, unknown or other
cttgcttttgcccttatctccctttgtttaatttcactagccattctcttgttttctcttgaggagggattagatgaagaagccatgaagaacacactttttttgtttgattgatggaagatgaaagttagggtttgaaagtgagattttgagagaaaaagaacaaggtggctgctgttttagggcagaaaatctgaatgggaagtaaaaaatttggtggtagggttttaaaagggaaaaatcgcaggtgaaaagacgaaaaggggcttaatttctggttcctgcgtcatccgaaatttcggatgttacaaccggaattccggttggtgcagcagaccagaaaaaagtccccaaaatcgtcctaaaaattctaattttaacccaaatgaccccaaaccaattctaatacctttaatatgataaaacaaaattgctcaaacaagaaaaactgaaaaataatgaaaaatgacgatttacggtaagcttttcgaaaattgctaagaaaactagaaccttaccgaaagtgagttttatgcaaagaaatttaaaaattctttttccggaagtttgnnnnnntaaaatgtgaggtgtacaaacttacggaatcaaaaaatgttgaaaaatgaga

SEQ ID NO: 108171 - DNA, 678 bp, Cannabis sativa
taataataataacaataatagttcaactcatgatcaaaaacgccctagattcaaaataaaaattcttatagggacgtcgagctatcgttttctaccaaagaattcctttgatccaatcacgcctactactttaattgataccgaaagattatgctctgaagtattaaatgaccgttgtgctttagtcacttcgggaaaaagtgacgagtactatttcaagcatgctgagaaaaataaatatgaaaaacttatgtttaaatgcaaagatgagatgtttgagtttgacatgttggtggagtctgtgaaagcaacaatcaagaatgtgacacaactcatggagaagatcaacgacaacatcgagatcgcagaaatgatccgtattgaagattgcttaacacctcaaaatcttagaagtattaaaaagttgtacagcaagcttggagttgatgatattgtggatgcgatgaggaagaaccctcttggtacgttgccttttatattaagagaattggaacaagaatatgaaaagttggcgagacgccgttgtgataagaataaagattggacagatgtatacaagaaaaactatcgcaagtcacttggaagaccactcaacaaaaactgtcaaaacattaagaactcgtcttaagtaataaaagtaggttgttttgaaattaa

SEQ ID NO: 108172 - DNA, 559 bp, Cannabis sativa
tattgtctaaatttttgggggcagttttgtcccatgtggctcgtgattagatttttgcagctcatggtttggcaaaacatatccttctgttagacaatgagctatcctagtttgaggaggttccaccgccgattgtagtttgttgcattgttaatcgtgtgtgactctcttcaccacgttaaaaaaataaataacaaagcctattttagtagctcatgaatttggtttgcatattaaatttgtttaaattataaatttggttactttttggttagttaaatagaaaaagaaactactctttaatgtgatcattttttttttgaagaaaataattagaaactttatattaaacttcaatctctgctaccaaacaaggcaacaactcagttagaacatcccccaaactgaaaacacgatcaggataaaaactagaagctcttgcaaatgaatgagctactgagtttgctaaacgttttacaaaataaattaaaatattacccaactccaagagtaaagccttgcactcctgaataactgaaccgaagctagaaatcatttt

SEQ ID NO: 108173 - DNA, 589 bp, Cannabis sativa
gatttttagccaaccgatgcagagtcataataaaagagatttaaaccaaaatacgagcaataaatgtaaataatgacaccaaaatttaatgaagttcagtctcaagtgttggtaatagcctactcctcttatattttattaatctttgttgtaaagtcaagaacaagctcttgaatgcaagaagtaaaaatggtaaagtttttgctctttgagtgataatttttggatcccctttctaggtcaggtgtgaccccttatataggggaaggtttggtgtatctcgcttcaggagagatgaccttggtgctaaaatatctcaatcattcccttgatttcgttgaggtccgattcttgcgataatatctaactatttttgtgagtttgtaacaacttttgagcttcatgtgggattggataatgttgggagagtgttggatgtgtcgaaccatgtgggggtaccccctagggagcagcctgattgaccgaccctatagtgggtagtactcaccttgagaaaaagtggatgttggtccataacttctacaacggactgattgataataccagaacgattatagatgtcgcagct

SEQ ID NO: 108174 - DNA, 862 bp, Cannabis sativa
cccaccgtttcgagcaaatctgccagccaaagaatgcgcttatcagaacattggcgcatgccgcaaatggctgggcgcatcacagtacttcaaggaacacataatcacatatatgagcattagaatattgtgacacgcccaccatttgaaaggcttcaccaacattcccacaacaaaacacacagagtacaaaatcctaaagttttaagcgatgactagaaatgacaaaatctctgtgaaacctaggatgaacggacatgcgagtattcgaagtgttcatccgaagacctgcgtgtattcaaaagataaagttgcgactagtcaaacattcttcctaaagtccacggttatacgaatttcaggtcattttccctaagattacccagttccataccataaagcatagtcctatatgtattccctacaaacgtacattcccaaaaaccctcaaaatatccaaaacccagaaaaaagcattttttctccaaaacagaaaacgaaaatgcaataaaactcgaaaccaacctttagttttggtaagatgttcctgcgattgctctcgataactcctaaggtagagaaagttctagagagatcgaaatctgggcaaggtgtgaaaatctctgagaaggagggaagagggaagttaagaaaatgagggaaaatgaggaatttcgattcgaatcaaagggtttaaatacccatatccctcattaattgggatcacgacacgtggcaaccagaatgcctaaggtcacccgatctaatggccaataatggccacgcctacacaaaaaccgaggagttttctgacgtggtatcataaatgcaataaaaagtaataattacagctgtcattttt

SEQ ID NO: 108175 - DNA, 671 bp, Cannabis sativa
gattgttcttgacttgttttaggaaaaatatagaaaatctaggcttgaaactttgtaactttgactgtaatagatcatatgacttcgttgttatggtattccaactttaactttgtaatatttggtcttcactttgcccattcgaggtttagtgaaggttaacccttaattcaaaatttttgaacttctgggttacgaatttaacctttacaaagttttttcatctttttaatccatcgattagacctggtggtatattttgcttatttttgttcaatatcccggccaaatactcatctcatgtattatcttttgtagatgaaccctggtgagttttggagaggcgaacactatatcaatcgggatcttcttcagcttttatacaaggaccaaccttgtctttgcgctagtccgtcctctttgagtgacggacattctaagttgagttttgaagattgggaggtgagtagtgaaagttcatccactcttgaacccgaggtgcaacaccatttttactctgagcagatcgtcaaagaagggtacgaccgcttcatttgggtgacccctccatccaagatcagtgaggcacgcatgagggccttggacaaggctggatatctgggcggacttgagtgttacgtcccttcttcaaatcaccgagccacgaaccc

SEQ ID NO: 108176 - DNA, 544 bp, Cannabis sativa
attttttatgatatgagttttttttttatttttaattaaaaataaatataaaatataaagggtattattgagatataaaagttttattaaaagagaaagttagtatagctaaattttttaaaataaaagttacttagctaataaaaaatctttttaaggttatttagctaaatatcttgaagaggagaagaagagatgaaaaaataagggatatttagttaaataaccctctttcaaaaccatttttgctaaataaccttcttataaaattattttaattattttaattttttaattctttttattaactaataaagtaaattactaatatactcacctaaacataacctaaaccccagccctaatccccacgttttcttcttcttttgtttatttttttttttatctcttcttcatcttttcatctaaatcaaccccaataataagctcaattattattttgtcttcttttcacctcactatttctttttaagattttttttttcataaatttatctccatctcttctccttaaatctatcat

SEQ ID NO: 108177 - DNA, 514 bp, Cannabis sativa
ggttcgggttcggattccagtctatgtccagataaggctccgggtgtgggcgcgtcctgggtcttggtctaggttgggtgcgagtcccaagttccaatcccgatctgattccagattcagttgttggtctatgtccttatttctgatctttgtcttggttcgagtttaggtcctggtccgggtctagctttgggtcagattctaggtgtgggtttcagttcgggtctgagtctatgtccggatttgtttccaggtcaggaccgcgacctgggtctaggttcgggttgaggtctaagttggggtcccgagtgcgggtccaaatttgggtctgggtcaggatctcagtccaaatctaggtccagcatatcgatccctatctaggtccaagtttgtgtttgggatcgtgtcccagattttggtccaggttcgggtctcagttctggtctgggtagacgaccctgtccggacccaagttctagtctcagtttaggtctgaggctaggtctgtgttcgg

SEQ ID NO: 108178 - DNA, 600 bp, Cannabis sativa
  modified_base (452)..(487): a, c, t, g, unknown or other
aattactttttgtaccaaatatagtacaattcttaaatttttataagaaaatagtcttaaggtataatattaatgctactactggttaaattttgagactttaagcttattaatatatttgagtggtgacatacacacatccaaaattgtatggagtactttgggagagtcatgagaaatattataaacgacaataatagtgtcaagctagcaacattaattatcgtgagtcacaatcttagtacaattaaatattaaatttcacatagtttaacgtagtaattatttatcactaaaacgttgtacataattatacaagacatatatctattctatataaaatgtggctatgtaataaaattattggtttaacttttttggtttctctacgttaactttaatagaatatcctatttattaatagaatattatttattaattttataatattnnnnnnnnnnnnnnnnnnnnnnnnnnnnnnnnnnnntttatataaaaaaattaattttaatttaaaatacttaaaatattattgtaaatattttatataaaaaaaaaattaattataaatgttgcttatattattattttttttttttt

SEQ ID NO: 108179 - DNA, 525 bp, Cannabis sativa
tcccatctgtttccaagatgcgagggaacaaatcacggcggagaagtggagccatactatgctcacatggaaatatattgttctttgattgaggaagagattctaaattcgaagaggtcttctttcttttacccatgggtcttaaaaaaacaaaaaaaaaaaaaaagaaacccatgagaagaatgacaaagcaggagataataatatatgcatatgcaatacatcgttcaggacaactctttaaacaaaaaacaaatcatcaacaaaaaacaaaaaaacaaatcatatgacggagctatgaaacaaataaaggtacacaccatacgtaaatgcgattaatatttcataacatgactaatatgctttatttatttatatacatatgtatataattaaacatagtctaattatgatttaaacaaatgcattaagtttctaaactacaacataataaatatatgtatgtatatatgtgcgaaacaaaagcaatgtgtatagtatagtatgtatatatatgtgtcaaaa

SEQ ID NO: 108180 - DNA, 621 bp, Cannabis sativa
  modified_base (553)..(553): a, c, t, g, unknown or other
aaatttgtgagagcaaaccataaaagtctgaccgtttgagttacccctcttcttcagtatgttaccacaatgaatttcgaaagatgatgttagcattctcagtctatatccttagttccttactaatctaacacataaaccagtaaaaataacaaaaccaactaaatgttcaacataggtaggagattcaagtcttggaaaattaccatagcagtcgtggctgcaccgaaaagagcaatgagggatagcacagaaacttgcccgacgtaagttgccatggcttcaaacactagcaccccataaacatatggatgctgcaaaaaatttccggtgacatgatgagcaagattgtgattttgatattagaacttgaaagaggtgtggaaagtgcaaaagttgaataaaattttagctttattagccaacttacttcataacatgagttccaagccttgaccaactctcctgtgagaatcataggaggaagtaaaaaaggtaacccaacaacagttgagcagaacaacatttccatctgcatatatatatatatatntatatatatatataaataagtaaaaaattaaacaaacattaaacagagacaaatcaatgagaagaatg

SEQ ID NO: 108181 - DNA, 626 bp, Cannabis sativa
tcgagagaattgattcaccaagactaatatcctcactaaaagatatctgaagctgattggcaaaagtaataggagtatggcttcgtatagcgagatgccgtatggtttctcgttaatacgtgaggcaacagtttgtatatctttatctcgcatagaaccttatagtcagcaagttgtaaatatactctgtcactcccgcatttaatgaattattccattaaatgtaattactgttacacgcatcgatccatattcttcttgacttgacacatgtcctccattgacattgtagccaaatttctagtataacaatattttttctacatacacatatacatttacatatataaatattcacacacacatatacatttacatatataaatatccacccacacatacatacatatatatacacataaacatatataaacagtttttaaataaaaaatgataaaattaaaaaatatatatttacacatatatacacaaaattatacccacatttcaaaaaattaaaaataccttctgagatgggggttctcggacggtggtggtgcagtggtgcggttgtgtcgacgagaagataggttgtaacacacatacacacacacacagagagagag

SEQ ID NO: 108182 - DNA, 615 bp, Cannabis sativa
ttttttttttttttttttaatgagcattgtcccgaaaaccattatgaagtaacccataaaatattgggataattatataaaatattatttaaaaaaaaaattatatttttacattttaatgttcaatgattatttttatatttttatagtattttataaaagtattacatacaaataataaaaaaataacattcaaataatatcaaaacaataattaaaaaaaaaagctaattatgatttttacccactaaactttaacatgctaaactatgtctttgaattttatggttaaaagttttccctgaattattgaaattgttagatttaaggactttgtctaatttcattcaattttgctatttcagtgattgtttatgtactaaattatgctctccagactttgatatctaccaaattatatacctcgaactttgacatgtactaaatcatatcccctgaattttcatccatattagactttttttactaaaattagatcaaaattcttaaattcaacaatctcaatagtttgagggtatttttagccaccttaaaagttcaaagaacataatttaatagataccaaagtttagagaaaaaatagccaaaaaaaaa

SEQ ID NO: 108183 - DNA, 719 bp, Cannabis sativa
aaaatcttttcaaaaattaatatttataattttttttttattttaaggaaataactaaaatcaagttattattaggttacaagtaatttaataattatttttagtaaatttttaaattaattacaatcgtctaataatgatgtaaagtaacaattatggttacatatttaatttaactattgaaattcttttcatatatatttataaatttgttagtgcagtcctagtcctaggtgcattctgtttcattattcaagagaatattttagtttaaaaggaaaattatagtaatgatcccaaattataggactatgttagtatatattcttattttaataaattatagcaaatggccctaaatcataacactatattaggtagtccttatttcaaaataattaattttttattttattttttagaattagaagcaaattatttaaagattatggtatatttatattagttttgttagaatctcttttatttaaaagttatgtcgatttttttaattttttatgagttgttgtggttgttagtatatagattttattgtacgatataattctattttgttgtatggtatattattattattctttgatgatatttattttttattatgatatgtataatagtggttataatttaaatagcataataaaaatattttaatgtatgtatataattttattggcatgctacatatatttaattat

SEQ ID NO: 108184 - DNA, 640 bp, Cannabis sativa
tgggctaaagatcacggtccgtgaggccgatcatcctgaatgctttttgaaacaataaattcacagaactcccattgtcgatcagtattctagccacgatcttgttggcgatgggagtctctatgaccagggttcatggtgaggaaaacgcactgtctttgcgtcttcttccgtgaatgtaattggttgatccatgagtcggggcctttaagctgggagctgagtacttcccaaacctcgctgtgtttaatggccccgttgtagcgctttagttcctttcaagtggtccctccgatatggggccctccagaggtcatagccactcttccgttgggtcttggtggcaggccaggagtctactgaggctctcctggatgcgcagctggagctaacgctccggcgcaccccctggcatcccttagggcaaaggtccccctgccggactcgggttgagatggggcagccggttcttgatccactcatagagatgacccaatcgaatcaagttctcgatctcatctttaagattcattcattcattggtgttgtgtccaattttgttctggtactcgcatcttttattgggatcccttcgggagctatctctgtacagagagggcggtctccggtagtgcgtatt

SEQ ID NO: 108185 - DNA, 894 bp, Cannabis sativa
tatataattttatgtattaatgcaaaaattagctggttaattttttggggataatttttcttacttatttagtaattacatgatttatttaattataattctttacttttttttttttggatcgtgtatttagttatagttacttttatagttatcgatcgatcgtatatagttttattgttatataaacgattctaaaatttgaaaagtacaagtaggaaaaattgcatgaaaatttgtaatttttccttacctacacctatgcttcattttataaccgacgcaataggtgaaaaaaaatatttgcaaaaagttatgcgtcatttaagaaccgacggtataagtattttgtgtcagttttaaaatggcacaaagcttcttgcgtcacttctaaattgacgcagaatgttataaagaacattttattttttgcgtcagtttcaaaatgaagaaaataattttttgcatctttttagaaaagacgcaaataaaatactatttgcgtctatgatttatacgtcgtttttataaatcggcgcaaaatctttatatgtctctaagaaaccgacgaaaatacctctttttgtagtagtgacgtcttcaatcatagttttctgggatgtctcgacaggaactcggttctaatgaccttgatagcaagatggagctttttcccctatctttctgaggttgacaatgtatgcctcgttgcttctttgtttgaaggcttaatgcttcattttgacaatcgcagttcttatttacaaagagtacttcagcagtcatttaaatgtcagcttccgacttgctaagactataagtcttactgaaagatgtctgaagttgattgtgaaagtaacaggagtgctccttcctatagcgagataggggcct

SEQ ID NO: 108186 - DNA, 528 bp, Cannabis sativa
ctcgggactactcaactctgagatttcatcttttttaccacgtgtcaaacattgatatctacgccatctgggctacgtactcttggtgtaaacatttcccccaaagttaactttcacttatttgaggttgacttaataacgtgaaataagcccgtttctctcgaaactactagttcggcatcaaattttacaatcttcgataataatttctattcttcaaggattcacactgagagtaagatttcaaatctccattccatgttgaatagtggattttgaaattttaagttgatgactccttgagtgatttcctttgactagagatactgtgaactcatgccgacattggaacgttaacattttactctgatcttcggttagtgtcttagcattgactctcttatcacactgtctatttatgtgaatattgatgtagtcattgtcttctattatgttgtagtcttgttcattgtctcaggttgatagcagaagaggccttcatcaagtccttgttggaatatattttac

SEQ ID NO: 108187 - DNA, 547 bp, Cannabis sativa
  modified_base (137)..(137): a, c, t, g, unknown or other
  modified_base (516)..(516): a, c, t, g, unknown or other
ggcataaaacccaacaataaggactactaatatatatacatccttaatatgtataacatataggtcacatacataaatctttgttctttatcccttaatgttccttgtttttattacatctcagatggctcccactnaacagtaggagtctggttaaatttatacattaaaagtacatttaacctcttactattgtttctagggaaatctagttgcgacatattatcttagtctgaaactgtaagtttctaaactaagtcatcaacatagcatcctagtattttagaataagtgtaaaatacttgcaagggattaagtaatcaaatagagataccataaacaaattttatgaggattaggaattcttgcccaagtcattcgaatagactatgcaagaatactactatcttattctcataattctgataagttatttctatccatatgaatggttagtttactttatcagtggtgttcacacgcatcaaccaaatgaagatgggtaaagaattttanaattctcccactcaaataaggtagtgtgata

SEQ ID NO: 108188 - DNA, 536 bp, Cannabis sativa
aaggagtaagtgtatctaaaccctcaggattagcacaagtaacaagtaacaacattgtggtcaaagtgctaaggttgaccctcaagaacttatacatatgggtaaataccattttggaccgtgttttgcaaaagttattgattggaccctctgttttgttaaataacaaaataaaccttgtattttctaaaatggtacaaataggaccttgaattgattttttgtcaaaataaaatttaattataatctaatctaaaagtattatgacaaaattatttacattttctggatacgttcgtattagtaatttttttcgagttgattatattaaaataaaaattgtcaaaaattaagcttagggtcctatttttactattttcgaaaatacaaggtctattttgtcatttaacaaaacacagggtccaatcggtaacttttgcaaaatataaggtctaaaatggtattcaccctatacatctcgtattcatgtttattttccttataaagccggccaagtaaaaataagtaaatatatt

SEQ ID NO: 108189 - DNA, 672 bp, Cannabis sativa
  modified_base (527)..(529): a, c, t, g, unknown or other
  modified_base (582)..(584): a, c, t, g, unknown or other
cggatgaagtctatacgcaacttcagaagtcccatacagacttggggggcaaatgttatcccaatttttgcagtctgacgtggcatcgcataatcgtgacacgtggaatccacttggagtatgtgctcggaggggaaagtccgagtaggatgcgtcgctggcatgcccagagcaaagcaatcagcaattcgcgcagggcaaccaacacttagcgaattcagctttcgcattatgagtcatcaacgaaatccctataccttggagatcagattacagggatatggcatacacacgatcccacaatcagtgtatcctgcatcaatcccacaatctttgtactcaacattaatcccacgatctttctatttatatcaattataacgagaggggaaagacttcctctccaagcatatagccctataaatagtgatggatgttcactgggcaagaggacgcaaacagttcagtcgagattataccctaaagaaattatctaagaatgcatattcagagatactattgtaagnnntataagaaaaggaatctttctcctagttcttaagtcaatacaaataacgaggnnnaggctattaccgaactgctcgagactgaacctctataaaattctcgtgtctttatatttctttattatatcgattgctataaatcact

SEQ ID NO: 108190 - DNA, 511 bp, Cannabis sativa
tttcgtatttattattggcatttggaattttcaattggtattagagcgggacattaaactcttagtgtggtctttttaacgatttcgcgtgtttttgtgtaaaatgtcattttttacaaaaggaggttcgatttctagatcacctttgctcaatgattctaattatccttattggaaagttagaatgagagccttcatcaaatctcaagatgaaagagcttgaaggatggttctatcaggttggtcttctctagttgagatagattccgaaggtattctaaaataaaatctaaactcgaatggtctattgaagatgataaactttctgcctacaatagcaaagcgttgcatgctatatttaatggtgtatgtgaaggttatattaagcttatatcatcgtgtgaatttgttaaggaagcttggaagatccttcgaactcagtttgaaggaacatttgatgttaagcctattaggactttatgccctaaataaaacccatttcaatctaatc

SEQ ID NO: 108191 - DNA, 624 bp, Cannabis sativa
  modified_base (57)..(59): a, c, t, g, unknown or other
  modified_base (137)..(151): a, c, t, g, unknown or other
ttaagtccccgaaaagtgatttagtgtgtcagttacctatgttatgattgatgtgannnaggagcctgtaattcgccaagcagttggttcgtctcaggttggccagcgcacctgaattcagaattgaggtaagattnnnnnnnnnnnnnnnatatgtatttacatgtttagtgtgcatgttagtaagccttttagattacattagatatgtatgttggcttttgtactctctgacagtatcacatctgtacgcctagagtacgactagcgtaccgagtataggctaatactatggtcgatagtaccgtactttctaacagtatcacatcaatacagctagagtacgactagtgtaccgagtataggtagttactatgtcaaaagtactgttgtacaaatgttctagactcagtactgtgtggctcacgggatagggttatgattgggggtatgggcatccgatcataatacgggttatagctatgttattgtttatgcttttttagtgagtctatcgactcacagtgatattttcatgtctaggtaagggaaaagctaaagttgaggagccgtgagtacgagcagatgaagattgtacatgtcggggtggttaggcctagagcg

SEQ ID NO: 108192 - DNA, 1334 bp, Cannabis sativa
  modified_base (274)..(277): a, c, t, g, unknown or other
  modified_base (403)..(408): a, c, t, g, unknown or other
  modified_base (490)..(492): a, c, t, g, unknown or other
  modified_base (1163)..(1174): a, c, t, g, unknown or other
aaatagcatttttggagaaatagaaataaaattgtggaaactacaaaatccatgtgaagcccattcacaccatggccggcgacatggttgtgtgtatcccaattattaattttcattttataatgccaaaataattactaacctaaacctagcagctatttataaatggaaagtggtggatcacacaaataaggtcgttaatcaattactcagaaaatgaggaaactgtttattttggaaagttgagctccccttttccctatatatagcagcnnnnctctcttcctcttgcatgcttgatgatacacgaactacacagagaaaagagagagaattttgaaatcctttgtgagagagaagtgcccacacacagcaaacgatacctcaatcatagattggaagnnnnnnaaggatcacatccaactgaaggatattcgggcttatttcttgattatactctgcaaaagaaaggaatcaagggttagagatnnnagtggaaggagacatattattccgatgcaatccctgtaaggtttcttaactttttatgtgttttatttatcgttttagaagttcatatttaggttgttaattcaacatacttgtgagtagatccaagatccttgtaaaataaattccaacaaaaatatgttaagttatgttgatttaagcatgttttggtaggtagtttgttgtttgagaaagctttgagttttagaactgaagttttgctctttaatggtgaaattcgattctgagtatgggtaggttttgatcccttggaaaatgtttattggggtgtatgatgcaggcctggaaagtttggttgggttttgaaacaatttaattagcgttagaagttttttggttttttctaggtaaaaccggttacccgaattttgcagcagggaaacccgaaaattcagcttgtggtttcgcgtcagtttcaggtttctagttcgtttattccttgctactttagggtattgccatattaagttgcagttgatagggttttttgttttaaacctaggtcccgggtgtgatttagcgagtcacttattcgtgttattatcgatgtgatttaggagcctctaattcgtcgagcagttgttccactcaagttgactggcacacctgaattcagaattgaggtaagattnnnnnnnnnnnntgcatatgttattacatgtttattgtacatgtcattgcctgttagattacattgatagtagtaattatatacttagagttgtgctgattactgataaatgtatgttggctaaaatattgatcgatgttgtcacatcaatatggcaagagtatgactagca

SEQ ID NO: 108193 - DNA, 851 bp, Cannabis sativa
tggtttttctaatgttatttttggcttgttccactgttatctcgtatgtttaacaaatattggtttcaaattatacaagttaaaccaaccactgaatatttgattgaggtaaccagaataagaaaaatcatggactgtagacctcaaagagagaatacatgcgtgcaataggttactgcacaagctctattcagattactacaccatgaaaaattagctaacaattaattaaggaacagtgtacccaataggacaccaaaataagtgggatgtagcacaaaatgtgaaagatgtaatagtcttacctcccattaaatggtgaaatcttaaaaaccaaaaaaaaaaagaggatggaagctggctagaaaaagaaataaccgaaaaaatgcaacaaatgtggagagttgggccacaacaagagaccatagaggagaaggcatcaaaaatgaaaagaatcggaacaactaaaaagcaatagtgaaaccaattatcctgatcatattcttatgtttaaaccaattgttgaggagattatttctcttttagctgctgttggtggtggttcttgctgtgccatttcgcgtgatgcgaatggtgtggcccacgcactagctaagtctgttactagttttagcgggggtcatttgtggacagatgcttgtcctagatttattagtgctcctgtaacagctgatttgatttgaataaacaccatactttctttcgaaaaaaaaaaaaagcaatagtgaaacaatagaggaaaacagaacatatattggagcatagaatactgaataaaataacttacatacaaatttcattatttttttattactattaaaaatagagca

SEQ ID NO: 108194 - DNA, 667 bp, Cannabis sativa
gttaacagtttggcgctttcattgagagcctacgtgataaaagctcagaaaaatccctcctgaccaaagaaggaattgtctcccctggctaataatgggaaaaatgacaacacccatccctgaagaaaactaatcgtcgtctggaaaagagcccatgggctcaggaggccacccacttcaagagctacacgctctacacgatcaacacgttctagaagaacccaacgtgacagtgatcagaacccagaaactgggaatgaggaaaccaataatgaagttgatggttatgtacctcgggctgaggatgcctacgaccccaccaggtacgtgtcgttggttgaacatgaaaatcgtcaactctggcaacgtttggaagaagcaaacaaacgaaatactgagttaaaaagggaggcagtcgcagccaggatgaatcaagaaaacaacacacaaaaccaacctgatcctaaagtgagaaggtcgcgaggcagacctcggggctcacgagacaggaggcaggagacgactcaggaagacccccaaaatgctcaagaagaacaacctggggaaactaggaatgttcctgaacgtgagcaaccaaatgaccaagcacgtcatcaagaagtgcctcgaagacccaagcacctcatcaagaagtgcctcgaagacc

SEQ ID NO: 108195 - DNA, 979 bp, Cannabis sativa
  modified_base (788)..(807): a, c, t, g, unknown or other
  modified_base (950)..(951): a, c, t, g, unknown or other
ataaagcagcagcctgacgaaacacttaaggcgtacttaagtctttttagcatggctgccgctagggttagaaacttggatgacagcacgcagcttacaacccttaacgtagggatctccactgatctattaacttctggggacaagttgtgggatgatttacaaggacgtccggtaagaaacatcactgagttcaacgagcgggctcatgtgtttgtctagaagtaagaagcccgaaaggaaatgaacttgttgaaaagaagctcgggaggtaaacccagcaatttctcagcaggtagtgcttccacgagaattgataactctggggcttctggtttgaaaagaaaggaaggaattagggaaccatcaaaggatagaaagaaacaaaagaagcatgacaaatacgtgctaatgtatactatttataccgagcttaatgaaactcgtgaaaatatttgcctcacacatgagcggaaggtagccttcggcaaacccgatcctataaggaattcgaggagcacaaacgatcctaacaaatattgtaaacttcataaagatattgggcatgcgacctaagaatgtcgccaattgaaagatgagatagagagtctcatcgctcgaggctattttaaacagtatgtgaaaatacaaggccagggatacaaccagccccgttagcctaataacccaaataactaggggttacaacctattcctgtggaaaggatataacacttatccaaggggttacaacatattcaagggatactagtaaactttgccaatgnnnnnnnnnnnnnnnnnnnnttatccaaggtgtaagcataccttatcgctgattatcatgctagtctaaatccagtgaactgataatcattggaattaaaattttgacatacaatcatgactatatttcactgtgctggcgacactataatcatgaacaaatnnatatatatttatatatattctagactta

SEQ ID NO: 108196 - DNA, 532 bp, Cannabis sativa
  modified_base (67)..(73): a, c, t, g, unknown or other
acaaaagaaaacacacaagatgagagttggacggaatatcaaacgataaacaagcaaatatgccgannnnnnntactcaacagattaaagaacgacaatgtctaaagaaaagttagagctcaagaagtcacaaaagttttcttgagttagggcaaaaaagttcttgaagcttagaataagcaagatgaaaggcagacgcaatgcggttcaaagccaagctctatggctgtaagcccacatgaagacatgacaaagaagagtcgcagaagtttctaacaatagcgtttcctaagcctttttctacagcatagttgcattcaaagtgtaaacatgcaaagaaaagtataaaggaaatcagaaacttactcaaagattcgagtgtctgggctcaagcaacgtcaatctaaacagcaatcttctcaaggcccttcggcaactttgaagccagaaaactctcttttcgctttggagtttacttagtagcgaagggtggtaaaatgagttttgtgccaatgctatgggtatttatagg

SEQ ID NO: 108197 - DNA, 584 bp, Cannabis sativa
  modified_base (28)..(41): a, c, t, g, unknown or other
taggatgttaatcaaacatacttgttannnnnnnnnnnnnntggtaaaataattccaacaggtaacaccaatgaaacctttatctgtctgatccccaaaagacttaacagctgcaaggtcaaagacttctgaccaattagtctcatcacaagtgtgtacaaaattgtggccaagacacttgctactagactacgaggtgttttaggagagactatctctaaaactcaattggctttcgtcgaaggatgacaaatcctagactcggtccttataccaaacgagacggtagaggattttaggagtcgtggcaaaaagggatttgtatttaagattaacttggagaaagcatatgattgtgttgattgggattttctggatttggtgttgaatgaaaaaggtttcggggaggtatggaggaagtggattagaggatgtgtttcatctacatcattctctctgctcattaacggcagagtgagaggcaagttcagaggttggtcttagacagggagaccccctatcgccatttctctttacactggtagttgatgtgcttggacggttggtggatagggcagcagaat

SEQ ID NO: 108198 - DNA, 707 bp, Cannabis sativa
  modified_base (584)..(589): a, c, t, g, unknown or other
aattacaagctccttggcttgaatacaccatgattttgctagaaattgctagaatttgatgaagaaaatagaacattagttggttcgaggagggttcgaaagagagggagagagagttgagagaaaatataatttttgtctaatttcttattcttgtataaatgaataatgaaaaaggttttatttttaataaaataacatcttttaacattaattaaaatctgattataaccttaacataaacccacaaaaagacaaaactccaataggcaaaatgaccattttgcctttctcacactaaaagtcataaaaggtcacttaggggtatttttgacaactctaaaatctcgactattctcaatattcccaatgtttaactatattgtcccgctatactaaaaatactaagatgtcattctaatagccaaataccgcgttccaatgttgtcgagcacaaaacatgcaaaattatgaaattccgtatatgacatataaaatgcattttgaattcaaataaatcatcgtaaataaatatttcgaagctaataaacaagtttcatacttaaaccctaattatctgctannnnnnaaattaaagctaagcggtctttataattatcccccttaaaaggattccatcctcgaaatctaacctgaacaactccggatattgagctctcatgtcggattctaactcccaggtggct

SEQ ID NO: 108199 - DNA, 810 bp, Cannabis sativa
  modified_base (78)..(87): a, c, t, g, unknown or other
  modified_base (440)..(442): a, c, t, g, unknown or other
aatgcgagcgagtaacgtgataaaaaatttacgttgtattttgttccccacctcgcttgttggagcagcgagtagctnnnnnnnnnngtttactcatcattcaataacttcataggagccactatccagggatttcaagaagcaatttcaagctgctagggataggcgacccgaagcggcctcgctaaccaataaaagtagcagcctggcaaaacacttaaggcgtacttaagtcgtattagcacggctgccgctagggttataaattcgaatgacaacacacaacttacagccctttatgcgggaatctctaatgatttactgactacagggggcgagttgtgggatgatttacaaggacgatcagtgagaagcatcactaagttcaacgaaagggcttatgtgtttgtccgaaaggaagaagcccgaaaggaaatgannntgttgaaaacaagctcgggaggcaaacctagcaatgtttcaacaggtactgcttccactagaatagataactcgggggcttctgcttcgaagagaaaggacggaagtaaggaaccgtcaaaggatagaaagaaagaaaagaagcatgaaaaatatgtgccagtgcatactatttgtactgagcttaatgaaactcgggagaatatttacctcgcacatgagcaggaggtggccttcggcaaacccgagcctatgaggaattcgaggagcaaaagggattacaacaaatattgtaaattccataaggatattgggcatacgaccaacgaatgtcgctaattgaaggacgagatagaaagtctcatcgct

SEQ ID NO: 108200 - DNA, 673 bp, Cannabis sativa
aaagaataataataaataaaaaaacactaacatggctcgaaataaatatcagccgccttccttctaaacttatggtttttttttctttttaatttttttttgaataattctaaacttatgtttggtcccttttctacttaaattatttgcaactagcttgcttttttattttttcaaaggtgggaaagttttaatgatttgttttatttatttatatgtaaacgggaaaaggaagaataattatggaattaattaattatatatatttttgcttgagttatataattatacttgtgtggtgaggatatataaaatagttcgtttgaaagtgtgacttctctttcaatcaaacaatcaaaaacgttatcttagtgcaaagacattttcaataggtggggaccaaattaattaattgcatgctttgcttggtgtgtttatgaagttaattaattaatggttggtcaccccaaaatttgtattaaatggtttattttgtggagcccaaacacaactcaaagcaactaagagcactcaaattagaccatctgggataagagataacatataaaaattgagctatattttgtaaaaaaaaatattttgtaatatttttatattaacttttactattatgttctaatacataatggtaaatcttgatgcaaaatttaat

SEQ ID NO: 108201 - DNA, 742 bp, Cannabis sativa
gactcctatctgaagttcatgacggattctatggaaatcatgcagcctgaccgagcttatcgaagaaaattctaaggcaaggctacttctgggcaacgatgattgaagatttgagagcctatgttaataagggcgacaaataccaaagattttcaaagataccaagagctccgcctaatgagcttacacagatgcaaagtccttggccctttgccatttggggaattgacctaatcgggcagttacctaagggtaaaggcggagtgcagtatgcagtggtagcagtcgaccactttactaagtggactgaagccgaaccacttgcaaccattacatcaaagaaagttcaagactttatagtgaagaacatcagatgctggttcggactgccgtacaaaatagtctcagacaatggcaaacagttcgacagccaatctttcactgatttctgtgtgaaccatggtctcatcaaaagtttctccgcagtggcacatcctcaagcaaatggtcaagttgaagcagtcaaaaaaaccttgaaggatacactaaagaagaaactcgaagatgccaaagcaaactggccagaagaactccccgaagttctatggtcataccgtacaacgaaaaaaaatagcaaccagtcagacacaatttgcaattgcgtacggttatgaagctatgccgcccgtcgaacttgagccaccttcccatagaagattgacgtacgatcaaggtaccaatc

SEQ ID NO: 108202 - DNA, 509 bp, Cannabis sativa
gtaaaataatttccaacatcaattcccacctatgccatgagttgctttcgcttgccaatttatttttgtaatcaacttgagtcaacgatgtctaactttggtggggcctcaatgagaatcgaacaaaaatacattggcgttcatggaatctattgtgcaagagaaaggataacgaaggtatggggtttcgctcgtttgaacactttaatcatgcgctactcacaaaacaagcttggagaattcttactcaacctgattctcttcttgccaagcttctaaaatgtcgatatttttcccatggctccttcctcgaggctaatcttaggcactctccttcattaacgtggcaaggcattcattggggtaaagagttgttgtcttcgggtttgagatggaaaaatggtgagggttgtcgagttaagtgtggtattgatctttggatcccaagacactccactttttagccaattttctattcgggtctgatggatggtgtggtttcaaacctt

SEQ ID NO: 108203 - DNA, 710 bp, Cannabis sativa
  modified_base (434)..(434): a, c, t, g, unknown or other
agtggcaaaatccttccccccaagtggccggccatgcatagttggccccactttgcaattttaccattttttgtaatttattatcttattttctcaaaaatgtcatttttccaatttaaccatgttatcccaatttctgcactctgacgtggcatcacacgatagtgacacgtggcattaacttcgagtatctgctcgcaagatatagtccgaacaggatacctcatatgcttgctcaagaagaagcagtcaataacccgcacagaacgacaaacacttagcgaattcaactttcgcatcgtgagtcatcaaggaaatccctataacttggggatcagattacaaagatatggcaagctgtcaaaatcccacgatcagtgtattctgtatttactatgcaatctttctgcttatatcaattgtaacgagaaggnaaatacttcctctccaagctcatagcccaataaatagtgatgcatattcactgggcaaagggtcaaaacattttagttgagaaatattgtctaagaattcatattcagagatactgttgtaagagctataagaaaagtaacctttttttccttgttcttgagttaatacaaataacgaggattaggctattaccgaactttttgaggccgaacctctataaaattcctgtgtctttatattacatgttattattgcaatcgttataaactacttgt

SEQ ID NO: 108204 - DNA, 660 bp, Cannabis sativa
atcttcaatataagccctattcttaattctcatgaagcgattttgggcctcaatgttaccaaatcgggtcctatcaaaacccgttggtagtgggtttgaagatgaaccctcctccacattcctagtcctcttaggtgccttttttttcagcaaaaatagatagaaatttttttttttctttttttttcgaaatttttttttctttttctgattttttttctaactaatgctaaaaaaaaaatttgagcagcacctccccttaatttttctatatcccaaaaattcaaaatcactcaaacaatattctcaaatactcaacaccacaatacaataataacaaacccaatatcaacaatattcttgcacaacacacaattacaccacccaaaatctagagaaagttaataaaattccttaaagattgaaggaagtgatacttacaaacccgaagaagctttactccacctccattgttgaatgttcttaaaagcttgaggttgaagatgaagacaatggtgattttcagatttggagtgttataggtgatttttggtatgtgctttgatgatatgtgtaggttgatgagtgaaattgggtttttgaatggattgggtttgagaaatttgagaaaagatgaaaagattgaagattggtgatgaa

SEQ ID NO: 108205 - DNA, 652 bp, Cannabis sativa
aggggaataatactcaaaatcaacctgaccctggagtgagaagaccacgaggcagacctcgtggctcacgaaccagaaggcaggaaattgctcaggaggaccctcaaaatgctcaggaagaacaacctggggaaactaaggttcccccctgaaaacccaaatgatcagccagaaccatctcatagatatgagaataggaggcgaccggaaaccagggaacaggaaattcctcgtggaaacgaggaaaatcctatgacacaacctgggggacgtaggtcacaaatgaagaaccaccaacgttcttcccggacccatagggaagaggctcgtacaaatcccagtggggaaaacacgacgaaccacacccaagggggaagaacggggcgtgaagaaacgagtgtaaccttgggacgcacaagaacccacagtcgatcaacgcgaggaggagaaagtactcgtcgcaacaatgattgagaaagcactggtacaagtaaaactggaaatcactcaaggacgaggtccatgagcaggacgaggtccatgggtaggacaccgtccgtaagtagaacgaggtccgctagtaactataaccaaccggatctgcgagagcacttgaaccagaaaaaatctaatcttcgccaacaactcggtc

SEQ ID NO: 108206 - DNA, 677 bp, Cannabis sativa
tgctttcaattctaaaatgatctaaataaaaaaaattaagagatccatataatttttaggcaatgaaaacacgaaaaaagaactttaattgaatgaaaaaggttcgggtccgaacgtgttcttcagaatttttttttttagattttgatgcttttcaaaaatcactctataattttatatgaatgtgatattgcaataaagatttgaaatacacatcaaaaattgaatatatatatattttcttataataaagaaggaaacttaaaactttatgtctatatatacgtatacaatatatatcacataaaattatcaattcaatgtaaagtatatataatgaaaatatatataactttacataaatacatatataaaaggtgtatatatatgatatatatatatgaataaattttatgtatatgaatatatgtatgtatatatgaatgtatatatatatgaaataaatatatatgtatatataaaaataaattgagtatgaatatatatataatcgggattatataatatgaaggtatatatatatataaaaatatatataatttatattataaatgaaaaaccccgtttgtatatatatatatacatgaaactcaaaataaatcaaggcagaaatatataatctgctctgataccatctgttagacatttatatgtat

SEQ ID NO: 108207 - DNA, 654 bp, Cannabis sativa
gctaagatttctacgcccttaacaaagttgactcgaaagaactgcaagtttgtttaggctgataagtgtgaaagcagtttccaggaactgaaacaatgattaattaccgctcctgtgttaaccttaccggtaagtgacgaaaattttgtgatttattgtgatgcatccaaataggggttaggctgtgttcttatgcagtcaggaaaagtgattgcttatgcatctaagcaactgaaagagtatgagcagcggtatcctactcatgatattgaactagcagcagttgtttttacattgaaagtttggtgtcattatctttatggcgaaaggtgcaagatctacaccgatcataaaagcctcaaataatttttcacacagaaggacttaaatatgaggtaatgacgatggtttgaactggtcaaagattatgactgggagattctctaccaccccaagaaagcgaatgtggtagcagatgctctaagttaaaaaggcccaggacaagtttttgaattgaagaagatttcagtagaactggctgaagatatgaccagagcaagaattgaatttgtggtaggaaaacttgctaacattaccctgcagtctaatctattagaaagaattaaagtggcccaacaaagtgattctgagtta

SEQ ID NO: 108208 - DNA, 527 bp, Cannabis sativa
ttatgtatagtttgccttcaattattgtctatcgaggcactgaatagaagagttttcgcacctcgtttttgtcatttggaagtcgcctgttgagtagatagttgacgacaggggtcatccatgtaggtgaactgtctatcaactccatgtcttcctttacacatatacttggctcgcgtagcatctctatcggaaccaagttcaattcatccaagtcgttctgcgaggccagttttgccaaggcattagcgttagagttttgttctcttcgaatttgtttgattttaaagtaatcaaatttttccaagttctttcaaaaccttctctagatacttagccatttttaggcccttgccatggtattcccctagaacctgatttacaatcagttatgagtcactatggcagatgagattcttaactttcaacgcctcagctatctttaagccagggatccaggcttcatattcagcctcattgtttgatgcatcaaattgaaatctcaaagcataatgaaacttaaagac

SEQ ID NO: 108209 - DNA, 708 bp, Cannabis sativa
tgggatggtccaattaacctgccagcaaatcaaagctgaacatcaaaggtcggcagggttgttgaaacctttaggcccttcttgagtggaagtgtgaagacattgtgatggattttgtaacttgtttgcctagaaatacaggaatgaatgattcagtatgggtcatagtggacagatttacaaatccagctcactttctaccagtgaaagttacatattcaatggatctgtacgctaaactatatataaaggagatagttcgtctccatggagctcctaaatccattgtttcagactaggatccaaagtttgcatcaaagttttgggtgagtcttccaaaggctatggataccaagttgaagtttagtacagcctttcaccctcagactgatggtcaattagaaagaacaattcagatactagaggatttattgcgagcctgtgtcatggactttgagggttcatggagtagacacttgcctttaattgaattctcctacaacaatagcgaccagagtacaatatggatggctccctatgagatgctatatggtaggaaatgtcgctcccctattcattggaacaaaactggagaaaggaagtacttaagtacggagttagttcagaggaccaatgaagctattgacaaaatcaaggctcggatggttgcttctcaaagcaggcaaaaaagttatgttgatccaaagc

SEQ ID NO: 108210 - DNA, 719 bp, Cannabis sativa
gaaactgaaatggcttaaagacttcgtgatggatgtgcgttgttgaggagggaaattgtaggtgccaactgaattctattagcaggggaattacctttttctttcttgttagttaatataaatactcttttgtaattttgaagagggatgcctattgaatgaattagcaagaatttgcttgggagacttgtcctatctcgaagaggggagtttattcaatcaacaccctctcttaaactcatgatgctgctgcaagaagcatcgagagttttactaaaagaaaacaaaaaacgagaaattgtgtgtgacatagtaataaagtcagcaagctgcaacgatgaaggaacaaaaggcaaagtaatgttgtccacttttaaatggtgacgagtaatatggcaaacaatctcaatatgcttggtgtgttcataaaaaattgagttgtgagcaatctgaatggcaatttggttgtcacaatacataggagtaggacaagagtgaatgacacccatatttgtaagtaaccatctcaaccaaacaatatctttagtagtagacgccatggcacgatactcagcttccgtagaagattgagaaacaacaaactctttattgctcctcgaagaaataaggaaatctcccaagaagatacagattccaatggtagatttttagtctgtgggatcacgactgttgacttcgcttttagccaacgacaatga

SEQ ID NO: 108211 - DNA, 672 bp, Cannabis sativa
  modified_base (353)..(369): a, c, t, g, unknown or other
aagattgcactgtaattgaaaaaacactttagcatgccttagcattagggcgttacactttgaatcccgtacgctataccgacttagattttaggcttgccttaatgacaggaagtctacatttgggatggtgtttactcttaggggtggagcagtttttttgagaagtactaagcaaactgcaacatcagactctaccatggaggccgaatacatagttattgctaaggttgctaaggaactagtctggcttagaaagtttttccaaggacttggtgttgttcttggaatggaaaaaccactggttttactttgtgataacactggagctatagccaatagtaaagagcctnnnnnnnnnnnnnnnnncaaacacatagagaggaaatatcatatcattaaggaatatgtggcaagaagggatgtactggtggggaaggttgatactgaagacaacttagctgatctattcacaaaagttttgactgtaactacatttgaaaagcatagactaagtttagaattaattgaaatgtactgatagttttatgttagtgcaagtgtgagtttgtttggctttgagccttaaataaaactctattttaatataatcttttctattcaattatcaataaataaacaaatttattattacttatttaatgtgttatt

SEQ ID NO: 108212 - DNA, 637 bp, Cannabis sativa
gcttattttgataattctatcattaatgatattcttgaagtgccagttgcagggtgttatggtagggactctcagatttgggagaagacaagttcagatgttttttttgttaaatccgcctatcatttggcttcctcttccctggatattccttcttcttcttccttcacttcttctaaaaagttttggtcccgtgtttggtctcctactattcctcccaaggttaaattgtttatctggagaatgctatctaatgttcttcctgttgcaacttctctcttttctaggaaagttcttgattctcctctttgtcctatttgtcaatttgcccctgagagtatcaaacatgctatgctagactgctctagatccagaaaggcatggagatcttccaggtttgtttcttattttgatattaataaacacatggatctaaatgatttttttatgggactggttgttgatcaagataaagattctcttggtattttatattgttttttgtgggctttatggaatcaaaggaataatatcttacacaaacaattctctattccccctaaagatatttttgattggagtcttgcatattttttccaacatttggatgcacagcaaagacaggtgccaagaccag

SEQ ID NO: 108213 - DNA, 683 bp, Cannabis sativa
atgctcaacacgttttgtttgtgatcaaaaataaagtctaaaacttcaagctaatttttgactattatttggtcatttctaagatatacattctgaataaaagttctagatcgttcttttatctttttaaaacatcttgaatcgtctaattcagagttatatcgagagagttatggtcaaaatatcattagacatcgcaataaaattccaaaatgacaaccattttggaattttgcttggaatatcgtggcattcaaggctatgtcgcgacattcactgttcaacgaaaaaatagaaaattttcttgtttttggtctataaaggttttagagctaggctttcatatcatttgaacttggagaccaatttcgggcatagaaggacgactgaaagcataagacgccattggaggactccaaatagtgttcattctcatctttcattatcttttatatttttaattgatttttttgaatgacttttatgagctaattttcttttaagccttattatgtgaattacttgaatttcttttatgaagtgacatagttattcattttcttcttcttcttttcttatttcaattccatccaacctgatttaattttataattatttattgaccatctataattgctatatatgaattcaaaataaaattctaaaaagtgagatttgaatat

SEQ ID NO: 108214 - DNA, 535 bp, Cannabis sativa
  modified_base (358)..(359): a, c, t, g, unknown or other
tttggtatctttctgaattagcaaatatgaggatgaggtattgtgcgatgtggtcccaatgcaagctggacaccttcttctaagaaggccttggcaatttgatcgatgagtccaacatgacggattcaccaacaagtactcattcatgttccgttagcgaaaaaccactctagctcctttgtcaccaaagcaagtccatgaagaccaagtgagattaaaaaatttgagtgataaaaagaacttgagtgagcaaaagaatgagaaaaaagagagccaaaagagaaaacaatcgaagcaagagagagagagaaaagaaagagaagagttctatcgatgagaaaaaaaatagagagaaaannaaataatttgtatgcaaaaaaaagtgagatcacgggagcttggcgtacaaaacaaccaatgcttttgctcgtttatacggaggctcttttaaacactaaccaacttgattcttcgctgcctagtgttgttgtttctattttgtaggaatttgaggatgtgtttcccgaggaggtac

SEQ ID NO: 108215 - DNA, 643 bp, Cannabis sativa
aaaagaagagtaaaaaagttgatatagccgtgtagaggtattagtgtaataaagattacattttgtatttttgatgtaaaaatttctataaaatatataaactatttttctcataattaattattttgagatagaatcttacacatcttatcctacaaacactctcttcaacctatctcaataacaaacttccacattctaataagtaatattttcatgcatatttgatatttctatatatgtatgaggtaaaattgtgataggacttattataagttccctagaattagcaaagttttttttgactattaattttaaatcatgtggtcattaagatatttaatgaaaattttatacatattataataatatttaattatatattttatttaaaaaataaaataatattaataattaaaaaatattcattttttatttgaattattattatttttttaaaaaaagtgaattaaaattgtttttatataggtatttatttttaaaaaataatttacttacaaatttttctatcattttttttatactaataaaattgattatttaagtacttttgtcactaatttgtttacatagatagttctactataattattttttaaagaaaaattaccccatatactat

SEQ ID NO: 108216 - DNA, 663 bp, Cannabis sativa
tacaatttccttattttattttggcagtaaaacactcgtggaaaaaggatttagctacagtggcaaggacttcctgtattcaggttttctttattttaaaagctgtttccatttaaattgaaacataaaatagttaaagattacatattgaatgttgtaaaccttcctttctttgtatagaacttttatgtaactcagtctatagcggagtagaaaatctttttaatgaatacatatttatgttacgagtagggatgaaaattgggcaggtaataggcggggaatgcttccccactcccatccctgttaactattttaatacccatcccagtctcctacccacatattccccatcggaggcgaggtggagaatcctcgccggggcaggtaatactcacgggacctatatgttaataatttaaaatagacaatgttatctaaaataaaatgaaaatatttaaaaatttactaataataaacggcaaaacacataaagatatatataataattgaaaatgtttttgatatagcacttgtaatcatggtattcctccgccacaagtgatcatggtttggttttgtttcaaatgtttttgatatagcacttgtaatcatggtattcctccgccacaagtgaggctatctatatataacgggggaggg

SEQ ID NO: 108217 - DNA, 694 bp, Cannabis sativa
gaccataggcaaaggtggaaaaacaagctttctgccaacctcccgcgactagagaaaatggttgcgactaggctttgtcatggtcacgactactgatcgtctttggaagcttcaacagatttttcaccaaattgtcccgtattttcaccaattgactgaatttgaactacaatgcaccgggaacctgaaacaaggaaaatcaagcgtaaacccgctccaaaaaggctacaacaactgagaaaacgcttattaatgtgacccggaacttaggataaaaatagcctaacaaaattcccccaaactagatccttactcgccctcgagtaagactaaaactactactaactatgctatcagataatcagaatactactgcctcaagttccgtttccttccattgatcaaactagaatttcatttcaattccaaaaactctaacaattaattcgtatgctcatcttatcacacaatgcataaacacaaattgacttcacaattgaaatgatattataatagtcttactctttccaatcattccacaatccaatagccaatatgcttgcatgcttacctctctccactaatgttgacaacatccttttcgaaatcaataggtcttgcagggtaaaattttcgggcttaagtatttggtaacggaaaagtgtttctagcgaaagatatcataatcaccttt

SEQ ID NO: 108218 - DNA, 1366 bp, Cannabis sativa
gggggcgtcagacttactcctatcctgagtgcccgcgctgcaagaaacatcatcctgggacttgtaaccggagggcttgtttccaatgttgatcggtggggcacctcaggaaagattattcccaattgaagaaagaggaacctaagcctgaagttaagcctgcaccagcacgtgtatttgctatcactcaggcagatgctgccgccagcccttcagtagttacaggtcagcttcttatcaatgaccttgcttttactattttattttgattcaggtgctacacgatcatatgtagcattgagagttcttaataagctgggtagacctagtgatgtttttaaaatgggatttggaaccctattgcctaatggggaattgattatttcaagaaagtgggttagatcagtgttaattagagttgaagagagagaattgagtgctgatcttgtggagttaccattggccgagtttgatattatacttggaatggactttttgtccaagtactctgctagtattgattgtaaacggaaaatggtaacattccaactgaagaatgagtaaccatttgtttttgttggttcagttcaaggttctcgtgtcccaagaatctcagcgttgaaagctagggatttattacgcagtgggtgtgtaggattcctagcggttgtagttgattcgagtaaacatgtgttacttggaactgaagagattaaagtggttaaggaattcctggacgtttttcctgaggaattaccagggttgccacctcaacgggagatagattttattattgacctaatacctagggcagaacctgtttcaaacgcaccttaccaaatggcacctgcagaactaaaagatttgaagatacaacttcagggaatgttggatttagggttcacccgaccaagtgtgtcaccttggggagctccagttctatttgtaaagaagaaagatggaactcttcggatgtgtattgattaccgggagctgaacaagttaaccattaaaaacaaataccctttgcctagaattgatgatttgttcgatcaacttcagggtaagacggtattctctaagattgacttgagatctggatatcatcaactgagaatccgagaggaagatattccgaagatagccttttgtactaggtacggtcattatgagttcctagttatgtcattcgggttaacaaatgcttcggcagcctttatggatctcatgaatagagtattcaaggatgttctcaataattttgtaatggtatttatcgatgatattcttgtgtactctcggtcagaagcagaacacgaacagcatcttcgaatggttctgaaacgactcagagatcataaactct

SEQ ID NO: 108219 - DNA, 608 bp, Cannabis sativa
ccagaccccgaccctgaccccgaccctgacactgaccccgacccgaaaccgaacaccaaccccgacctcgatcccgacctgaacctcgattccaaactctaacctcggactcagactcgattccggaccccaaacctggggctaggtccgaggtgctaggttgggtcaggtccaaggtcggcgtccgggttagggtccggagtacggagttcgggtttgggtctgggtccgggtctgaatccgatgtctgggcctcggtcttgtccaattttgggtacgagtccaagtccgaggtttggtccgggctcaaggtttgggtgcggggtccgacgtccaggattagggccagtacaagcatatgacagcttgggtcattgcataaggcctcttatattaaaagacctcattttttttatcatctctttatatatataatataataaatattttgtttttatatgtatagtatacaaaataaatgttcataagaacaaagcacttaaaaaaaaaaaaaagatattagcggctaaaccaccttaactttacggtttgtaacagttaaccacaaaaattaaaattttggcggcataactacctaaactctggtt

SEQ ID NO: 108220 - DNA, 539 bp, Cannabis sativa
ccaaaaaaaaaaacaagaaagcttaagactaacgacacaaaggacataaggtgtacaataccaaaaagattaactaaactaaaatacaaaaaataagtaacacaaataacatagaacaactccaaagaactctcccaaaacgcagaggaggccgcccgaaagcataaaacaagcagaccaaaataaagggccgctgccctacaaaaaagtccacactcagtctctcattgcggttctgaacagtgaaagtgctaagacaagggaaacacatccctttgggtaagactcaagtccatcccccctctatatgttattccttaaaacatattgaatgaggcatatctaggatgagagcttgaaacattttgttcgaaaacctaaaaaacacgtgttagaagcgaatttgaatcgcacaacatcatatagtaaaagccgaaatacctctagttagggttttgagcttgtgtatgtttaaacttggaagttttctttggggatccaaaaaaaatttaaatacattgtcagctctttatttgtag

SEQ ID NO: 108221 - DNA, 926 bp, Cannabis sativa
  modified_base (678)..(691): a, c, t, g, unknown or other
tgagaggaaaataaccgagttgaccaaggacctcgaggcttccgaccaacttcaagctaccatcgccaccttgtcggcagaagtgaatagtcttcaagaggaaaggggagtgcttcggactgtctttcatcggttggaagaagagaagaagcccaaggaggaggagcttacaactgaggtcgagaagtacaaatcagaggctgaacagtagagagcggaggtgacgaggctggaagagaaggttcatgcgttagagatagcctgtctcgagatttttttgacttttggaaggctaaccctcaggcgaattttgattacctgggtgaggctaaagacatgtatctcgagtactatgcttcctaagttgcttatggtgaacccgaggtgaccacttctacttctggccagaacgttgatgtgccttccgctcaaacaatagatcctctagctccttccagccaagaagacctgaacaaagagcttgggactccagctgtctaaatacttctctttttatctttcttttttatatatctatccgggcataaggtctttttttaagacatcatgactggccaagcggtctttgaacttggaattatttttcatttacatacaacaggctgaccgagcagcttttaatcccgatattacatgcttttgttatctttaatgaannnnnnnnnnnnnntataatcatcgtgcaattgtgtttgttttatctttaccaaatgatttgtacaggtataggtgccccaagtgaccgagcagacttatgactcttggtcacttgtttcttgcaagtataatttttatctgttcagagttttgggttcgaccgaacctctttgtatgcactagatggtaaattaataacatgttagtaattttgactcaattttaattttgaaataaacatctttatt

SEQ ID NO: 108222 - DNA, 1033 bp, Cannabis sativa
atataataatataatttctcaattattcataattatctaattagggttttgctaatccatttcataacctagggtattacaataccaatgcactttgtaccataacagtacaagtgctggtagtgcaactaacatttaagcatgcatatttacataacatatacatacactcagttattgatatcacacattatatacagttcttaccttctttctagattcaagtgtactggccgacctgaacggaaagtctcgtgctagatggatgccctaatcacataatgaaattgggtaaatcacatggttaaaaccctaatcccaggaaacccgaacctacaactctatgttctgctatactctccaggtattactctaactcaggaaatagagaaacacccaactacggcactaaaatggatgagaatagagaaaatggagcattcagggatcctgccaaaaccggctagggtactggtaaaaccggctagccggttcataccagttcacccaaactcttcattccttgctcaaaactccaccaaatgcagccataccctccagattacctaattagggtatacacaatattttccaaccagtaattcacagaaaaactcaatgaaattcaacatgccattagagactaaagctttgacctcaaagctcaaacttgcataaattcaacacaaagtggtaaaaccagctactaaaacctttaatcaacctaaaatgaacataaaaaccaaaccctaggtattcccaatcctaacagccaccaaaacccaaattcattacttcaaactaacttaaaacttaaaaatacacaaaatcaagggttttggggtttaccttagcttgatcttccttgaattcttggttgaaatcacaaacttcagcaagaactccctgattcctagctggttcgaagagagagagaaatgaagagagagcttttcttcaattttggtttaatctctaattttccttatttttcccctaatagaataaagcttaggaaattaattcctttgct

SEQ ID NO: 108223 - DNA, 611 bp, Cannabis sativa
  modified_base (456)..(456): a, c, t, g, unknown or other
ttgattacaggggtacttgtaaaatggaccctccgcaatcatcttgaccacagggtgagcaagtagagcctggggttgaccaaaccaatccaccagcaccacctgcaccttcgcagaatccgcggataatgcgggagttgacaatgctaatcctcatgctgactggcagtagatgtttcaacaaaatgcgaggtatcatacttcgttaagaggaagagttgcgttgattaaggcaacaagcactggctgcccctgttgagcaagtgttaccaccagcacctatgccagtggtgggtaaccaggggtttataatgtagcatagagattctgtgtttgagcggtttgtgaagctgcaacctctgactttttctgggaggtactgatatagtcaaggccgagcagtggatgagtactattaacttcgcttttagccaacgacaatgagtctttttgatnagcgataaacgatatgtcgtaacgaatatataataaagcaataataagacacaggaatttaagagaggttcagccccgagtagttcggtaatagcctaatcctcgttatttgtattgactcaagaacaagaaagaagattccttttcttatagct

SEQ ID NO: 108224 - DNA, 635 bp, Cannabis sativa
ggaaaatactacattaaaattcgtgagtatggataaactcccagtctatttgcaaagttttttttaaaagcatatgttcattacccaatacatatgtcgggtacatccaaattatagtgtatgagagatttaagaaactaagcatttttggtaatggggtggagtctgcatagcattctccaaactttcataaatctttatcgattgatactcttcaatgggagtgtacatattaagtcgtgttctaaccaaagttatttctcaaacatattttgagttgtgataaggttggaaactgactttatgacatgtacacattttagaaatacccgtatacagttagagtacaattgtcaaagaacagatctgggcccaaataccataaattaggatttcatcataagagctataaggtctaagggttacatattttattatcaatctcacaatactagaattgtggagttaagaattgacttgatcagtggcagtgatcaatctaggaacctagtttctgagaaagatcacttatattttctcaaacttttacctcaagtattagattaattatgattcacaacaacccttaaggttaatggttattgagaattaataactaatcattaataatccac

SEQ ID NO: 108225 - DNA, 535 bp, Cannabis sativa
aagcatctcaagaatatcaatattctcaaaataattaaagtctatatagccaatattttaatattcttcaaggttaagatacccacaagtgattaatttgagtattaaattattatttgacagaatgtttttctttttattttgggtaaataccattttggacactgtgttttgcaaaagttaccaattagaccctctgttttgttaaatgacaaaatagaccttatatttttcaaaatggtacaaataggaccaagagctgaatttttaacaattttattttttaatataaccaactttatgaaaaattttaatacgaataaatacagaaaatataacacgttttgtcataacatctctagatcagattattattaagttttattttaacaaaaaatcagttcaaaacctatttgtacaattttagaaaatacaaggtccattttgtcaattaacaaaacagatggtccaattaataacttttttaaaacactgggtctaaaatgatatctagccttttatttttataacttcg

SEQ ID NO: 108226 - DNA, 800 bp, Cannabis sativa
aggtgagcaggtttcggaagaatgtacttgctgcagttgttgcaggcttagtgtacatcatttgggaggctctgaacaagattatttggcaagaggagcagccggaatggggtaggttgatagagaacctgaaatggagactcaaaagccaaatcatcatatttttgcccaagaaattgagttgtaaagatagagagtggttttatgatttgtaatgatgtaaatccaaagtatgtatagatttaaacttgaggcttctattttaggagtgctcctaggttgtaaattagtttgtgcaatataattctctgattcataaaaaaaaattataaaatttacaataaaattttatttttttttacaaaaattaaactattttttacacaaattaaaattctcttcttataataaataattaaataattaattatttttaaatgatagttaattattttattacaattaagtgaactaagtatgaggcctcaagctagtcaatcgataacaaaatttgtatatctatctatatatctatatatcgatataattttaattttctaacatctctttttttctccttttaaatttaatacatacattcattgcctagtttatcattaatggttaatctattcggtaatttagtcttatctccctagcaagattttattcttactaaatcttttacaatttataagatttgtcaagttttcacttgatcataatttacaaaagtttgaaaagataatactttgaatttatttatttatttaaagattgttgagtatttttctttctca

SEQ ID NO: 108227 - DNA, 850 bp, Cannabis sativa
tctcgcaatcttggtgcctatagaaagcttattaaatttcccataattcgtatgaagaaaggttttgttgaatcgaaactgatctatgtcaaaaattaatatttctacgatgtttcttataaattatttgtttatatattctgtataagttgtctcagtaaaacttgaatatctctctgaatacttatccgattcaagtagtcttgatatcattgaaaagctgattcaatgatctataatttgtatgaagaaacctcttacaaattcggaatctttctatgtccaaaatcagtatttgtatacagtttgtcgtgaattatttttctcatatttcctaaaaaagttgtcttgtctcagtaaaattggaatatatttttcaattctagcccttttttaataatctatatataattttaaatcttagcaaattgtctacattttcccttcagagaattttctctaatttggagttttccttggtcgaaaattatcattttgttgttgtagtctaaagttcgtttgctttaggatttctaaaaaaaattgtttcggtaaaactatgataactccctcggttttaatctatttttagtgatctttgtatcattggaaagataatttaattgcctataatttttatgaagacaacttttactaaattagtgtagttgttggtcaaaaatagtgatctttctgctgtattgtaagagtacgaattttaatattagggccttgacccatatcttattataggtagtagtaatgagataacaagtctcaagcagcgggacttgaggtaaggaaattagatagttttgtatgtgtttatctgtataaatttagattcttt

SEQ ID NO: 108228 - DNA, 804 bp, Cannabis sativa
tcattctaattagggttgctaatccattttactaatctcgggatattacaattatcccctccttatagaaattttgtcccgaaatttacttgaacaacttgagatatctctgccttatgtcagactctaattcccaggtcacctattcgaccttactgttcttccgtaacacttttactaacaccagtgttttgttcctcagaattttctctcttctatcgagtatctacactggttgttcttcatatgacaaattgggctgaagttccaaagcttcataactcaaaatatgagatgagtctgacgcatattttcgaagcattgaaacatggaacacattgtatacagctgctagcgcttggagtatagccaatatgtacgccacttgccctactatcctttaaaatttcaaaaggtccaatgaacctcaggctaagttttcctcacttgcaaagcattttactcctttcataggtgaaatacagagaataccatatctccaacctaaaagtcaatatccagtcgctttggatcagcataactctttttcctactctgagcaataagcattaagccctaatcttattaattgcctcacttgtcttctgaacagcttcgggacccagaaactttgtctcacctaactcatcccagtgaataggtgatctacactttctgccatcgagaagttcattaagggccccgatagttgactgataaatgttattataggaaaactcgaccaatggaaggtactgttgggttttgtgccctaaataaaacccctttcaatataatcagatt

SEQ ID NO: 108229 - DNA, 577 bp, Cannabis sativa
  modified_base (276)..(280): a, c, t, g, unknown or other
taattcaattcaataaaaaaaaattgaaaagacatactatttaatatttattatttatgttatattaatattctattattaattgttaaaactatttatattcttctactaaaaaataaaaactattggtattctttatatagctcttactcctatatgtgtatatatatagtgtctcaaatacaagttaaagttttgtatcaactcttaacttagaagtctctgttattatttattttttctaattcatattttttattttcaaattatttagcnnnnnctatttatttttaaagttttgttattattttttttcttctaattcttgatgttgtttttgttcttcttcagattactatgacaagggatactcatagacaaatttttctctcatggcagattaccatggaaatgactatttatagacaaattcttcttcactagatatttgcatcaatcataaggagaacatccaatctaaaaggtcatgtggtgttctcttttaaagttctactttatctaatttataatttttttttttgttttttgtatctaatatttactaataacgaaaatt

SEQ ID NO: 108230 - DNA, 853 bp, Cannabis sativa
tttgtggtaccccggtccggtccagtcaattgtcattctgtttttttttgcttttactaaatagtcaaccttaggaaacccccaactttatgggctagtaccgaaaaacattaaaacccgtgtggtcaggtcaggttcaacccgaaattaccccacacgagtttcgggttcagatattaaaaagtggttagttttagtcgggttctaacccatgacccgaaaatacagcaaaaaaaactatttttttattatattaaaaagttaataatattaatttttagtttatcacactttacttttttactttttactgttcattcaatgcctacctactcaatactcactatttgaacaagaccaagataaccaagtaaaacaaatggctgcagtagatgaatcgtttttcaaaacaataaaaccatgtcctgaactaaagagcatgactatgacagaacttgataataacaatgacaataaaactacctacttttctcgagaaccagccaatgtgataaaaataaaaagccaatgtgataaatgaaacttggttgtctgagccttttcttgggaacctaaaagtcaatgtgataaaaataaaataaaaaatatggcatttttaaaaattaaaattcatttgagcccagaaatgacattcgggctcaacccaattacatccgagcccgaccacgcccaacccgcacatacacgactcgaaacccgccatacccgaccacccgaaaactgggttcggttatgcatttccaagacccaaaatctgtaaacccgaacccgaccacctaaaaacctgacccgtatgcagccctactagtattgtcctcttaatgggtttctt

SEQ ID NO: 108231 - DNA, 525 bp, Cannabis sativa
tgtttccctttctctcgcgaagtggccagtggtggaagagcagggaatggtttagggtggttaataataggggaaatagtattgcgagccagtctagtgataaatggccagcgccctgctttagaaaaatcttgtctatagcgatcatagttggacttcggaagaggagatccttcaagccatggaccataaggaaggtcaggttccttgccttcatccagtttttccaagaaagatgggcacttgtcaaaaacatggcctataataccacattcatagcaaaaatctgggagtcgttcataacgataatcaagccaaagttcatcagacatccaagaaaaagtgactgtttggccacggagaatgggttgagaaacatcaataccaactcggatacggagaaacggaccccatctttcattgagcgagtcttcatgaacatcgatgtaagtagggctgaatattttgagcaggtttgacccgaacccgagcaacccgcccgaacccgaaccagtgaacccgcaa

SEQ ID NO: 108232 - DNA, 655 bp, Cannabis sativa
tgattatgtgattttaattgttgttggttggctgaaataagaagggaatttatcatttattcttcattttattataagttagaaaaattggaaaattaggaaattcaaactctctctttctctttctctctctcagtttggtgtgggctgctagggctgggagttttccttggtttttcaagcattttcaaccattctaagtgtaattcaagttgtaggtaaggttcttgaaattgtcttcatgttttcttgaatgtttaaggaaattgaataggttgcatgtgtagtttttgagttgttgttgctgctgtgattaggtgttgttttctaaagtttaagcatgcttgattgaatagatttgaactgattatgttgttaattgttggtctatgcataagtgaagcttttaaactcaaaatcttgtatttttcaatggtgaaatgttgattaagctactgtagttgttgattatgtttgggttcgttttctagagtaattttatggtgaaacaaggtgaattgagcaggttgtgttggatgtaggtgagctttagccaatttttagttttgaactcaaagcttggagctcacatggtgatttttgattctgtgttttctgggctgtgttattactttagaaatgtttattggggtat

SEQ ID NO: 108233 - DNA, 562 bp, Cannabis sativa
gatttttaaggggtatatttgtcttttttatttttaattaataaaattaaaataaattaagtaagaaaagggaaagacattccctataaaaataggagtagacctttctctttgttttttctctaatttgtgtgggtttcactagtttttccattttcaaaatttagtaaacaattgtatgtgaatcaatactataccattcattctcattctctttaagtaaacatgtcataagtgtaatataaatccacaaatccctttatgagtaatgtgtgacaatatatatgtaaatacaacgataaagggtactcatgctgtcttatgaaatatattatcgtgattagagattatatagattttttttttaatttaagcgtttatatattacaactatattttatttgggactcgaatccaggactttcaagatacacatccacctatggccacttgaactagcctcaagtagtttaaaattatatagaattggtaactaattagaagacaatatatcacaaaagtgctggacacattaatgccttgtaacaattttttttttttt

SEQ ID NO: 108234 - DNA, 652 bp, Cannabis sativa
agggttagggtccgggtctgggtcccgggtcccgggtcctggttcgagtctgggtccgagtctgggcccgggtgccggtctgggtttgggtccgagtctgggttcgggtccgagtccaggtcccaagggatccaagtcttgaattaagtttttttttttttttaaataaattgaaatcgggccagatcagatccgatccaaagaaaaattaggcgggacggagcggagcgcatctgatccaatccgaatgtttctaatcagaggtgatccgtcgggtcggagctctgacgcgctacaactaaatggatctttttgacatgcctactgagaaaggctcaacaagtgcatattacaagtattgccttcataccaaactgaagatatcccaatgcgggatttaatcatatcatcctcaaaaagccccactccatgaaaaatggcttgagacgcaccttgggatttgggctcagtaatttgagagctgtacttgttgagattctgggtcttcatcggttgggattccactgtgatcgatgacggagattgaacgacctggatagtgaaagggagtcgtgggtttagggtgagacgtggcctgagggttaggaatgcggcttgcatggtggcggctgcggtggctggagatgaaaaa

SEQ ID NO: 108235 - DNA, 625 bp, Cannabis sativa
ccatactttgtaaccttaaagagaacaacatcaaatcctagctatagtgatgtgaatagtattatgtcaaggtatcaatacaacaaaaaggggagcaggtcattactcgctaactaagggggtcgaccctatataaaaatctttatgttctttacttttgagttctaatcgtgtaacatgtgaacattagattcatacgactccactgttggccacttttgaaggtcaatagtttcgtgctttcattgagagcgagttaatatcatatttgatcaaacaccatggttaacacgagaacaactctgattgcaccatttgcatctttgagtcttcctcaagtcccacagactacagatcctgatgtccatattacatccacgactagaattcccatgaacacagtagatgttgtcaatcctgacaccacagctggcaccacgaatcttgccactacagttggttgggatggcaaaaaaatcctggtggatttgaacaatcggctcctgcctccaagggaggaccctccacaagcacctccaactaaaggaaggacccttcggggggttgggttttgtgccctaaataaaatctatttcaaaagaatcaaatttacttattaataaag

SEQ ID NO: 108236 - DNA, 1246 bp, Cannabis sativa
aatcataataaacagtaagagtttaaggagaagaaaagaactatgatgaagaacacttcgaagttgcgatctccgtctcttcctttctctctctctaagtttctatctcattttggtagctctagggtcatccaattcgtagcctaaaaggttctatttaaattgcttgaaaagatagataaatccccccatagaatttaattttttttaaaaaaaaagataagtacagtgctatagcgcctgagacctgcgctacagcgcccatgagatattttttgaataacccacgtgttgaaattatatttttttttccagacctacgctatagtgcctagaacctgcactataacgcatagcaccatttttcatactccaacttgtttctcgactcggttgctccttgtttctatcacctgattagtattttggtcataacttctttaatacaactcagaattggacaattcaagataacccattaaagctaagagcgagatctaaaactttcatgttgagttccaagtccatttctacttctaaggtcatcaaaatttgcaattaagttctgccttgtaaaaccgagttcaactattttctactaaaatgtgctaacatccctccaaatgactctaaatgcatgattagtctttaaaatattcaaaacaattaaaatcacactaatcaataatttaaagaattaatttaagaatattaatacataaactatttatatttatatgacaaacatggactcatcaaatttccccacacttgactcttgctcgtcctcgagtaagttaataataaaatgaatgatacttaagcaaatcgatctttatgaaaaataattttagttttaaaaattgtgcatccacttataattccaaaaaaaatccaaactcttcaatcattagaattttaactcaagataattacttttcaaactcaattttgtgtgtgtgtgttcaatcaactcatcatattactaacattcaaatcaattcatgcatgccaacaatcaatgctcatctcaaaagaaatgtgtatgataaaccgtgtttttgcaaaagtcaataaatttttacacaataacagtaaaaacacaactgtaacagtctgcagcagcagaatgcaattctgtcactgcaaaacatagttttgcaaaaacaaaccagaactagaaataaaataccacaaattaaactaccagcaaaaaataaaatcatttggcacaagaaaattgtat

SEQ ID NO: 108237 - DNA, 1311 bp, Cannabis sativa
  modified_base (1072)..(1089): a, c, t, g, unknown or other
  modified_base (1132)..(1138): a, c, t, g, unknown or other
aattcatattaggatgttaaaaacgttcatattaggatgttaaaaacgtacatggtagtaaatctaaacgtacatggtagtaaatctagatacatggtagtaaatctagatcctagtaaaataaattccaacaacatacacataaaatagattaaaaaatgaaagaaagattacaataaatataaccaaaacaaagatttaattacaaagagaaccaccattaattctggcgacttcacctgagaagtcgatcataatcaatcaaaacatgggctgtttcgaattcatgaaaaataagtgtagaaaaactaatacaaaactaaaatttaaccaaaaatccagtttaatttgcacaaaactaatgtcgtgaattcaatttttagattcatgaaatgcagatctcaaaaagttgaactggattttccaaacaatccaactcaagtataattcaaaaaataattatatcaatactatagtaaaatatttatcttggtgtattttcgttgttttctaaatttctaatgctaaattttttcatattaatcatgaagagacacaggggcgaacccacatataagcgaggcagggcagtcaccgcctctgaagaaaaaatttgggaaaaaaatatatatgaattttagttagttacttttgggaatattttaccagggtctagatttactaacaagtatatttcattaacatcctaaacataaatatctctaaaataaaaacacataagagtttagaaaaccttacattggctgtagcagaataatatgattcattccgctcagatctttaacctttgttccaaactatcgcagagtattatcaagatttgagcctagatctctttctctccttcaggtttggttaccaccatattctgcactatgattgagtatgtgcgagcatgacactctatcactatgggctaattggatgaagaacaattaaggtggtttcgaaatcagcatagaacgtgtctctcatctactagttgtcagagaatgaaaactaggtttgatttggttgaaggcaatagtttagttggatgagatgagagcannnnnnnnnnnnnnnnnngtttcaactagggcttaagtttaaattatatggattaaaaaannnnnnnatattgggcaaaaatcacttaatggtcgtacacttaaagggactattctctagtaataattttgtcacttttttcaacaaattattcttctttcaataataccatatttttcaattcaattctacaaataccaaaactatatatttaataattataattaattaccaaataaa

SEQ ID NO: 108238 - DNA, 790 bp, Cannabis sativa
ataatttacatgaccatgagaaaaaaattgactgaaaaattatttcaaatactaaaatagataaagatgtatcgatgcatttcgggggtgcattataaaatttttctaaattatatatgtataatagagatgtactcaaattaatacaacttgctttaccttcagagaatgaatagtgcattcaaaaaaaaaaaaattaaaggttgattcattgatttttttttcccttttttttcatatggtggactctatgaatcataaacataaggaaaaagaagaacataaattaacaaatctaatctatagaaaggagcatatctcatatttttgttttagtgcttttacatttttttcttgggcttttttactatcttaataaaaaaaatcccacattttataaaaataccatatgtgttaactatatagtctataaataaaactgatattcctttggtgttgcaagttctttagattagtgttgatcattcaaatctttcaaatatttattaattttatctgttccatctcatatttttgtttgagtgcttttacattgttgcaagttctttagattagtattcgatcattcaaatcattcaaatatttgttaattttatgggtttcttgtattgtgtaatcttaatatgattgtattgaatttaaaacaaatatttgattagtgtgcattgtgacacatgtgaaaaataattttttttgtggacgttacactcttatcaaatttatataagagattctaagtatttttttttttttcatataattcacaaaa

SEQ ID NO: 108239 - DNA, 620 bp, Cannabis sativa
  modified_base (487)..(491): a, c, t, g, unknown or other
caagtatatgccatcttcagtttttctacgaaaagcttaagttcttctcatcattttattgcatataacttgtttttttattctattaaaatttcagtacaatgtttctttatgatgtctcgtacacacatcatcatttggtatgaggtatattttcttcaacctatttttataagaattatttttttatatttagataactcttaaatacttaaagtaattttaaaatagtattagtgtaatacatttggttagagtaaagtttttttaaaaaaagagttaaatgtatacaaatattaaattacttaaaaatttaaatattgcacattattattattcaaaatactaattattatacaaaacataacttaaagaattataaaaataatactaatatactagaaaaatacgaacccatattataaaatttaaatgtataaaaatattaaattacataaaaatgaaaatattacacattatttattannnnntatactaattattatacaaaacactacttaaaaaattataaaaatgatactaaaataaaaatacaaacacatattataaaaaataaataaaaagatagctaatatacaaacacttagagtaacgtaaat

SEQ ID NO: 108240 - DNA, 613 bp, Cannabis sativa
tgtcctctaaacacatttataaattattaaagttttataattttttaattatgtttttatattttatttgataggaaaatattatttagtggatgcgggatacccacaaattacacgttttttaggaccatataaaggtcaaagataccatcttccacaatttcaacgaggtagcaaacctactggctataaagaggtattcaaccaggcacattcttctctttgaagtgttattgaaagaaattttgtgtatggaagaaaagatggaaaatattaagagatatgcctagttatccataccagaagcaagtaaaaatagtgattgcaccaatgaccttgcataattacattcgaaggcatgcaaaacgtgatcgacatttgagaaaattagagacaatccagattattgtgcaaataatcaaactgatattgaagatgaagatgagaccattacaacttcaaatttaaatgaaatggacaatatcagagatatgattgctgcaagtttaatgggacataattaaaatatattaatatgtattttgtcatattaaattgactgttatgagcaaaatttgtaataatttaaaattatttaatagataatatttat

SEQ ID NO: 108241 - DNA, 587 bp, Cannabis sativa
ttttacatatgacataaataatacgcttagagtttaattgtaacgcccgtacttttattaaaatattaattttatttacaagcgttaaacgtaaaaaatcataatgttgcatttttatttaatacttgaaaatattcataactggctagtttttgtacaaaagataaataaataataaataaataaataaaaataattgcgacattaatttaataacgtaaataaataaaacaaagtgccctagaccggccgcaattatatggccctcagtgagttcacacacacaaacatccaaagttccactcgccatcgacattctagactttcagttaccttggtctgcacatggtaatttgataagggtgagctactaaacccagtaagaaaatgtgtgtcagatagtcacataaataaaaataaaatacaactaaaatgtacatgcacatatttacataaatagcaatacataacttaattttatcactagtaactaataaatagactctaagctaagtcacataataatgattacgccggagtccgactttggcaaataaacctgagctattggactaaatggtagaggg

SEQ ID NO: 108242 - DNA, 700 bp, Cannabis sativa
gggatgttagaatgtttagatccttcttatagtcaggcagttgggctaatgcaagagccctctcgtacatggcaagggtgggggaaggcttctgaagttggtccaccatttggaatttggtgtgtttagtcccaatgtccttcaccaaaaaatagagagttttgaaatcatgttccttcgacgacttttctataccatgaaggaatttaacattcctgtgtgcatgctgaaatccgtaatatcccgaccgatgctcgctgctgttcggtctcagatcgaagagatagtgaacctcatggcctgtcggccacttccatctcatcaacttatataaaaaaatatgccggtaaggactcgcatggccaagggagagaactgccccggactaattccaaaataatcagcgacatctttgaaaaaattatgaagggggagtgccccccataagtaatatggcgatgggaccatgcacacagtccctctccaggatcatgcgccaactgatttggggaggggagtgttaactggcaatccttgccattcacagtcatctcctccacatattggaattgggtctcgctaagactgctagagggggccacggagggggtctgctttgttttgcaacgagaagtgcgaacctccttaatcactctcggggcaaactctctgattttgagagtggctggttgggaaccct

SEQ ID NO: 108243 - DNA, 627 bp, Cannabis sativa
ccttcatttggttactttcactacctcgccattttttcacaagatcacttttgagagaaacatttcagaaaccatagatttcttgttacttttccttcgccgttgtcaatccactttataccgccgaccaacgccgacccccagttctcaactttcatgtaagttttctggacactgtgccttttaccgtttgtttgcatgttaggataaaacttcttggttgaatgctggatttctgggaaataactctgactgagtttgttgtgtgatgcatagaatcttctttattttagtctttgttattttcctccattcttctttagaatcgacccttctgtcgaaagactgtttagggcatggggcgatttttattccctcattctgcgtttctcgcttttcttctgctttcgctgcctttgggatttttgcacacgtgtttgctaaggaaaatcctttgagttttcatttttggcaaacatccggagggggcctctttccagcggttaggggactcccattcccttttttaacattagggtttggtttggggtctaactattggattctttcttttttcaaaacaaaaaaaaatgtctacccctacgtcaggaactaagtcttctaaga

SEQ ID NO: 108244 - DNA, 528 bp, Cannabis sativa
aaaaaaaaaaaaaaataacaatatgacacaaaacaaaattctagacaaataatgctcaattctcttttcattattatgtcaaaataatgaaaaaaaaaatgatgacttagaaaattttcttcctattgtattactttccctccaaaaaaaacagtcagaaagtcagttatcccaaaccaaagtcctcaattttatttattagtttcgtgtatatagaagacttctcttccctccctcctcaaaatctcaatctccaaaaatggtacaattccatgaacaaataattgcagagcttatcgaagaacctcccaatggcagcggcctcgttatcctctcttccggcctttctctacccaaactcatctcctctctcctcctcctccactccccatctcagggtaccctcctcctcctctctccctcctccccagccctcaaatcccaaatcctccaccaccacaacccccataaccgaatctccgaaatctcctccgaactccccgctcaccaacgcctctctctctactc

SEQ ID NO: 108245 - DNA, 576 bp, Cannabis sativa
tagggcataaaacccaacaaacatttaccccacaagccttgtttggtgatgaagcgaacaaggcttgcttagatgcctccggttgccttatcagcttccttgcacgtgcttcgggtgcgtggtgacatattaatgaccattattactgcagttattcgctttttgcaggcgtcgattcgtttcttgtccatttattgatacggcgcattaaatgggtgtcagatgggtactcaaacgttttctaccgccttgatgagtgtttaatccaaccgttggatctttagaattcgaatcgattgccatcctgaccgtacgatggtggctgatcacagctgtctcacacctgtttttgcctataaaagccagccttctcacttcatttggttactttcagcatttcaccaaaatttctcaagagtttttcagagagaaaagaaactttaaacaccattgatttcctgctattagtccttcgacgttgccagtctacgttctaccggcgatcaacaccaactcccaaccttcaaacttcatgtaagttcttcgtatctcgtacacttgcttactgtttgttta

SEQ ID NO: 108246 - DNA, 686 bp, Cannabis sativa
  modified_base (303)..(309): a, c, t, g, unknown or other
ttggactatattgagaagaaaagagaaataaggttatatttaaaaattatgaaactttcaaagttaaattaataatatatttaaattattttttatttgataattatttataattattaaattaaatttgacatttaaatagttttgatttaattaatggtaaaataaaatggcaaaaattaaatatgggccaccatatagtgatttcaaccaaatgtatgttgttgagcctatttatcttttatttggtccatttaattaatggatcatttcacaaatacataaaaacaacaaaaaaattannnnnnnacggtttcatggaattttaaatatttttacgatttttttattttatttacaaaaaatatagtctttttatgttgtactcttattaatttattaattttttattatctgtatgttattttttgttgttatttatatgttattttcatgttacttttatataatattcttgttattttcgtgttgtttttaagaaaaactgtaaaaaatatataaaaaaaaatatttaaacgtaaaaatatatattttttttaataaaaaatggcgtcttatgtaattattcttttaattaagcctaataaacttaatgagagcagtataaaaggaaagagatgaaagattggttagatcatctcaatttaagccaaaatttgacaacg

SEQ ID NO: 108247 - DNA, 678 bp, Cannabis sativa
  modified_base (353)..(374): a, c, t, g, unknown or other
  modified_base (441)..(443): a, c, t, g, unknown or other
gaagcattggaacttcagccagatttgtcttatgaagaacaaccggtgcaaattctagacagaagagagaaactcttgagaaacaagagaattgcactggtaaaggtgttatggaggaacagtaaagtggaagaggcaacctgagaactcgagacggttatgcaacagaaatattcagtgttgttcaagtatatttcgggacgaaatttctataaggaaggggtaattgtaataccctaggattaagagaattgattagcaaaaccataactagttaattatgtattattgttgaattatattattatataatttaatatgtgataatttatatgatttatgacatgttaagnnnnnnnnnnnnnnnnnnnnnnattttagtaattttgacccaagaatggtaaaattatgaaattaatatatttacgtgcttatgggacnnnattattatatagtatgcctgtgttgtcttttaaggtgtgttctgataagttggcgcggtatagtcacaatcgggtatttcaggccgaaccaggttcagggccgaaatacaattttgggataaattattgaagttttatttatgtgtgatgaatctaaaattatttaaatacgtgttacatatgaaatgacttcaatgcccttaattgtttgagtatgtgagaaatggccctaggg

SEQ ID NO: 108248 - DNA, 694 bp, Cannabis sativa
cgaccgcggcctctaccgcgtccacgggggttttggggatttctaccaccccgaccacctttgatctcaaccatttcaccctgccttctgacgtttcactgggcgtccattattaggacttagcctgcgaacccacaaggcatgcaggtcaaacagtggtcaaaatattttcaagaccgcatttagggtttttttttaaaaaaaaaatcatcaatttactcatatatgcaatatatcttaaaacaatttgtagaaaataaagcttacggaaccgtgagttgagctcgacactggccttcattgtagatatcttgacggtcttcagtgaacaacctagtggctctgataccaaattgtaacgcccatatttgaaactaactaaattctaagttaattttataatataatcactttataaacatatgggtcgggatcccgaatttcaaaatacagttaaaagtattattatcttattttttactaatacaaagtgtactagtatatttttttgcaaacaacaggcaactaaattatatttcaaaatgcactaaagtaccaactctgtactcgtattggtagagccattatagtactccgaaaagttagtaagtgttgtaccacatgcacgacgtaccccttggtactcgtgttggtaacactgtaactattttaaaacctacactatactaacacc

SEQ ID NO: 108249 - DNA, 561 bp, Cannabis sativa
aaataaaaactaaatattatcttatatatatattatagagacaacaaaaattatatgtcatacgacaaaatatatatacctacaataaaaaataaaacaaaataatgtaatattattataaaaaattggatataccatattaacaaaattatatacaactataaaataattatactatacttgcaaaattatatatcacctttatatataataaaataaaaattataaacatgcatgatctaaaataaaatgatataatatacaataaaatttatataccatataacaaaaaatatataccttacaatcgaaatatatataataacaatacataaaataaaaatatataggatactaataaaattatatatcatgtcaacaaaagtacaataaaaaataaagcttaaatattattttaaaaaaatgatatgccgtataacaaaaaatatacatactattaataataataaaatatatattactaatatatatgtatatttgtatatactaaccaaattatgtaccacaattaaaatatatatcataacaaaattatataca

SEQ ID NO: 108250 - DNA, 605 bp, Cannabis sativa
  modified_base (215)..(216): a, c, t, g, unknown or other
aacaaatttgaaaaaaaaatgatatggttagcaaatttttaaaatttgaacaagattatttaaaaaaaatattttaatatctaagtaagatcattcaaacttaataaataaaatgtaatatcaatatctaatattaatattataattaaaataaataaaataatcttaaatttcaaaattaaccattagcctctttttgtgagaaatcaaatttnnaaaattcaaagcctactaatatgtaaaactaattttaattaattaagaaattaataaaaattaatcttattctgagaattagatttttaatttaaaattcagattctacacaaaattctaccaaaaaatgacttttgtttcaatgaaaaacgatttttgaatcataagatatgaagaaaacaagtttgaggcacaagggtatgcattgtatacccctgcgcgcgcagaatggcatatttgaccaaaacaggaggctgtgtgcagtctccatggccgagaaacatgggcatgacaggggcaagcttcagacacgcctttgtctaaaggagttttgtccgagcgagcctcaccgtgtcccatgcgcgcgcgcgagtgtgcattcaaaccct

SEQ ID NO: 108251 - DNA, 855 bp, Cannabis sativa
tctgggtacacgatcgtgtctaggttagagtttcggtctcagttaaggtctggggctatgttcgagttctgtcctaggtctgggtctgggccctagttccaaatcctaaaattgggtcttggtcttgttcaagtctaggtcttgggtcgggtcttgggtcccgctccttgtttcgttgccctggtccctatctcgattatcggtctaggtcctagctttggtctaggtttggaacccctggtgtatagggttcaagtttgggtcctagtcgcggtttgggtttgggtctcagtctggttttttatttgggtttttgttcgtgtctcagtcctggtccttgtcctggtcctggtcgtagccctagtctgcttccagttccacttgcgattctgagctcaagtttgggttcgagtttgggtctgggttccttttcgtctcggtgtttgagttcttgtctgagtttgggtttgggtccggatctttttctatgtttggatcgggctccgggtgtgggttagggtcctgggtcttggtctaggttcgagtgtgagtcctagtttttgatctcgatatgagtctgggattacttccgggtctaggtattgggtttcaatcccggtctgggtttaagctcagatccaggtgcaggtcccaggtttgggtccaattttgggtgtgagtccaggttcgggtttggtcgtggtatgggttcgtgtctaagttcctatccttgtttgggttcaggggaggtttcggctccatgtttaggtctgacttcggattcccaggtctaggtcaagtcctgggttgggttcgagtcctggatttagatttgggtctgggttccggggccta

SEQ ID NO: 108252 - DNA, 566 bp, Cannabis sativa
tatttaaatgtttaaaaattataaaaaaataaataaaaactaaatataatataatttttattttttaacctttatttctttcccattaatttttctttgaattgatattgaactgccattatacaaaattataataaaaagtgtaatgaatatttattcagttttatgtatccactaaaactgaatatataatcctcaactaggaaaaagactcagtaccatatcattgagatagagcaatcagcagacaaccatgccatctgtaccgataaatcatatttactgtacgccaaatacaattatactataaactatatttttgatttctgggtattttccaaagtatggcagtttatccattaaaacgaactcaaactgaaaagtcaaacccagttaaacaaacaaactaaaatcagatttttaacaaactaagatcaaaaattaattatttttttgaattattaaacctaaacaaacccaaaattcttcaacaaaatattcataatttatacaaaatttatttaacacatacactaaaactaaacaaaccctaaatttcagatcta

SEQ ID NO: 108253 - DNA, 642 bp, Cannabis sativa
cagccaagagaaagaaagaaaaagaaagggaaagaagagaaagaaagctagagagagaaatgagttatgctatttttctttgaagatcaagtggttgattcttatccattttaactcaaattttgggtggtgaatccttgcaaggtgctcttcaaacttaccagtttcgatttggcgattgtactctctaaggtgctattctataatacccacttggtgagacccaaactttttttatttgtgtatccatcttttgagatgatgatgattgtattcatgatccaagattatttaatcttgatgttgttgtgaccctctacttttactagagaagaaatttgtaatcccattattaaactttggtgatagtgaatgatttgagtggactacaatcccatgggttttccagtattgggtttccacgtaaaaatcttggtgtctcacttttatgcttgatttgtgtattttatattgtttgtggtgttttgattgatatttgataattacttattgcagtgtttgataagtgtcccattttttatatacaaaaagggaaaatattgtggttaattgcaataggttttcccaacaagtggtatcagagccaaggttgattggtgttgaattcttgtgtattgaaaa

SEQ ID NO: 108254 - DNA, 606 bp, Cannabis sativa
gccggagtagctgctagcgtcaaaaaagtggttagaattggcattgtcaacagaaaaactaccaagaaagtggtttcttcatcaagaaacctcctggtgattttttcattgattttttcagcgacaatgccaattctgacgaattttctggcgccggcagcaacttcgacgactttttcgacaccgacctctactccgacgacttttccggcaccgacagcaaattccgatgacttttccggcatcattgacaaataaaacttcttaaataaataaaaatattaaatatgagatttgaaaacttaattacatatatatggtatatcaaataccataaaaagacctaaaaataccatataaattgatcaaacttaaatgtgtcatatttatcataagaacttttaaaatcccatagtaagtgtaattttctctaaaaaaaattaaacataaaaactcaaattttcttaatattatccatttataggtaatattcttggttttgagaaattcatgggtcacttctttttttttaattttttattcaaaaataacaattgttttagctgaggttaatccccaatctattagatatttattgttttaacc

SEQ ID NO: 108255 - DNA, 654 bp, Cannabis sativa
aaaacttttcattccaggacagcatggagccataaatcctcctcagggagtaggtcatccacaagctcctagaatacaagctccaaatgcacaagcccttcagggggaacagatagctccaatagcaacagtagttgtagccctcagtcccaaaaatttgtaccgtccaggagttgctttgccgatcttagatggtcatgtagcaaccctttctagtagacctaatatttttagaagcatctaaatgcacagaagagggacttgaatgagttaaacaaaaatgaagcttcccccctggtaaaatcacttgcctagcgtccaaggttgatgaacttaccaatgcctttcagagaagatgatgccagccatgtgcattttcctcacaacaaccctctggtgatagaggttcagatagcaaacaaaagagtttcgaaaattcttgtggataatggaagctctgtaatataattttcaaaggagcctttaaagctattggtcttgtggaagccaacatgttgcgatgtcaaattcaattacaaggcttcaacgagacacactgatccccatgggaaaaatacaacttccaatgaaataaatggggaagttcttggaagcaatgcagtgtcatcattcaagtacaacacattcataata

SEQ ID NO: 108256 - DNA, 506 bp, Cannabis sativa
aagaatattctgagcaggaggatgaggctgaggtagagcaagaaagaccgctcaaaaggaagaagaaacttccggtcgggtacaggcccatcgaacatacgatccagatcaaggagcccgatctacctgctcggccatccacccctgtagcaggaaaggggaaagccgtcctagaggagcaagaagactcgtcggatgacgatgccccatcagtgcttgttcgggcagatgcccctgccaaagtgcagggtactccatcttttttttaaccttcttaattatcatgccttcatatttctcatgcttttttctaaccatgttacttttgctccatgcagacatgtctcagaaaatgctcgacgctttgaagaagagagtggtaggaagctcgggcttatctcctccggccaagaagtccaagggtggttagacggccccgtccagatagaaggcaccagttgaagtagtcattaatctctctaaggaacaaactgctgtggaccctc

SEQ ID NO: 108257 - DNA, 684 bp, Cannabis sativa
caacctgggtgtagggctagggactcctcccaggttgacttgctatgatttgagactactcaactctgggatgttttatttcttgccacgtattaaacattgatgtccacatcatcggggctacttttggtgtaaacaactatatttgaaaaaaaaatggctttgtaatatatttgcatcaatttttaacattgtgctcttatgtacaattgcaaaacttgatgtaaaatttaatatttttttattacaagtataaaaaaataataactttatcattcattttttaatgtaaaacaataaaactaaattaacattttagttaaatatagtaataaaataataaaagtaaataataaagttgtgcatttatgataatgtaaggtggcgtttggtaacaattttgttttctaatttcttaatcacaaaatgaaagcaaatttttgtttttaaaaattttgtttttgaaaaacaaaaatgcgttttgtaaccacttttattttttaattataaaaacagtaaaaaaaagtgtgttctgtaaagttcattttcatttttcattttttgattttctttaagtcgggtctaggtccggggtcagcttcgggttcgagtcagatgccgggtttagcgccagggccgtgggagggggatttgggtccggatctggtcggagtctaaaatatt

SEQ ID NO: 108258 - DNA, 582 bp, Cannabis sativa
ttgatgaatggtatgggatgacaatgcaacacataagtgaactcgaacgagaaagcggctccttattaaatgaggtaaagatggttcttaactccactaaactatctttgtattacttctgattaactaacctcaagttagacgtatcttttattgtttgtttttgttttgtactatagcaaagtactttggaatttggatttcaaattagactaacaactacaccaatgtttaggattttctactaggcttctgttcatattttatttgcctaaacaactcaagtttttaaatctgcaagagaattaaaattatttttttagagtgatgattggtggttctaaatactaactctgcattgagtattttgaaacttaatttatcattattccgcaccatgttcttatagatagtaaaaaagttcaaagaaatagttgagttcataaattgacagaaaaagccttgctttgagtgtgttttttctcaccatacaagtcggtagcctcaagaatgaaccatgataaccgaaatcatgctatttcacattttggctcagccacttacattcaaaaaaattaggaa

SEQ ID NO: 108259 - DNA, 742 bp, Cannabis sativa
ttggttgttgatcgtattatcaactttgctttagactttaattttttagattaagtttctggtagaaatttactatgatcgctggaatttatgttgaccaatattataggtggtagaaactttttctgagggtctattgtagtttgataatggtttttttttttcgattgcaatttgcttggcggtggattttattgaatcttttacaatgttgataatgacgttttttttgtcagggcattgtgcagtatcgacaatgaaattgaatggtaaccactcgtgtgaaatttatggggcagattgttaccaattttataaatttgatataaattccattctgttcttaaatgatgatgtctcaccataaatgtgttaagtgtatatatttaaaaaaatttcttataaaaatgaattagataaagaagcatcttttttatatggcattgaaaggaataagttgaaaaatacctctttttttgtatctattaattaaaaatattctcatattatattttattaaaatatacgcacttttttgagtgggttgccaatataccctcactctctacttaaatctagcatataatttaccttaacctaagaggtctaatggagatatcatctataaaagtgggtatatcttaaaaaaaaatgaaaataaaagtaagaatcaaaacaagtaaagtaaagtgggtatacaatgtaatttcctcgcacctaaaatctctatgtgggctataat

SEQ ID NO: 108260 - DNA, 735 bp, Cannabis sativa
  modified_base (545)..(553): a, c, t, g, unknown or other
  modified_base (625)..(630): a, c, t, g, unknown or other
gtggcccttctttgccgattgacctgatcagacaattaccgaaaaaaggtaaaggtagagtgcagtatgtagttgtagcagatgactgctttactaagtggactgaggtcgaaccactcgcaaccattacataaaagaaagttcaagactttattgtgaagaacataatatgccggttcggactaccgtacaaaatagtctcagataatggcaagcaattcaacagccaatccttcacttatttctgtgcgaaccatggtatcttcaaaagtttctccgcagtggtgcatcctcaggaaaacggtcaagttgaggcagtcaacaaaatcttgaaggatacactaaagaaaaaacttaaagatgccaaaggaaactagccagaagagcttcctgaagttctattgtcataccgtacaactgaaaaatggcaaccagacagacaccatttgcaatggcatacggttacgaagctatgttgcccatcgaactcaagtcaccttcccacagaacattgacgtacgatcaaggtaccaatcacatactcnnnnnnnnntcacttgatgaaatcgaagaaaaacgaacaactgaaaacttaaagtagatggcccatcaacaaaaagtagcnnnnnntttcaacaaacaagtgaaagctcagaaattctttgtgggagatatggtcctgagaagggtattcttgaacaccaaagacaatacggcagatgtacttggacctaa

SEQ ID NO: 108261 - DNA, 523 bp, Cannabis sativa
aatgcaactggcctgaactactcccagatgtcctatgctgtacaggactattgagaagatgaccactaggcaaactccattttctctagcttatggctacgaggcaatgttgcttgtggagttagtgccaccgtctcacaggagtacaacctatgaccaacaaacaaacaacaccttgttggcatagtctcttgaaaaagtagaaaaaagaagaaacaacccaacctaaagctgtaggcgtactagtaaaaagtagaaagacacttcaacaaacacgtcaagagtagaaaattcttcataggagacatggtgctccgaagagtattcctgaacactaaagactcagcaataggagtgtttagacctaactgggaaggttgttattaagttacatagataactagtaatggagcctacaagctgggaaggtacaacgataacatggagctcattctccaaccaagatactggaatggagagcaccttcgcaaatactacaagtaaccggcttacagaattcttc

SEQ ID NO: 108262 - DNA, 562 bp, Cannabis sativa
ttattcatcctttttcacgccatattatattgatattttttgtatttgtaaaggtttgagagttttgttgagggaaaaatattgatggttatgtataagtgatgatgagagaaaaaattattattttcttagaatgaatgttttgtaaattgtaagtatttcataaaaaaaatcaatgaaaaataaatgaatacttgtaacaatttaagtgtggggggaataataagttttatgcaaaaaaaaagatacaagattggattgttgaggagagtgatggggaaatactaatgggaattatctgagaaaatattgtagatgtatgctatggtgtgatttgagcttaaattaacattcttatatacctttcaccctagccttattacatgggaaacttacaaaaatacaggaatttgggttaacttttacaaaaatactgtcacacgaaaatcttttcaaaaatactgtgtttttataaaacaccagtataacaaaaaaatagaacaactcaaaacaacagcagaacaactaaaaaacaccagtagaacagcagtgaaaacttaac

SEQ ID NO: 108263 - DNA, 957 bp, Cannabis sativa
  modified_base (51)..(54): a, c, t, g, unknown or other
atgtgaagtcctcacagcagtattataaaatttttcttcaaacaaattctnnnnctcatcccaagtcattacactgacatcacaagtatgccccacaatatcccactagacgcgggcatgatcttgtaacatgaaagttgcacaattaactctctcagttcccgtcacccccatattatccaggatacgggtgattgtactcatccactgctctactttacttatattagtacctcccagaaaagtcggagattgcagcttcacaaaccgttcaaacacgaaatctttatgcggcattaagaacccctagttacccaccactggcacaggtgctggtggtaacacttgctcaagaggagcagtcggtgtcgattgccttaattgacttaactctttctcttgacgaagtatgatacctcgtatttcttgaaacatctactgccagtcagcaggacgattagcattaccaacccctacattatcccctggattctgcggaggcgcaggcggtgccggtggattggtttggtctacaccaggctctacttacttgccctgtggtttagataattgcggagggtctatttttacaagtacccctataatcaacatccccagcaagttaagcaccaataccacacttatgcacttattgccttaaaccctaactatttacttcatataaataaacacttaacatatagcattttaagcatggcatcatatatcacataaacactctctagatgctcgcatactgcctaaaatagaaagcggtaaataaatgatcacacaagcagtaaagcatttactctcaacacttacggtaccatgagtcgagcttgtctttgacgatgattgtacatgtttggcaggtctacaggaagtttaaaaaccttggcgctctgataccaaattataatgccctaacttttaggcacgttacccaagataatt

SEQ ID NO: 108264 - DNA, 591 bp, Cannabis sativa
  modified_base (468)..(498): a, c, t, g, unknown or other
aaaccagtttcttgatgaaaaaattagtttcttaatgaaaaaactatcaagaaaacaatttcgtgatgaagaaactaatttcttgatgaagaaaccaatttcttgattaaaaaaataagtttcttgatgaaggatctttgtgattgattttgatcacatgagaaactaagcaatttgaatttcaagagagagaaaaaaatcttgtatggctgtagagatagtttaatttttgtgtttttttcaagcacctctgttttactgtaacgaggttgcttcatttttttattgtattttttattattataagtttgtcatattatctttttattgggttaaaattggatttattagtttttttttattataaattttacttttatataatcaaaaccagtttttgaatgaagaaactagtttcttgatgaagaaaccaatttcttgatgaaaaaaatcagtttcttgatgaannnnnnnnnnnnnnnnnnnnnnnnnnnnnnngaaactaagcaatttgaatcgcaggagagagaaaaaatcttatgtggcgggagagagcgtgatcctattttgaaaaattgattatctttttaa

SEQ ID NO: 108265 - DNA, 684 bp, Cannabis sativa
  modified_base (441)..(447): a, c, t, g, unknown or other
tatatgaatttggatttaagtttataatcagatttttataattatccttagctgattttaattcaaaggagatcatttaattatattcaatttacaaaaagtaagaaattaattaaaaagaagaaaaaatatcacattttggtctcttctctctctccccttcgaaacccttggggaaaggcaacatcttgaggtgttttttagctggtttttactggttttaagttgattcttggaggatcctttgaaggtatagctttagtaaccttctctttagtttccttttgttttagagtaagaattttgcatgaattattagttagggttctgtggtagctgtttatatttgatgttgttttcagaggattaattatgctagataatgatagtttgagcatgaattaagggctgttgataagtttaaccaagttttgagttttnnnnnnnaaacttggagctttaatggtgaaatttgattctgagctttgattgttgttttattgcttggaaatggtttactggggtataatatgcaggtctggaaagtttgcttgggtttggaaatgatttggtttggctttgttggtttttgggttttttgggtaaaaccggttacctagattttgcagcagggaatcccaaaaattcagcttgtcgtttcgcgtcagtttcaggtttctagtt

SEQ ID NO: 108266 - DNA, 639 bp, Cannabis sativa
  modified_base (479)..(490): a, c, t, g, unknown or other
tagtcataaacactaaacactaaaccgtaaaccgtaaaccattaaaacttaaaccctaaaccctaaaccccaaaccaaaaatcctaacccctataccattaaaccttaaccctaaacccttacccctataccctgaagcctaaacccttaaccttaaaccctaaactctaagtcataaacactaaatactaaaccctaaacactatataatatacaataaactctagtcctctaaaccgtaaactaaaaaccctaaaccgtaaaccctcaactaaaaaccctaaaccctaaacgctaaaccttaaaccctaaacccaaccccaaaccataaaccctaaacccttcaacataaagtctcaaccctaaccttatcccctaaacactatacccgaaaccctaaaccgtaaatcatccacactaaaccctaaaccccaataaactttatgttgggttttgtgccctaaataaaacccattacnnnnnnnnnnnntatcaatctaagaaatttgaagtggtttatgtttgcatgaatttttcatgcttatggtttaatatgtttaatacatgcacaaaatctgttaagtcctacacatatatttattcacaattacagtattgttaacacagtggaatgtgatt

SEQ ID NO: 108267 - DNA, 903 bp, Cannabis sativa
  modified_base (874)..(877): a, c, t, g, unknown or other
catttagaacataagtggtaaatgcttcctccaaaagtcatcaacctttctaggcaccacaaacaactataaatcacaaaaggagacatgttcgagtcaatgtcaatattcaaaacaaaaaaatgttaaaaggttaagacacatgaaccactaagcataatgtaaaacaaaactaagcatttgccatggttcttcacattcattcgtagtaccaaggtcaagtatctcggtagttgcttcctcaataaaagtatattcaagttgctcaatcctctcaccatcaacatccaaacccatgtgggcacgataagtttcaatttcaccagccacatcccaatcttcattctttccatcctggtactcgatcattagttccccacgagtcttcataacagtagtcaatgcaacttgttctgcctcgcaagcaaggtcctctgtccttttcttcttatcaatcaactctttcttcacctcctcaagctcacccttcaaagatttaatggtttcttcaagttcacgctctttttctacatactttccattctcaaattttaggaaagcattatcaacagttaattttttgttcttcttctccaacgcatgatagttttcccaaatgaacaacatggcttgaagaatctacaaacattataatcaagttttaataactaaagaaaaataatcaatcacagtttacattacaatcaataatgaccttaccttgtaaacatcagccactccgttgttggcaaccccaatcggaccaagcttaatcattcgtgctcgattagtgagatggagaattccatctacatgcctttcaatcaacgaagggttagaatagacagatacatgttaggttttatgccctaannnnaactccatttcaatgtaatctatttt

SEQ ID NO: 108268 - DNA, 500 bp, Cannabis sativa
tgcaagctagaatcaatgaacaagaggaagtgattcggcaattaagacagtagggtgctcctgcagtccctgctccagaaataccagtaactcatgcccctgctgtgcaggccgaacctgttgttgctatgaaccggacggaacccctatatgaaaggttccgtaagcaggcacctccagtttccctgggaggtcccgatgttatgaaagccgagcaatggctaactgtgatcaccaggatcttgaatttcatgggcgtcactggtaatgatagggtggcctgtgccactttttaatttcaagaagacgcactggtttggtgggacatggtgtccatgattcacgatgttacgacaatgacctgggaaaagttccaagaactttttaatgctaagtattacaaagaaaattaagaagtgctaagagaaaagaattcactcaactgactcagaaagaaaatatgagtgttactgagtacacaacgcaatttgaccgtttgg

SEQ ID NO: 108269 - DNA, 672 bp, Cannabis sativa
  modified_base (451)..(459): a, c, t, g, unknown or other
  modified_base (545)..(545): a, c, t, g, unknown or other
aaagtgacataaaagtcatcaatcagtaaattaaataggtttgaacaaaattaaaaaaaaaaaataatatacacagtaaaaaggtaataattgccgtgtaacagtaaaaaagaaataaaatggataatattagtacagggtgtaaatttccctttttttttttgcatttttacgaaattctacatagaaacccatattgtaactagtgctgcaatctaaattgcaacaaaaaatcgtatagaaatccctattgcaactagtgctgcaaccaccttagaaacccaaaccgtaaatttgaaaaaaaaaattacaaaaatagtatatggagtaattcccttattttttttctataaaataactttttaaaaaagaaagaaaaactatattttttcacacgttgcatagaaaacccataaaatgctcgtttggtacgccgtataagggtcgtatnnnnnnnnntaataaataacactatgtttgaataaagcaatacattgtattaattattacaaccaaaattattaatacaatgtatgttgtattanttaatacataacaaatagtctgtattagcttgtattataatatttgcaaaagattcagggtcaacattaatcttcgacctgaacccaagacttgggacccggacccagacccagacccggacccaga

SEQ ID NO: 108270 - DNA, 567 bp, Cannabis sativa
  modified_base (348)..(352): a, c, t, g, unknown or other
cctcaacaaggcgtgccccgaagattgattttgctccctcacatcaacatgcttgttgatgctatggctgggcaggagctccttagcttcatttatgcattttctaggcacaaccgaatccttatgcacccagatgatcaagagaagacatcattcatcacagaatgagggaccttctgttacaaggtcatgccgtttgcactaaaaacgtcagtgcaacatattagagattggtaaatcagatgtttgcagacatgctagggaggtcaatggaagtatctattgatgacatgctcgtcaaattgctagcagcagcagaccaccttaatcatctcgaacagtcattcnnnnnacttgaaaaatataatatgaaactcaaccttgcaaagtgttcttttggtgtttccttaggtaaatttctaggatacttggtgacaaagcgatgagtcgaagcaaacccagatcaaatacgctccatacaaaacattcaatcaccaaaatcaattaaggacgttgttatgaaaattatgtttattacgcaagtatacgcaatcaagtagtatctca

SEQ ID NO: 108271 - DNA, 560 bp, Cannabis sativa
atataactatttttataattttgtaattagcacatagataacaatgtatattaatatttaagttttgatcaccgcgtcaaaaaaaaatatttaagttttaaataagaaattattttaatagctaagatttttaagaaaaataattacattatcattaatcctcaaaataattaaaaaaaaataaaaaaaaaaattaagtttttaatacaatattggaaagagtatataatatagataaatttttacaactttgttattattttttttatttaatatatacttcaagaaaaaaaaaaataaaaattgtttgacttcaaaacatttatacaagaaaaatataagtcgagtcgtaaagtagggaagcaatttatgtcacaatacgaatgtttgacatgaacccgactcgatattttatgggtttcacacgatgacacgaaaattttgctacttatgtttgtgttttatcaattttttatgctacgggtcgtgttcgtatctaccatctaaattaaattttaaaattaaacataacacagacatgacatgatgacattaaaatc

SEQ ID NO: 108272 - DNA, 633 bp, Cannabis sativa
aataatagcatttaattgtataaattagttagtagtctaaattttgttagagggtatttttttaagcatttaaaatgaaattttccaaaaaaatacatataagttataagaaaacaacatccaaacaacaacatagcaaaataaaaaataaaatacaaataataaataattaataataaaataacaagaatacaacataaaaatataccaaaaacagtattttatgtaaataaaatctaaaaaaacataaaaatattaaaaactctatacatactatatttttttaatttttttttattttttttttatgaaattatcccttattttaattattttttatgaaattacactttatatttttttttcttattttaatttttacttgtttttattattaattttttaatttatacctaattgtataagtcatatttttattatgtgcattaagaattctaattttattaaattatgtgaagttatatttaatattttaattataaaaaagagtatttatcaattaaaattattttataattatatttaattaatatataataaaaaaaaatagttctcaacgcttaaaaaaaaaaacacactaacactaactgtgctataacgtgaggcccattt

SEQ ID NO: 108273 - DNA, 688 bp, Cannabis sativa
actttgacttggtaagaaacctcccgaaactagggaaaggtttcttcaaagaaaatatggattattgaattatctttctaaaagtatgagaattgctgaaaaataatagatatcaaaagagatatcacacttttaccgatgcaatatcggaaagaaataaaaaaaaaaactgtacttcgacaatcagcataaaacatgaattttttacatcaaaataatcagaattagggaactgtttcttcatgaaaaatgtagatcattaagttatctttaaaatggtacctagatcactgaaaacagacctatggagagagagatatggtagttttatgaaagcctatttctctgaaaacgaaaataaaaacacaacgaattttacctaaagattttgaagacacgaaacgatgatcagataagagtggttgattgctaccctgaagctcttaagattagaacaattgatttggtgcaatagagaggataaaatttttgagagatggtgagaatacgatatcgtataataggtttaaatctaaaataaaaatctaactaatcagataaaaattatgccaataaaattaaattttgaattttaaactaactaatttgattcctcactatttatttatattactattatatagggatatgattttgtcccgtcatgtactttcatggaatgtattcc

SEQ ID NO: 108274 - DNA, 540 bp, Cannabis sativa
tcttgattttgttgatcaatatagcttttagcatgatcacaaatacatgaaggaatagagagaatggaattgagttcatcccataaggatttgagttgagtaaaatataataatacagagataccttcttgcttgaggaattgattgcttcaattgatatattttaagagcattagattgagaaaaacaatccttgagatcagtccaaatttgtgccgcagtttcagcatacaagatacttagacgaatctcaggagagactgcattaagaatccaactaccaactaggtcattacaacgttcccaatcggaaatatcattttgttctttgggaatgggcaaggatccatcaacaaaacctagtttgatttttgcacgaagtgccattctgactgcgcgacgccatgatctataattatctcctgtttagagcggtgtaacaaggactgttgcaggactatcaaaatgatgaatagcgtaagggtcttgtttgatgtgagaggatgatattggaggagtggaggtttgattattatctga

SEQ ID NO: 108275 - DNA, 806 bp, Cannabis sativa
  modified_base (515)..(518): a, c, t, g, unknown or other
gggtatgggggtgaatttaagaagtgggtatgggggttggggagcaatccccgcacccgccccgccctatttacatccctaaacatgatttgaaaagttgatttattttttgaaaaatccgtgtacttggtgatattatactcttgactaattttaatttttgctttaaaagaacatgtaatcatattaagtaattttctagtaattgaattgatttatgtatgctaattgtgaaatgtggaaagttgtttgaaaaattctagaacttgtttgcttgctatataaggcgaaataaattatgcatgactagaaagtgatttaggcatttttttgaattgatggtgtctttcaagccatccctgtaattttatcctagttaccctttttttgagccgtaacttatttttttttctctacacatatgagcctagaaaagataaacccatgaatatccacaagttaaccctaattataccataagtagatctttagtttgggggagtttggatgggaannnngttgtatgtgtgtgaaaaaaaaaagtgtgaaaattgagagagaaaaaaaaattagtttgacaacaacttgagaaaaaagaaagagaaatctgacaaccagtgtcaaatctagaaaaaaaaaaaagataaatataaagttgttgcaactttggtgaaaaaatatatctctcatgtaattagaaaaaggtgtattacaattgtgtgaaaaatattttgggtgacatgattggagaagcttatggtatagtaaagcctaaatgaccatttcaactacctttaccctaagcc

SEQ ID NO: 108276 - DNA, 750 bp, Cannabis sativa
gacatggaagtattgcttctttttcttccatagttcgggggggtaggatgttcgggtttatgattgtgtataatgctcccatgtcaaaaaatgcagctacttttattggtcttgagtattttgttgggatgacttgtatttttgcaatcaggatcggttgaccagcagtgaatgcatgcatgttgaagagtccaccatatctgtcatcgtcggaatcagaactcagttgtaatgcacacatattatttagggatatttcatcttcgactgagaagactgagtcgacgtcactatcgaagagagacaccccagtggcgtcttctatgtgtgttatcattttggcagttttgcctttcagacattgttttgcaaagtggcccttttttctgcacaagaaacatcgatttgatgattttatcagatttttcttttttcgaaggaatttccaaggagttttattctttgaggacctatacttgaagcttttcttctttttgcccttccgctttgagcatgagcatgtgtctttggtagaatatttgattgtaagaccgtcgagttgttttgtttgcttcatgtactcttgtaagtacttgttttgagagcaaatcttttctaaggctctcgccaccatttggaataattctccaaaagttgtgttttgcagcgtcctgttatttgcggaaaggagtctaaatgttttttctccgagtagttctggaataaacgccaagaatgcttgtttgaggt

SEQ ID NO: 108277 - DNA, 510 bp, Cannabis sativa
tcatgaaattgatatacagatggtaattgatggaagtccttggacctttaataaggttcctctaatattccaccgattgaagagtggtgagaatccaagaatggttcatctgcacaaactcgacatgtgggtgcagattcataatctcaaaactgggttcatgatggataaagtggtgcgtagtgcgggtagttatattggaacttatgttaagtcggatcctaagaactttgttggtgtttggagggattacttgagggttcgcacgacggttgatatcgaaaaactgtaaagcgccgaatgaagttgtataaggaaaattgtgaatggatttgggctatgtttcaatatgaacatctctcaacattctgttttatttgtggcatcataggccattctgaaaggttttgtgctaaacgattcgatcaagatattgatcaaatcgttaaaccttatggcattggaatgaaggcacaactgagaagacgacactaccagatcggtacacag

SEQ ID NO: 108278 - DNA, 772 bp, Cannabis sativa
  modified_base (626)..(626): a, c, t, g, unknown or other
  modified_base (690)..(694): a, c, t, g, unknown or other
aagagatttaataattgtttttaaatattatattttttttaatgtataataaataagtaaatatgatgttagtacaaaagaattattatagtcctttaatcagaataattttttttaaaagttgggttggagcaattttagctttagctgtagcttctctaaaaattcttcaaaaagctgttttttactacaaaaatcaactttaagctttttcaaaagctgtgccaaacgagctcatatactatttctaatttagtggtatatatatatatatatattttttattaaaacaacaaattaattttacatttaagtatactaaatactgctacaaaagtcagaatttacgaggtcctaaaaatacttttttcgaaagaccgttgctaaaacaacttaagtaaatgtttaaaaccgtcgggaaaaattagtattcccaacggtttataacagtaattacaggaataggtgacaattttaattgaaaatcgtaaatttattggaaccttatacccgacggtaaacggttttaccgtcgggtataagggcctaataaaaaatcgttacctacttctcgccacattttccacgtgcccacctacttcttttctatttcccacatgcccacntatttcttctccatttcccacaccctaaaacaaaaatattcttaactctccaaaaccccaccannnnntccgcaccatcgccctcctctctcactgtcttcctccctctctcgatctccctttcttctcgtctctctcttccatcg

SEQ ID NO: 108279 - DNA, 539 bp, Cannabis sativa
ccattactattaccattatattccactaaattatacattccctaagcttgtataattttctacactattatttactaataagaaaataagaagaaaaattaaaaaaattagcaaacaaaattgaaataaaaaaatacaagagaaaaaagataggtaaaaaaatagcagctttttaatttttacatttcaaaacagtttttttaacattcttacagaatttcacatagaatcccatgtagcatttagcggagcaacctaaatcgcaaccaaaatccacatagcaactcatatagaaactaccagagaaaccatcggagcaaccaaaaccgtaaattttaaaaaaataataaatagtatgaggtaatgagagtttttcatttttacacttaaaaacagttttttttttcgtatttttacggaattcaacacagaaatccatatatcaactaacagaacaacctaaattattactacaatctgtataacaacccacgtaaaaaccacgggagcaatcgaaatcgtaatttttttttttaaaa

SEQ ID NO: 108280 - DNA, 624 bp, Cannabis sativa
aaaatctcatacatatttaaatccataaatatgtaaaataataaaaatactctcagctaaataaaattacaaaaatacccttttggagtttgcgaatattacatgcacacacacacacacgcacacacgcacacacacacacacgcacatgcacacgcgcacacacatgcatattggacaaaaaatgatgcattttacaatatttatcaactcacaaaggcatgaatcttatattgtagtaaagagattgtgaagaatgaggtcgaactcatgagaatcgcatgaaattaaagaaaatacttatttaacctaaattatttaaattctaacctaattctgaaaacgatgagaattttggtaacaaaataaaatatttaacatgctaaaatgataagtaacaagcatttttaatggtatttaaaagaattattaagattttagaattcactaaagtttaaataaaaatatttataattatattgattctcataattaattagaattcaatctaattattttctaataaaaataaatttccttccttttaaaattataactgttgggttttatgccctaaataaaactccaattcaatgtaatccattttattcaacatcaataaag

SEQ ID NO: 108281 - DNA, 610 bp, Cannabis sativa
  modified_base (460)..(460): a, c, t, g, unknown or other
atatcgacatttgcatgtcgctgactaccaatgtttaaaaaggtgttcttgaggcgcgcctcaggctgaggcatttgaaaagtgcatcaaggcatgcgccttgctgagaagaagtgaggtgtacgcctcgagtggtgaggcgttgaattgaggcgtgaggcgttgaggcgtaagaggcgtgcgcctcaaatttcgtgtgtaaaatgggctatttgagccctaaaaaggccaaaattggtattttatatttagttttctgctgcctaacataaaagacttaaaaaactttaaaaacggccctataaacattaataaaaaagcccaataaaatacttaagtgagcccaaataaaattaaaaaataaaaccctagttttatcttcttcatagcagcacacaactaccgcatatttcttcaagttcaacccacaaaaacaaaaaaagcttgctaccttcttccntcgaattggtgcactgccctgcccctgccttccttctcactgctcctccattttcactgccttcctccatgactccactttattgatgccttttccgtcttctcatcatagaaaaaaaaaaccttgctggtttgctgctgccttgtccga

SEQ ID NO: 108282 - DNA, 559 bp, Cannabis sativa
  modified_base (45)..(55): a, c, t, g, unknown or other
  modified_base (166)..(178): a, c, t, g, unknown or other
  modified_base (242)..(250): a, c, t, g, unknown or other
tttttggtcaaattttttctcatatacgttatagttatttaagannnnnnnnnnnattttaagaaattcggaaaagtttaacacatcgaaaattacgttcaaacaacatgttgtacgcctaactattttattttatacgcatgtaaaatagactgtttgaacattnnnnnnnnnnnnntaaattattccgaatttttcaaaattttgtgggatatcttaaatagatataacgtacatgaatnnnnnnnnnaattagactaaaaaatttttctagatgccgaaataagttaagggtgcatcagtacatctattttaagggagtgcattgtagaatcaccatataatatatgctatcaaaaaaatatataatataataaaattatatattttataattttttaaaaatatatatataattaagtgcggatggattcgatcggttaacttctgaggttaaacaacatccaatccgcataagtgcggatttcaaattttttaatccaatctaatctgtacaagtgcgaaaatccgcagtgtgcaaattagatcaaattggata

SEQ ID NO: 108283 - DNA, 958 bp, Cannabis sativa
ttatactaatcttaccccaattccaaatttaggtgtgctggtcaacctgagtggaataattgctcggcgaattataggttcctaaatcacatcgataacaacattaataagtgacttgctaaatcacaatagggacataggttttaaatcaaaaccctacctactgcaacttaatatggcaataccctaaacgagcagggaatcaaccaactagaaacctgaaattgacacgaaatgacaagctgaatttttgggtttccctgctgcaaaatctaagtaatcggttttataagcattgtaaaatcggttagccggttttacccagaaaaaccaaacaattttaaaccctaaccaaaatgttcccaaactcaaccaaactttccaaactgcataatacactccaaattttttttttcaagtgatagaacaactacccatgcccataattaaaaaacaccactaaagagccaagcttgagttccaaaactcaaagcttgctcaatcaacaaacaaactaccaaaacatgctcaaatcaagctatataaacataatttaactattgcaaacaaaatcaaacaactacagcaagaacaggaaccaaattcttaatttcaagcaaacaccactttcttaaaactcaagaaactaaataggatcaacttaaaagcttacctagaacttaataacactcaattgctgcaacaacaagctttaaatggagaaatgcacaacaaccctagctggttttgagggtttcgaaagagagagggcaagagagagaacctttccttcaagaatgatatttttgatttcttaataaaatgagaaaaagagttgttttatctacttaatattcatcttagtattaacctaaaaaattagattaaagccactatgaaattcactaaaggacaaaatacatatgggacaaaatgactatttttcccctcccacact

SEQ ID NO: 108284 - DNA, 558 bp, Cannabis sativa
taccgtaatatctattcaattcacactactacaatttagtcttttagtgacactatttagtgacgcgcatttttgtgcgagtcactaaagagttatgagtgatttttagtgacatgcacaatgagactctaaatgtttgttgttagtctcatgtaatgtgtgtcactaaaaatatggagtgtcactaaagagtaaaaccaaaattttatctttttttattaatttaaaaaatattagcctatagtgacacacttggcgtgactggataagtatgtgccaacgctcaccgcgcgtcactatatcataattttttttaaaaaaaaaaatagacagctgtaattaataattcttttttgaaaaagctgtaattgatattttttgtttgtttgaaaaagctgtaattaccttttcaaaaaaaaaaaaaaagagctgtaattaataaataaataaataaaaagaaacaaaaataaaataaaatgtataatatattaagggtacataaaccctatctatctgtttatacacattacaagcgtcgttctccccttcttcttctcc

SEQ ID NO: 108285 - DNA, 606 bp, Cannabis sativa
  modified_base (100)..(104): a, c, t, g, unknown or other
  modified_base (556)..(557): a, c, t, g, unknown or other
tttccagtgcttttcgaaagcaacaaagttatgtatcttcactggttgagcttaaattatcatagatgggtttttacgtccttctagaataattcctccnnnnncagagtaaccaccatctctaataaattatgagttggtgtagatataaggattctaatatacgtccatatcatctaacatataggtcactttcagagatcttttttgactgtctcctaatgtaccttgtttgtttacatcttagatggctcccactcaaccgtaggagtctagttaaattcgtacatagaagtacatttaacctcttactattggttcttagggacatcttgttgtgagatattatcttgtctgaaactataagttccttctagactagatcatcaacataacaatctagtattaacacaaaagttaaatacttgcttaagattaagtaatcattaaagataccataaaacaaatttattgaggattaggtattttgcctaagtcattaacatagactttgcaaaattctcctatcttatcctcaaaattctgataagttatnnctatccatatgaatggttagattttctttcacagttgaattctaaagtt

SEQ ID NO: 108286 - DNA, 521 bp, Cannabis sativa
gagatggaaacattcccaacacttagtgtttttattttattattaagatggacaaggaagatagctcgaatctgagaagatgtaaccttccacgtcagcaataaccatctaaaggataaaactaaagaacggttgggtagttatttagtattatctcacgtgtgatttaaatgaaacgtgggaattgtccacgttttatttaaagttatatttaaatctatcccaaaataaataattgtcaacctatactcctataaatagagacagatttcatgagaaaagggacaacaattttgagaaagaatcattattattcaatatcagatattatattttgtactctaaaaatatccctaataagaaggactcgtggagtacgtagattttaactacaaaaccacgtaaaaatatctagagttattatatcttttattatttatcaatttttgtagaatatttattactaaaaggctatttaattttagttaacaaaagtatgcgttaacagttttgtgctttca

SEQ ID NO: 108287 - DNA, 658 bp, Cannabis sativa
gaaatgcgggaaggagtcatattattccgttactatcaatgtaaggtattctatacgtttatgtgtttaattcattattttttagaaaactcatatttagaatgttagattataaaattataatccaacatacatgttattaaatctagatcctagtaaaatatttctaataggctacccattacatgtgtacgctagaaaatgaaaaggagagcatcaagataggtcagcttaaaagagtgatgtggcacaagttgttagaagagtaagagtagtgtgagagtatggtgtatggtactactagtgaaggtgtggagagaattgataggaaggaagtttttggtttgcacggattagcaaagcttaaaatatttacttgaacaacacatgatagccacgaagcatcttcattggctgacaaagatccttggttatgatttcgacattcaatataggtggaaacaaggtgtctgatgcgttgtctagagttgaccatgaggaatcccatgctgccatatcagcccctacagtacttatggggattattctcttcagctgggttgtttaaagtttcaagggcgtttgccatatcacagcaaccatgttggcggccgcatgggtgtttttaagacaatttaatggttggcagatgatatgt

SEQ ID NO: 108288 - DNA, 622 bp, Cannabis sativa
gaccggtcggttacggtttttattttatgaaaaccgtaaccgaacttttagaaattataaccgtataaaaccgactgtacggtttttggcaatttttcgatttggcagttttggacagtttttggcagttttggcagttttttggtttaaccatttttttatttcaaaaaccgaaaccgaccgccatgccacaaaaaactgaattcaaaaccgaccgccaaattcggtgatgacgtgaaaccaaaaattcggttacggtctggtcggtttgatggtcggtttcggtttatcgatttttatgaacacccctagctgggatataatgtctggttcacattcagttgggatttgatgctcatcttgcatctgattaggtgcaactgaatcatgcatcatcctcctctgcctcctctctctgagtcttttacttcttggtgtctcctctaaaccttcatttacaccaacaatcacaacctctgaatcactagataatccacttaattcctgcaataccaaccttcatttattaacaataaaaaactaatttgatgcaatcaaatctaacaaaatgcttaaaaaaaagcataatcataacctaggcagctggtgcaacatctggtat

SEQ ID NO: 108289 - DNA, 527 bp, Cannabis sativa
aagaaatagttattatggcacacctctatctgtttcagtatctaaaaaaaatttattgttctattttattatgttcttgtacgtttgtaattatttcgtttcatttgaaagttttttaaaaattctaaattatagtgtcaaaataagatttaaatttttttattgcactcataattattttttttatatgcgtgataaataattgtgtatactttatttgcggtgctgtaaattatagtagaaattacaaaagaaaaattatattatttgtgatctaattttagttaaattaaatgtttaattatatattttaattgagaaagataataataagttggtaaagataataataaattgctaaatatatatatatatatatatgacggtacattatatcgttatacatatctaaattaatatttatttataacattagttaattgagtttagctatacctatatattattgattgatttttttggaaattttagagggggccagggccaccctatctcataaagtacgt

SEQ ID NO: 108290 - DNA, 1124 bp, Cannabis sativa
tatgacccgagctaaaatcgagtttgttgtagggcagctggctaatattatcctgcaatctactcttttagagcaaattagagaagcacaattgcaagatccagagttaacaaaatcccaagttagggtttcggctgggaagacactagactttacattggatgaaacgagaatgttacagtttatgaatcgtgtttgtttgcctatagatgatggtattaaaagagagattatgaatgagtctcatacgactccctactcagttcatccacggttaacaaagatgtatcaagacctcaaggccatgttttggtggccaggcatgaagaatgacatcgctgagtatgttgctaagtgtcttacttgtcagcaagtgaaggctgaacatcataagcctgcagggttgctgcacccactgagtattccagagtggaaatgagaagacattgttatggactttgtggtaggtttgcgtagaaccacgagacaatacgactctgtgtgggtcataatggacagatttacaaagtcagcgcactttttgcctgcttgaacaaacttctccattgattagtatgctgagttatacaatagagaaatttttcgtcttcatggtgtcccaaagtccattgtttcggatagagattcgaatcacttcaagattctgcgagagtctgcattgagctatgggtactcagttaaagtttagcactgcatttattccttagacggatggtcaatccgagaggactattcaaatcttagaagacatgctacgggcatgtgtgcttaactttgaaggatcatgggtaaagtaccttcctctgatcgagttctgttacaataacagatattaggcaacaatcgggatggccccttatgagcttttatatggaagaaaattcaaatctcctattcactgggatgaagtgagtgaaacaaaattctttggccccaaagctattcagagaacaagtgaggaagttaataaaattagagcatgaatgcttgcggctcagagcagacaggagagttatgctgatccaaagaaatgggatattgacttttagatcggggacatggtatttctctgaatatcaccgatgaaaggcatcaagcgcttt

SEQ ID NO: 108291 - DNA, 914 bp, Cannabis sativa
gccaagtcggcaagagcttgtaatgctggctgccagacttctaaaggggaggaatttccccctgtgaattccattttccttacttcttcaatctaattcgaactgagcttctttcaaacaaaaaaaaaagttaatataaaagttagatgacaattttaagtgtgaaattaaaaactgacttacaatcctccaaaaaaaaaactaacttacaaagtggtattcccatcaaattctcaagttgatttgcatcacgcgtgtgtggtgatcgcgtgaatcatgctgtttctctcacctcgtcttcctcgaaagtgggtgctcttttaagtacattatgcactatttaattattatcaaaagtagctactcttttttataaattaattaaatttatctccaaataaaatttaatttaaatatatccattttttataagtattatatccaaattatcctcacacactcacataattaaaacataatttcaaacataatagatttaattagaaaagttagaataaaaactattatgaagtgattggagtaaaattagtaaaataattaaaaaaagaaataaacatatataataaattttaaatgaagtaaaaattaaagacatcaagttaaaaaaaaataatatataataatgtaatttccgatttatttatgtaagtgggttgtagtttttatattatttatcaaaattaaaatgtgacactcaatattaatttacaccaacaactatagttcttgtttggtgagtgtctctcagcaattttcattatatattataacattataattaattgtcacatatatatatatatatagtagatttataatgaattagtgtgtgtataatataggaactgggtgataacaattaagtaatcaagcacacaaaaatatttaatata

SEQ ID NO: 108292 - DNA, 1922 bp, Cannabis sativa
gctttgttggaaacaaaattgaaggggaataaaatcaaggagctatttgatacaaaactagctaaatgggagtattacacaagttccacaatagaaggtcgcttacttattgtttggagaaaaagttttgctagagttattatcattgttgaatcttctcaacatacgcactgttttgtcgagatgacgggttgtgataaagctttttgtgttacttttgtctatggtcacaacacaatagatgaaagaaaaagcttatgggaggttcttgatcaaaccaaactgccagtgaaaccttggttgattttaggtgattttaatgcagtgttcaatgtggatgatagagttggaggcaacccgattaccttcaatgacactcaagactcttctttatggttagcctcagctaatgttgaattcttaccaaggttaggagctaattatacctggactaataatcaagaaggggacagcagaattttttcaaacattgatcatgtatttgcgaatgaagactggtttgatgcttttcctgatgcgaaagctctatatcaatgggagactatttctgatcattgttcttgtactatctctaatcaagcaacaatcaagataggttacaagcctttcaaatactttaatttttggagtgaacacccagactttaaagcaacagtgatgcacaattggaggaagtcgattgttgcttaggggcttaaggctacttatttcaagctcatgagattaaaacattgccttagaaaatttaaccatgtttatattggtgatattggcaggtcttatcaggatgcaaagtccaaatatgttgatgctagattacaatctcaagctcacccacaggatcgttcttttcttgctatggaaaaagaagcagcatatctctttatttgtcaggaaaaaatgtatcacaactttttgaggcagagaagcaaggtcacttggcttcacaaaggagatgaaaacacttctttttttcatgctatgctgaaaaagagaaagcttgaaaatagtatcacttcgttcatcaatgatcatggtgaagttgtgaatcattttcctgaagtagttgatcattttgtgtctcattttcgaggtatcatggggagtagagatttgatttataataagttgaatgctgattgtatcatccagggtactagagttgatctgaatcagcagctgggcctcatcaagcctttctacaacaaagaaatcagagctgtttttttttcagcattccagatgttaaatctccaggtgcagacgggtatggggcaggttttttcaagaagttttggcctgaaataggagcagaactttgtgcagcaatcaagaatttctttaatacatgtataatcctgaatgagtttaacttgactcttatttctctaatacctaagattgagaatcctactaaagttgtagatttcagacctattgcttgttgctctacaatctatagaagcatatcccaactgttatgctctagagtactgtctgtggtgcttccaaatttgatcaatcaaaaccaaggggcctttatcaaaggaaggtctattgctcataatgtgatgattcttcaagacctcctgaaaaattacaagagaaaattaatttccccgaggtgtgctttaaagatagatatcagtaaggcttatgatactgtcaattaggagttcttagaagacttgttggctgcctttaactttcctcaaaagtttatacaatgggttatggtttgtctgagagcaacttcttattccattgttatgaatggctgagttcaaagcaggcataaaggagaaaaagggttaaggcaaggggaccctatttcgcctttattgtttgttttaataatggagtatctcacgagaagtcttctaagggctgctaataactca

SEQ ID NO: 108293 - DNA, 672 bp, Cannabis sativa
ttaaaattaaaaaacaaaaataattatggaaattatttttatttttcaagaataaattttttaaaaaattaaattttttatttttatggttaaaaaattagattaccaaagtattaccaaatattaatataaataagtatttaacctcttaatatgattttggtaactaggtgccttttggtaataatttttaatcatttttttgtttttaaaattagaaaagtaaaagtattttttaaaaatatattctataaaactgttttcacttttttattttttaattaaaaatcaaaattttgaaaacaaaaaaaaatcactttcattattttttttaaatagttttttatcaattttttggactctaaccagactttgaccaaactcaatgttgaaaaattgttgtgctccaatagaaataccaaaccaacaagattacaactctatgacaaataatacaaaggataaaaatatagattaaataatgttacaacaccaaacaaaatatacacataaaatatagtgaatatggagagaagagaagaattacaactcaaagcaataaactacaacacaatatatatagcatatatatatataagagatgtgagagcaatctcaacaccacatacaccacaagtgtataataggggaatcacaaaacttgaacaaggt

SEQ ID NO: 108294 - DNA, 934 bp, Cannabis sativa
  modified_base (897)..(908): a, c, t, g, unknown or other
tttgtgtagaatctgaattttcaaataaaatctaattatcagaataaaattaatttttgttaattttttaattaatttaaattatttttagatattagtaccctttgaatttgaaattttgatttttcacaaactagccttatgattaatttttgaaagttttgattatttttgtttattttatttattttaattacaagatcagatattacttattattttattattaaattttaaatgatcttattttgatattaaaatattaataaaatttataaataatctagttaaagtttcaaatttctaaccatatcagattttcaaaatttgttatttttgaaatatattttatcaaattaaattataagattagaaaaatgttagttttgacattttatcttattagatatttaatttaattataatatcactttcggaaaaataacatgaaattttgaaaagtttgttaattttggtttcaatagaaattttagtgtttggtaaccataaaattttaaaacttaggatattttgttttattgaataattaaataaaattgataatatcttaaacatcaaatatcttatttttaaatgatttatttttgttatatttgatttattaaattataagattagaaatatctaaatttaaaattaagatatcatattatcttatcttattagatatttaattaatttaaattatttaaataaactgaaaattttgaaaattagctagatatttgaatttctgttaaaagtttagatatttaggagatttgttagattttaaatattttttaaatattacctaaattttaaattctagttaagatatattacctaaatttatctgatctaaattgctataattaacttgttgacagatccaannnnnnnnnnnnaatcatagtccaattgttaatagatc

SEQ ID NO: 108295 - DNA, 572 bp, Cannabis sativa
  modified_base (275)..(275): a, c, t, g, unknown or other
agctgtagatttgatcttgtggctatctcttgggtttctatgttctataaatagaacctagagagcaaccattcgaatagacacttctagtattcatttttgcatttttcttatttatgaggggagagtctttgttatgtgagaacctagttgttcatctaggttctattgttttatgtatcagttcttaccctgtcctagagtttgttagaacaacttgactgaacaagagagttgtcttcggaagaatgcttgttgaagccttacttcgggangaagtaagcactcacacttcaaagacgaagggagttcgggcttgaaggtgtttcagaagtcagattcataaagtgcaatacaaaggattgcgttaataattttgaaggagtctaaacttgtataagtcaattgtctttgtattattgatactttattaattgatttcattctttgggcttggccccgtggactaggagtgttcgaaagaacacttattccacgtacaaatctctcgtgtcaagttatttaattttctgcaattatttttatattctgtctgttctgttttgtcgctg

SEQ ID NO: 108296 - DNA, 923 bp, Cannabis sativa
  modified_base (130)..(130): a, c, t, g, unknown or other
ttgggagattaaaccaattaacggggaagaacgagtatcctttgtcgaggatagatgttatgttgattaattttaagaaaggatcattttctctaggttcggtcttcgatctggttattaccagttcaanactcgaaaggaggatgttcctaaaacagtttttataccgatgactttgtaaattgttttcattaagggtattgtgatttcttcggatccaagggagccatatgagagacacccttggatgattttgtaatgtctctagaagcataagttttgtgcttaatgtaagaaatgcgagttttgctgatcccaaatttgcaatgaaggttagagattttctagaattaacaagatactacagaatatttgttgggggttggcaacgcccttagtggaatcaaatcgaaagaattgaaatagagattaaccattataccaatgttaacattgttagtcagtgaggggaaaaatgtgatttgatgtgatacttctatacaaggattagattgtattctgacacagtttaggagagttgttgcctaattacttagaccaattgaaggagtatgcgaagtggtattttagtcatgatattgaattggcagtaatcgttttgcactgaaagttgggaaccattttctatatggtgaaaatgtgaagtcttacagatcacgaaagcctcaaatacttttcttttggaagaatttagatgggagacaatggtgacggttaaagttgattgaaatttttaacggtgagattctctatcaatctaggaaagaaaatttgtaatggatgctttaatttggagaggtctaggacaagattttaccaaagttggatgaagatttaaatagagtggggatcgagttcgtgattggagaacttgttactatcacactatagtctaatgtatc

SEQ ID NO: 108297 - DNA, 580 bp, Cannabis sativa
cttacctgccaacaagttaaggccgaacaccagagacctgcagggctgttgcaatctcttgatattcctgagtggaaatggaaagacattgctatgaattttgtgacgggattaccgaagaatagtaaacaacagaattctgtcttggtgattattgatagactcactaaatcagcacattttttgcctgtgcgcactaactacaacgcagaacaatatgctgaattgtatgtaaaaaaaattgtaaggctacatggagtcccaaagaccattgtatttgatagaggtttaattttcacctctaagttttgggaaagtgtgcaaagtgctttgggcacaaaactgaagttgagtacagcattctatcctcaaactgatggacaatcggaacgaactattcaaatactagaagacatactacgagcttgtgcgttggatttcctaggtacttggagtaactatttgccactaatggaggtctcgtacgacaatagttatcaatctacaatagggatggcaccctatgaaatgttgtatgggaggaagtgtcgatcaccactacactgggatgaggttggcg

SEQ ID NO: 108298 - DNA, 594 bp, Cannabis sativa
  modified_base (58)..(68): a, c, t, g, unknown or other
gcaacagatcaactatctggcgcaggaattgcccttgtcacacctggggggcaacacnnnnnnnnnnnagtcaagtttggattcaaggcctctaacaacgaagccggagaggaagctctaatcgctggacttaagctagccaaggcaatgaaggctgaaaacattgagatctacagtgattcacagctggtggtaaatcatgtatccggtgaatacgtggctcgagaagaaaacatgatagcgtatctgagtaaaatacacgacctgctcacacaattccaaagctacggtctcagaaaaattccaagataagaaaatacaactgcggacgggttggctcgattggcaagcagtaatgtaaatgacaaggcaaacttggtccctatccagttccttgaagagcctagcatcactggcacggaagaaattgaaatgatcaacacatccccaaactggatgacgccaatagcaacctacctcaactctggggaactcctaagaaaccgaaacgaagctcaaaaaaatgagaagaaaggcagcacggtacatcatagtagaaggggtcatgtacagaagaggattctcgatgccatt

SEQ ID NO: 108299 - DNA, 518 bp, Cannabis sativa
  modified_base (345)..(348): a, c, t, g, unknown or other
acctagacctggaacccaaaattagaacctgaacaataatcgccgaatcaggaccctagaataagactaggatcgtgagccgaacccgtacccagacctagaaccaaagaaagacctacccgcagaccctaactgagactagaactcaggcccggagacggtcgtgtaccagaaccggaactaagaccgggacctggacctaaatctgggacccgatcccaaacacagactttgacctagatagggatccggatacgaacctagactcggaccaagacaaagactgggatcgaaatgctggacctagatctggaccgagatcctgacccacacccaaacttggannnncactcgggacccgaacttggacctcgacccaaacctagacccagatcggggtctagacttggactcaaatcctaacacagactcggacacgaactaaaacacccacacctagaatcagacccaaaactagacccggacccggacccaaactcgaacccagaagaggatca

SEQ ID NO: 108300 - DNA, 857 bp, Cannabis sativa
  modified_base (27)..(30): a, c, t, g, unknown or other
actaatcagattgtaaagagttttatnnnnggcataaaacccaacaattaattacctcgagatgctccttcttcggcttctcgaggggcaatgttttgaagataatgcgcccgagccacgcgatcctgagcttcctcgtcggctgggacaagaacctgctaccaagaagaatacttaggatatttacaatcacaagtaaactccttgtcagtaaggagacccacagacatcagattgacctcgttcaagaggaactcagatgaccgaagacaaaaaggaagacccatcaggaacgtgcgatgctcagccatctcaagagtcagaactagtctttttgagacagctctcgaatacaaaagaaaaattaaagtcagcaaaccaatagtaaaaagacatggaataaattaaccaagtcttaagcagaaattactcacgtattatgcaaaaggtggttgtgccaattggagaaagactagtcatccacaagaattcgtctttaaagggagttttatttagcagatccacaatgatcttacgatcgcctgtgtgagtcccaagttagtaaaaacccctgttgcattcttcctcacaggaacagccttgacagagtaaagatactctatttcttggggagtggggcaatcccaattcaaaattttgtatagaaccttcaaacttgcaaggattctgtatgagatgggattcgatttgaattgggcaagctcgaaatggtttaggaagtcctttaaatagtctcgcaatgggataatggctacaaccctgatgtgttcgagattttaccttatgcaaaagaaatttgaaatgtttgaaaagtttaatgaatttctagcaatggt

SEQ ID NO: 108301 - DNA, 671 bp, Cannabis sativa
ttgacaatgcggcaagacgattgggtgcttggttatcatcgatgaataacaaccactaaatgtattccttagaatatcgggtaaacattctttagtgctaattgttaccttatatattataacttcaaattattttcatactatcttacttatatcccaatataatttttttgtgcgcattgcatgctagaggtcgttgcgccaaagaaaattatccatttagaccctatatctaaccaccaagttcccgaacaaattacttaaatattgggaaggtagtaatttaatgactatttatgtaacaaattatttaattaactaatgaattgaaatgataatataatttttcaaacaaatcatacaaatatatagggacatcaaatgcatttcctggcccatggctaggaatttttctagaaaattgtccaagacaacctaaaaactaagaatgtggtttttatgttttgaaatacatgagtgacatcgtcgcacatgtaaaccccaaccgttacatacaagatcaaaaagctgtaagttttaattaattattatagtatttattattataataacaaataatatatgtataaactaatataaatttttactttttttttaacagtttgaagataagcagcaatacaattcaaaaactcaattgttaccaatac

SEQ ID NO: 108302 - DNA, 668 bp, Cannabis sativa
atatatcgtatcattgaaaattaatatatcgtaaaaataaaattatttaccacagaataattataacaatactaaattaatactcaaaaaatatgtatgtcatgttaacaaaattaaataaattactattaaattatgtacatatacaaaaaaaattatatactactattatacgtaacaaaataaaaaataaatatcatcaaaaaataataatataccatacaataaaatagaaatatattttataacaaaatctatataccaacaacccacaacaactcataaaaaattaaaaaaaaccacataaatttcaaataaaaaagattttaacaaaactaatataagtataccataatctttaagtaatttacttttaattctaaaaaaaatatgaaaaaaattattaatttttttatatggtaaaagacaatataaataataaatagtctaagggtcatttttctacaaatattgatacaaggatacttactaacatagtcttataattcaaataaactttataaaaaaaaattataataattcaaaataaaaatttaaaaatttgtaattttcaatattattttattttttaaaaaaataaatatcattaaatattattataatatgtataaaattttaattgtatacaagcagtcttatcgtaagag

SEQ ID NO: 108303 - DNA, 557 bp, Cannabis sativa
  modified_base (265)..(285): a, c, t, g, unknown or other
gtatatattctatataaacttattttatagaattatttcaataaatattatacaatgattatatatatatatttttaaaaaagttacgcttattttattaatataagctgtttagtaattttttgtatttttttgtatcttattaaattttagatatatttaaaggtaacgtgaaaattgctataaaaataaccaacaaaaaagtaatataatgatcaacaaaatataagttagtgaaaataaaattataatttttaaagttaannnnnnnnnnnnnnnnnnnnnaatatgtatatgaaataatatgatttcacaaactatttaatattttagtgtcttttttttttttattaataacatctcataattttaaatatatttttttattaacaacattcaataaactaaatagttgctttgaattttaaatatttttttccacttattgaaatagttagattaaaaaaaagattacaatggtattatttccaaaccattaaagtaattgaaaaataaatgataattggaaaacaaaattgatgttaaaagaaaaaaaa

SEQ ID NO: 108304 - DNA, 1139 bp, Cannabis sativa
  modified_base (529)..(532): a, c, t, g, unknown or other
attggataaccaatgaaataacaatgaactgttcttggatctaactttttcaaattaggatcataaatccttacttcagctggacgatcccatacacaaagatgattcagactaggctttctccagtccacaagtcaaaaggattttgggaacagatttacttggaacatgatttaaaatataaattgcagtcataagtgcttcaccccataaaaactctagaagatttgatctactcatcaagcatctaacatatccatgagagtgtgatttatcctttcagcaacaccattttgctcaggtgaacctgacatagtgtattgagaaactacatcattttcttgaaaatattcagcaaaaggccccgtatgttgtttagattctttatatcaaccataatattctcctctgcgatcagaatgaacaaattttgtgactcttcccaattgtttctcaagagcatattgaaagattttgagtttatcaaaagcgttggatagtctttgatcaggtaggtgaggccataagnnnnaaaaacatcgataaaagttataaaatacttgtttctgcacaacgtggtggaataaggtccactgatgtcagtgtggataatctcttataatgagtgactatagttagcagtctgctttcttattttagtcaatttttcacaagtatcccaaccggaaacatcattgaaagatgcaactctttctttagaaatatgactcaatctatcgtgccataataataaggatgttatcttaatataagatgtcttattcataatattcacaacattgaaagatgcagctaaggaagtcaatgataatttgaaaagactatcagagtaaaaacagttaccaattattcgaagtcaaacatattgtcaacactataattggcaagcggaagcgaaactaaattacttttaaaagtaggaatcaagaaagtattgttcaaaacaatctgaacattatactgtaatttaagattaaatgtgccaacataaataatatctactccaacatcattgccactttaagctttgactctctctcacttggctttcagagatcccttagcccctggttatgatgcatcttttcatattctctttatcctttgttgggcttgag

SEQ ID NO: 108305 - DNA, 771 bp, Cannabis sativa
tgacttttttaaaaggtaatttgttttggatactttaccataaaaataacatatcagatgttgtttatcaaaatatatatatatatatatatacaaaaaatatatatatatatatatatcaaatgtatttatcaaatattagagcactctattttacatcaaattttaaaattataccatatatcaacttctttaaaatacataatcaaaattttacattttttttttaaaaaaacaataatgtaatttattcatttcaaacatataatattaatgtggtttaagctataatgaaatattgtgttataaaaaaaaataaaaaaatcccatattagagacgaagaatttctttgttttccaaaatggaaaaccaccgaaaccgccgacaaataagaagacgaaaccacacattaaaaaatataatcattaaagtctccaaatatctacacttaaaaaaataaacacaagttaatataacacatcaaaaatacactaactcttgagtttgttagtgtatttttgatgtgttatgttataagtttatgtctgttttatgaattagttgtatatgcacttaaggtggataatgaattagtctagaatgagggttatccattttttttttgaacaatccatctttcctaattgatatgtattaaagttttgttcttgttaataagagtttaattaaaaaaaaaaaaaacgatataatcttaatatttacataaatccccttataaaaagaatttaaaactccaaacaatcaataaa

SEQ ID NO: 108306 - DNA, 514 bp, Cannabis sativa
tagtatgaagacaactccgacgaatttttcgatgataatctgacaacgataacaacttcaacgaatattttcattctattttctacttttttttgtggctaatattttattttagtgggtaatgactattttggatagtgtactgggttgatgattaagtcttggagcttttgagaagttttactaattttattttggtattgtatttgatttgttcaatattccatacagtatttagaatacaagcatgtaaaatttatttatagtttttgatatccataacataactggtttttttttcattaagataacaactctctagcaatttactcttattctattttttacttcttttaggactaatattattctttagtgtatagtgaatattttggtagtgtgttgatggtctagtattggagtttctaagaagtttataactggttttaacattattattgtgtcagtattagttttggcattagttttgatagtgggttgatgatcaagtttt

SEQ ID NO: 108307 - DNA, 554 bp, Cannabis sativa
ataagggtataacataagcagcgagcacttacaatgactatcttgtcttcaatgataccactggcatcttcaacagtcttaatttcagcagaagcggggccactctgtttcttcaaatattcaacaataccaaccttcacgtggtcccttgtattcctgaacattcttaccaccattcctaaaaatcttaagtgtggggaaacccttgatgtcatgttctgaaatttaatgaaaaaatagactgttttaccaaattaagttaaaatcaacacatagattagtaggcttctagttcaaaagtatctcattcctttcctaccataagtaaaaaagtttcttgtgcaggcatcattgtagtgaccagtactgcaacactttaaagagaactgtggacaaaaaaaatgagcatgaaaaagaaaaatgcgacctcatcttagcaattaaattcaattcacatatagctcaaacaagaaaagataacatgcttacaagcacatgcgcataaaattagatgcgttatgcatttacttaaaacttcggcaaggtcaagctca

SEQ ID NO: 108308 - DNA, 548 bp, Cannabis sativa
aaagacaaccacccagttaattttgaacattgatgaaatcattaaaatgactttttggcatatttgagtcctaaaatactttctccaagggtttttttcttttgataaatatttccattagtcttattaaacaagacaaagtagaaacatgctcctatattattaaaggagtttcgtgaaaataattttccccattcacgttaaattttttctaagcctagaaaatgacgaaaaacaaaagttaagagataacaaagaatttcaacgaacacttacaatttggtataatgatattattctttgtgaaaggttcttatcggtaaattttattgtttttttttattttaaaataatttttatcaatatttaaataattaaataatttagacccacataattatactatgtggaatcgtggatggttcaatttgcaagataacaaataatttcaacgaacacttacaatttggtaacagtttagtgttacgaatttttatgtttattacgcaaatgtatgcaatcaagtagtatctcacgcaagtgagatc

SEQ ID NO: 108309 - DNA, 718 bp, Cannabis sativa
  modified_base (636)..(681): a, c, t, g, unknown or other
ttcatcctcataatctgacaatgctcccactttgcttttttaccaacttagtcaaggcagcaatctgttcttccaacctcttggtatcactttctgggagatcatgtcccctcatcttgtcactaagatgattctttaggtcacccccatgtggcctcgcccttttgctcttgtatctctcgtattttgcatccaactgccgccacaggtctaccgtagaccaactatctctagaatgactgataggaatcctcccatcctgattgacagaatcactaggaggatctactcatcttctaggcttagggactttcgcaggtggtcctctcggtgcaaccctatctcgagggtcagaagggcgtctaagctcgaaagcgctggtggccttctgcgtcctcgagggttgcccgactggaggcgcatcttttcgatgaggtctgggagcaaaggtttgaagttccaacgttagtttgctcacgggctcgcccttcagtcaccgcttctacagatggctcttcatccgtcccagccaaaccatcaaacttgctctgaagttgctccatggttgctttcatctggggagtaagcctttgttgcttttcaagggctgccttgatggaaattattttaccaggnnnnnnnnnnnnnnnnnnnnnnnnnnnnnnnnnnnnnnnnnnnnnnaactttctaaaacgataatttaaacacatataaagtt

SEQ ID NO: 108310 - DNA, 660 bp, Cannabis sativa
catcatgttggatgagacgccatattccattccactaattgaatcaattattgttttacaccttttagatgatggtattgtatcctattatataaaattaaattattttcatatttttatattatattatattaaactttaatttataataaaatattatatatttatatactatataaattaatactatatataattttatataaaaatattgtatgaattataatttgatatgatactataatacaatacaatataatacaacataacaaacagaattctaaagatattacacttcaccatatcagatataatattttattttctctttctttcaccttaatttttacacttttatttctaaaaataatctaataatataatatctttttaagaattttataattataatctcacaaagaatatgcttactttttgcagtacttagcaccgtggtccttagcatttctcatttacatgcttaataaaggctaaagaagaaaggcagcagcacttgaaagatagatgctattatgccatgctactatttcctttaaatattggcataaaagagaaaaaacatgcttgatgaggctatatgttatccactaattgagagaaaaggcaccgacactggaaagatataaagatgctatgcta

SEQ ID NO: 108311 - DNA, 687 bp, Cannabis sativa
gttttggaaccttgttgcctactggggagttggttatctccagcaggtgggttcgatcctttccattaattatggaaggaagggagttatcagttgatctgatagaactaaattttgaggacttttatgctattttgggtatgggttggcttgtaaaatacaacgctactattaattgcaaaataaagatggtaacttttcatcctaagggcgacgacccctttgtatttgtgggtaagatgtagggatcccggattcccttaattttagcgcttaaggcaagagatttgttgtgtgaggggtgcatcagtttcttagcaaatgttgtggatgttaccagggaaccaacagcaggaccggagcatgtcccagttgttcgagaattttcagatgtttttctagaggagttatcggggttaccactgaaacgtgaaattgattttgagattgatctaataccaggggcagagcctatatcaagagctccctataggatggcacctgcggagctgaaagagttaaaagttctattacaggggatgatggatttaaaatttacaagaccaagtacctcaccttcgggtgcaccagttttttcgtgaaaaagaaggatggaaatttataaatgtgcattgattaccgggagttaaacaagttgacagtgaagaacaagtatcctctgccaag

SEQ ID NO: 108312 - DNA, 755 bp, Cannabis sativa
aaaaaagctactaataaaattgtagttttaatttacatggtttttttttttttttttttctaaagggcccaattttaaaattttgcacaaggctcctaaaatgtttgggccggccctagttacatgtacacaaatttcattctaatttttcactatcaatgttcattctcaaatatagatttttacttaaaacataaatttttcaataaatataaatttttcttataaataattttaatattttgatcaaatacaatcttgaaaatatttgtttagacatatattgatcaaaatacaatattcaaaacattctaaaatcgttatataatttaattatcactaaacaaaagacaaccccacgtgaatcgcggtttgtttcctagtttatattataaatgaagattatataagaattattataatattaacaaaatagtatatttaatcatataattattttgttaaaattctttccgacacacagaaaaataacatgatttttttttttttgaaggtaaaactttattaacaaaacaggaacaaaatcaaggaaggtcagctttacaaaaggtagctaaccacctaggaaaagaatgagtgaaaatatgagtattcttagtatcaagacatttccttgctaacatatgggcacactcattattgtttctatgaacatgaacaatgtttgtacaattagaactatccatcctatcttgaatctggtgtagcagagtgctaacagcacttaaattgtt

SEQ ID NO: 108313 - DNA, 535 bp, Cannabis sativa
  modified_base (372)..(376): a, c, t, g, unknown or other
ttttagttaatcaattataattttaaaattagactatgtttagtttatgaatttttcactacaatatgcttgattgtgaagaaatagaattttagggtttatttgttaattaagagactttgaggaatctaattaataaataatataaatgacaattttatttgataattaattgtaattattaaataaatagttttggcatttataagattgaaattacaaaaagtgatatttgtgaaaaataaataaatagttgagaaaaatgccaaaataactagtgatggacgcacataggggccgaccactaagtcctattttttctattattttatcattttttttattattccaaataattcaatcctaaccctnnnnnaattagtataaaaagaaaagaaaggtcttactatccaactaatgttgctaatgcttctaaacctagttttcattgtgtctgacaactagtgtttgagattcttcttcttattttttctccactatttcgaaattcttagtgttcttcaccatcaaaatt

SEQ ID NO: 108314 - DNA, 719 bp, Cannabis sativa
  modified_base (71)..(72): a, c, t, g, unknown or other
acatgaagttttgttaagtccatagaatagacttactaacgaaatttcctttcttttccttgtaatagaanncttttggttgttccatatgaatgtatttaacgatacttatttaaactaacaatggattttaatcatcgacgtcttccaagtcataacaggatgagttccttgaaaccctcccactacgacaaagtaccgtgactttttatctaagaacactaaatggtattgacctcttcggttgtgtcaaaacaaaagaggcagtggggcccttttattttgaataagatgatagaacacttttggaataaaaaaaaattacttcctctacgttggtactttgttttcaaacttagtgattttcttagaaaagtagtatttgttgaaacaagcactttattatctaatgactatgggatggtcaacacttaatcactttagaatagctatcaaacatgcaaaccttggttaacagttctagcttttgttaaggtcacgatcaggaaatccatgattctagtaatggtttacaataagtacacaaccattccatcattctaaaatttttctatcactagggtatttccaccattgctacaaattcatgaaatcgaatgcaaatcaaatttctggggaggtaagttaggcaagtgctagtaactaatcatagaccttatactatcgtcaatatgcaaatcgaatttctgtggaggtaa

SEQ ID NO: 108315 - DNA, 583 bp, Cannabis sativa
tgtcatgggagtgtttccctttctagtaacctgaatcaaggttctagtttcatccattttggacttggagtgagctccataaagttgttcaagagctttccataactgtgcagcagtggccacccccataacttcagttgctatagtctcagtcattgagctatacaaccatcccatcaagagctgatcgttgatgatccagttctcatatgctggatttacaacttgagaatcagcagtatccaagctttccatgactgttcctgcatcaataagttcagatggacaagtgttagttccattaagaaaaccatcaagtctatggcctctaacaatggttgagaccattgttttccatagactataattgtgtctatcaagcttgagagaaaagggctgattgagggtgctgaagtggtttgatactgggttttggggctgagaaaagcttgaaccagcacccattactgtggatgctgcagtggctggagtgttttgagcatggttgttgtttcctgtgttttggggttctgcagacatggtgagagggttgagacgcctggtgctctgataccaagtgaaa

SEQ ID NO: 108316 - DNA, 572 bp, Cannabis sativa
tatctctaataaagtccactaaggagtaattaaggagtgtaccaaattattatttagaaagaaaagacaaattgattggttatacttataacttacaatgagaaatatatatatatatatacatatatttatataattattattaggataaagaagttcacatcaacctggatcatactttatttaggattaatatgaataattgattaatatttttttaaataaaaaactggattttaattttttattatttatatattattttaatttttttttgttactttgagtataaaaatatcaattttttatttaaaataataatatatgtaatttttttagactaattagcaatcttcctgaattttttttttcgtactaaattatgcctctgaatttttttgaccgttaaaaattctccctgaactattaatattgttaaatttaagaatttttgtctaactttagtaagaaaaattataacatggatgaaatttcaaggggcatgatttactacatatcaaaatttgagggacataatttggtaaataacaaagtttggggagcatgtttta

SEQ ID NO: 108317 - DNA, 863 bp, Cannabis sativa
tgctcttttgcccccaactgccttgagtctcgagagatggctaaaacctctcacatgtcgagatcgctcactgagtacttgcgtcataacaggcaagtctcgggagtactgggtgggaccaatatcagtctcatcaggctgatcctcagtgggggctgattgattagcagtcaatattcatacattttgtctcctaaaaaaatcaaataaattaaatatttaatatgaatataaaacaaactaaaatgtttagaaattaatattaatgtaaatttacatgagcttgttctgcgtattcgttgcgccaagtgtcacctttatgatggaacttccaaaaagtgtcgatagtagttggaagttcacctgtctcggagttagcctatatatttaagagaaaaaaatgtgtgattattatatatttttttaaaataaataaataaataaaataagacttatgaatgaaaactaaatatataaaattatcccattgacaatatatgcgacaataggctttgatctctagcctccttgaagttttattttaccccgattttttattttttatttttgctgctcttgcctaaaatcaacatatttgggttacaatgaattatttattattgactataacgtaatgtattactaaaattaataattttattaagtaccttttgttttctgagttccagtaaaaaatgctagtaagaaatgcaatcactccacacctcttgagttacttcttccggaggtaacatgtcttccctctcctatccaagctcctcaatattttggatccgtattttcttacaatcggctcaccagtcatgcaaactttttggcatttcgtactcaccatagtctac

SEQ ID NO: 108318 - DNA, 552 bp, Cannabis sativa
  modified_base (363)..(363): a, c, t, g, unknown or other
taactaaataaaatcaaataccccattaaacacaaatccacttaaaacagtttcaagcaaggggaaatgaaattaaaaaaaaaaaaacttcataaatataaatcgacaaaccaaaaataatctaagcttaagacaaacaacccagaagaaacattcatctcaaaaaataataataataaaaaaagaaacacaaccagaactggtggaggagaaatgaaacacgaaccagtgtaaggaccgaaccccaaaccgttttttgcgaaatcgaaagaagcccaagacactgtttggaaataaaaggaaacacgaacacgaaccactgtaagaaccccaaacccattatcgaaaaatcaaaggaaagcnagaaacacggcatagaagttgaagaggaagactgagaaagcagaagtcgttgatgaattggcttttcgtcgtcggaacagggacgatgctcctccagactacggtaagtgattttttcttgtaatagtgtttagggttttgaaaaatgttgggtataagtgtgctggatttatagtggtttttaattct

SEQ ID NO: 108319 - DNA, 897 bp, Cannabis sativa
tatcgcggacaatttcccgtcttcggtcaatcgtgcaaccttcgttgcctctgtcatgaatctactgatgtaagctcggagaggaactcctggtcgttgcttcacttcaactaggtcttctaagtgcaacgggagttgacgagaggaggagaattgtgcgtggaattccaaggacaaagccttccatgagttgaaccttccgggtgtcaacttgaaataccactgttgggaaggttctgagagggtggcaggaaaaaccctgcaacatacatccccttgtactccttgtaggtccatttgaagttaaaaattcttgagatgtgataggggatcttccttcccagtatacatcttcctggttagcatcttaagcttgtgaggaaactctaggatattgatctctggggagaaaggggatccacgtgctcggtccaactcgaggtcattgttcttctgactggccaagccttggaacatattttttagttcatccaagtgtggctgcacagctggattaacttgctcagccacctggccgacaagagtcacgtcagcatctctttgaacaggattttgaacacaggctccgagctgaacgattggtgcgacatgctactcgtctagccctctccttctgtttagataatctctaagatcatgaggcattcccaatctattaaatatggatacaccgagttgtctcagtgactagttggtttgactgattagtttgccggaaccattaacttgggtagagttatgaggtataacttctcctgacgaattactagacaaggtctgtccacctaccccatggctcacagctgaaaccaacaactggggatgagcggctgaccactcagggtttgagaattgttcacagctggatcttcgtct

SEQ ID NO: 108320 - DNA, 852 bp, Cannabis sativa
cccttttttgatttagggtttggtttggggtctgactgctggaatttttaatctttttcagagccaagatgtctgcatccagttccaaatcttcacagaaaggcggaaaacatctggccaccttgaaggaagtaatgaagggtccagtggcccaggaagggtataagccccgtgctaaggggtgggaagcggacgagcttcactctacccttacttgcccccaccagctggagcacattgtggtggtggcaggcatcaagcctacgacttccgggacttaccaccggccgccccgggacgcggagacgcctaatcacaactacaggggcttcggagcttggagccaaatgcacttgatgaccggggccatgcttccccttcaggattacttcattaattttgtagtatttgtcggccttgcgccatatcaacttattcctcaagcttaccgcctcctttcaggcttgtttattttttattttgcctggggctggggctctcccagtccagcagagattttgtatttttatgaacatttttccgtccctaaaaagggagacaaacttaaggaagggttttacgatttccgggcccatcctttgaatgaggacccggtccttttcaaccagcagaaacatgtgaaggagtaccgtcaccgcttcttattttcctccgggttccaatctatggaacatccggagcttctcacggagtgggttaggatccctccttatgcgcggactgaacctactcaacttttcctccaacgggataagaccttcgccacatatgataagaaggcccttgacgtcggggagttggtcacgacggagaactgccggaaggccaagc

SEQ ID NO: 108321 - DNA, 691 bp, Cannabis sativa
tttagtatagatatttagtaattagtttttgtgtttgcaaaagcggctaaatgtgaaacataatatatcttatttcaattagttatgaaaaaaaaaagaaaaatgtgaaacatagtatatcttatttcaattagttatgaaacttcttggagcttcagtcttcacttttactcaaagaagtgttggcaggggtacgtattttttgggtgcccaaaataaaaaaataaaagacattattaagcttttatttaagtaaaaaattaagtgtattgtaaacaacaaatattcatagcgtgttggttacggtgtatgacacattacactatagtgtggatttgagtctcataacacttttttaatatatttctaaaagtgagggtcgaaaaaatttaaattgtcttagacccatatattccggccttgagtgttggtacttgattcaccattgtttatgatataaagtgataaaaaaaactaaaattgggtttttttgggctaaataaatggcttaggcaacactatggcttagggatcattagctacactaaatattgtacatgtaatgaaattttaaaacacaaaaggggcttagacaacagccctactcacccaatccttaagccagctagaaagattctagattgcgtgtgttaaccaataagatatcttaatggtgctgtgcttgaagatt

SEQ ID NO: 108322 - DNA, 520 bp, Cannabis sativa
tgagaggcgaccggtctctgcagcgatctggaaaagaaaataagttaagtatgagagatcaaatgtcgtagggtagagcacagacgagagggaaaaaccaataacaaagacttaccgcagtcatggcaacgctgatatcctaaacctgataaatggcgttcgtggaagtgctggttacgtatgttatggccgggagtttggtcaaatgggaaacgaattggctagtaaattcggaggcgaagggagcaagggcagggccgacgaagcagttgaaccagtccatcaggggatccatgttcaggtccgaggcgttcttgaaggcctcctcgcgcaaagaattttgttgagcctcccgcaagaccttcttcagggcttccacctcagcattccccctgctgtactcatccatggcatagttatgtttggcaactcgaagctgctgtctctcctcatcagtagggaccggagtatggacgatgccggggggtacaacatattcttctgcatcgggcaaaattcc

SEQ ID NO: 108323 - DNA, 572 bp, Cannabis sativa
ttcaaaaaacacattgtagtaatgccccattccaacttgccaagcataatctagatcttcatttccatacaaattaatatcaaacaaggaattaagttaggctaacatgtagttttgatgtaagaactagtaattagtaagaaaatcaaaaaatatatatatgttttatattgtggtctcacctttcaaattagctagaaactcttgctttgagattgatgacttctgcaactccttgccaatgaggttctcccaaacttgaacaacttctctttgggacaaaatattcttgggtggcctaagatacacagtcttattcatggtgcgagggtcatctatggttttgattgtatactttgctatgtcatcttcatccacatatattgctgccatatatatatatatatattaggtattagtaacatgtaatacatatttattagagttatttttgtctaatcattaatttaaataataataataaaattaaatccaatacaattcaattatgttttttaaatatataaaatttgttgtaaaagtggcctagaaacttagtcttagctgaatgt

SEQ ID NO: 108324 - DNA, 548 bp, Cannabis sativa
taatgggattattttacaattacaaaacaagtacaaatatatagttgtaccgaattttaaattttttacaaattttatgattttacttatatgaatacggtcttttgtattttttgttattattttgatgctattttcctgttacttttatgtaatttttttattatttttaggtgatttttatataacatcgtaaaatacaaaaaaatatctttgaacgtaaaaacataaattttttacaaaaaaaatagtacttcatgtaattatccttattttaattttacaccacttatttatttgtatttttttattcatagtttcttctaactataaatatattttattttattttattctcaataaagatatataaaattaattattttaatcaaagtttacttttgataattaagaattaaatttaaaatttcatttattacaagtcaaacaaataataatagatttctcgaatttagcagcgcctatggtttagcaaagcatgctctgcggttagacgatgagctatcctggttcgagaaggttccagc

SEQ ID NO: 108325 - DNA, 561 bp, Cannabis sativa
tttttttagactggcaacaagttcttgttcctgtcgacggggaggaaaagactatgtggctcgttgccattatctaaacaacacaacccctcaggaagctaaagatgatgcctcctgatgtaataactttggtatttgtggatggtccccaactcttagagctgagcaaattacactagttaaatttaggaaaagtcgatataacttttatatctggaattgtgtagatcttacttcccataggtttgacagttggtatcccaagcatgatgtccaaataagttgtaacggttcttattttgggattgccaataaatatggcaccaattctgatagggttggccatccagattgggacatgtctcctctaaattgcttcgatcttttcataattactagttctagggagtttagtaattattatagctcttctttctcgtctgatgactatggtaattttcttaagtgggagactatctcaccacatattttttgtttattttgcacaagtgtttatgtttttcttgtgttgtctcacagatctgaactttaagaatcttt

SEQ ID NO: 108326 - DNA, 709 bp, Cannabis sativa
  modified_base (459)..(460): a, c, t, g, unknown or other
tccgcctcggtcacctgggcgtccctctcctcctttagccgaagaagaacttgccacagagaactcctctcatcctgaagactgttaacttcagcagataagatctttatggtctcctcaaagcgataggcagccttaaggtcctttgttagcacggagatcttcttctcggcagcaaacaacttcttatttgcttcacccagctcatggcgaacagctctagtctccgccctggcctcctcagcttccttcttggccaagtccgcctccgccctgaaggtgtcggacagagctgcactcttggaagtagtagatttagcccgggagtaagtgtaagccaacttcaaatcagcctacataaaggaaaaagtcagcatatggagctaagtgtgaaaagttaaaagggaagtatcacaaaagactaaccctggtgagctccttcaagactccgcccaccannacatccagagatgagtcgttgtcagcaccagccagttgctcactgacctcaagaacaagccggttcatgtagtgagctagcatctccttgcccttcttggctttaggcagcacgggcatgagtgaagttggtgcctgcacctcctcagagatcctcctgacctgttcggacccagttattggtggcccagactccttagacttggtagatttgggagtggaaggatttgcaggagtcagctcctcggaa

SEQ ID NO: 108327 - DNA, 506 bp, Cannabis sativa
ggggggggggggtcgtttgggctctcggtggtaggtgcaaccggttgggttctcggtgtggtggagagagagcacgaggaagagagaaagtcagggaggaaaaattaaatgaaaaatgtattttgagtatttagggaaaatactagcatcatgttgaaattagcttagggtctaaattttgataataaatgtatttttaagcataatgaaattttcattctataaaaattcaacaaaataataagaattgtatcacagtaacatgaaagcaatattaaaataatataaaaaataataatacaaataaaaaaaaatcaacaacaaaataataaaaatctatatatctatataaagaagaagtatgaggcggtgacatgacactctaaaatatctttaattagcattatatgttctctccttaattctctcattcttttaattttttattaagtttataaatatttatttattattattagttaattatagcataaatgacatgccac

SEQ ID NO: 108328 - DNA, 563 bp, Cannabis sativa
tgcctttactaatccaaattactaatgcggtcattacaattatcttcccgttaaaagaattttgtcctcaaaatctctaacctgaatagctctgagtattgagtcctcatgtcagactccaactcccaggtggcttcctccaccttactatttctccagagcactttgaccaaaacaattgtcttgttccgaagaactttttccatcctatcaaggacctgaactggttgttcttcgtaggataagtctgattgtagttcaaggacttcataactcaagatatgagtcaggtttgaaacatatttcctcaacattgaaatatggaatacattataaacagctgacagtgctgatggtaaggctagctgatacgctactgctcgaccttctcaagtatctgaaatggcccaatgaacctaggacttaacttacctctcttcctgaagcgtctaatacccttcacaggtgaaacctgcaggaaaacttgttttcctgcctgaaatgtgacatctctgcgcttcaaattagcatatctgcctgctttgagaagcaagcatccgagc

SEQ ID NO: 108329 - DNA, 574 bp, Cannabis sativa
tgtaaatttttgaaaaatccaatcagatcggattggttgttggatggaacatccgatccaatgcataaccaccaaaccgatcaaattatcattctatggtcatctagttatatttatatatttttgaaatatatttataatttaatataattattatattttatttaaaaatatatattaattaatttaatatacatttaacacatgagattaatgaaaaaaaacttagatttaaaatattaattcttatctttcttaacactaataaaattgtcaatggttattgaataaactttttattttttagaagttttaatacaagatcatgagaattaggttagactaaactaatatttattatttatgttaaattaataagttttaaattatgtattttttttatatttatttttcttcttaataaaatcaacttaaatggtagctaaaatagattggatggatccaatccaatctaattgaaaactagtcaatacatctaatagttagaaccgatctaatccaatacatccattggatcggatcggatgaatcaattcaattagattggatcgga

SEQ ID NO: 108330 - DNA, 693 bp, Cannabis sativa
tttctctcatcattttttctctctctttgcacattgtctttcatattagtttttagggtcaaggttcggggtccatgtccaagtccgtgtatgagtcatgggtccatgatcgagtctaggactagagttcgaggtttggggttagagtccaaaatcgggccctagtccaggttcatgttcgggtccgggttagggttaggatcaggttggagctcaggtcaaggtttggatctaggtttggatttggggtcagggtccatggccgagttcgagtctaggtttggggctaggcgtggggtcttaggtctagttccgagtctaggttcggttgtagggtttgggatccaagcatggagtccgagttcgtgtctgggtctagaaccaaggttaaggtcgggttttgggtccggggtcgatcccaggactgggtcgaggttactagtttggatcagatcaggtttcagtttatatcgggatctcaaagtattgaagtattttttttaaaaaaaaaaaatctaaaaaactatttttaaaaaactaactaaacaagtcttagtttttaaattttcaaaaattatttttttgctctttccaaaaatacactcaaaacaatgtaaaaaagagacccttatttaatttatttatttatttttaacagcatagtaccaatttttttttttggtactgatgtta

SEQ ID NO: 108331 - DNA, 848 bp, Cannabis sativa
  modified_base (145)..(155): a, c, t, g, unknown or other
  modified_base (487)..(491): a, c, t, g, unknown or other
ttcttggctcaacttgtcttttataatacttttgaagccttgaacgtccacaactatgggaaacctgtaaacatagaaaacaagcgtaattttgtcctaaaatatcgaaaacaactctatttgtgacccaaaacataggctaaannnnnnnnnnnaaattcccccaaactgaatctttactctccctcaagtaaaactaaaactaaaataaagaaacaacgacacaacagataattgagcctccaaataattatactaccactaccacctgttcaacttcaatcaattgactaaaccagaatttcaattcaaccactctgggaattaacttggatgcacaagttagaaacaattattatgtatagatacaaaacacttctttggaaaaacatatcacaatcaatctactcttaccaacattccgccaactaatgttcaatatgctctcatgacatacctctctccactaatgtcaacaacccttgcnnnnnatcaaaaggtctttttcggttgaaatgtcatggcttaggtaaagggtagataaaaagtcatttagtctacattataccataggcagaacataccaaacaaacacccacaattatccatatttttatcccaaagaaacttgtaagagattgagaacttccactttatgtgcctaccatcattttttttttctatttttctttttttttctattcttctctgttttttttcttttctttatctattttttttttcgagaagaattaacaaatgtatttatttcttttttttagagatgataaagacacttccacataactttgctcaatctcctactttcaaaataatatccactcaca

SEQ ID NO: 108332 - DNA, 1405 bp, Cannabis sativa
ggggtggccccctttcaagatggctttcacagtttcatgatcaaagctttccttcagcttatttacgtcccagtgaccattagagagtaacaggtcagacactcggttgagctttgttgctccttccctgatgggttttggacaaaaacctttataatgaggaatccatgggtcctcccagatagctgtattctcaccgttggccaccagtttacaagcacctctctttaaaatcgagtttgccttcacaacacttttccagaaccaggagtcagagtttttatatttatattttaggaaatccttcccttttaagtattttgccgacaaaactctacaacacagcgattggctgccagtaaggatatgccatccccactttgccagaaacgcctgattcatttctctagtttttcggaaaccgagaccaccaagagatttaggaagacacaacttgtcccaagcttttaagtggagcccatgatttcctttttcaaaaccccaccagaaatccctaaccagaccatcgatacggttgaccatacgattagagagtttggtggtctgcatagcatacattggcatcgagaggcccactgatttaatcagagtggccctgcccgcctttgacaaaacctttgccttccatccctgcagctttgaagtgagattatcaagaatgaagttaaagtcagtgtccttttgtctcgaccgaaacataggcaagcctaaatacttgatgcacccttcaggagaattaatccccaacaattcttttatctctttcctcacgtttgacgaggtattgttactgaagaaaatagaggtttttagtttattaacctgttgaccggaccacagacagaaattttcaaggcaactccagaatcccctaacttcattcaaattggctctacccatcagaattagatcatccgcaaagaagatgtgggacaggattggaccacccctactaagctttatgccttgaatgcttccctcagataaggcgtcgtgtagtagcctcgaaagaacttccgctgcccaaatgaacagatagggcgagagggggtcaccttgacgaaggccacacgaagggatattcttgccaacttgacccccattcaggcagatatttaaagaagtggtagatatgcattgcgagacccaattacggaatctgacagggatcccacagcactccaacacatggtcaataaaacgccagcttagccgatcataagccttgacaagatcaatcttgattgcaaaaaaaccttccttacctttcttccgaccaaaagaatgaataacttcttgaacaatgacgttgttgtcatgaatgtttcttccgggcacaaacgcagcttgggtaggacagatgaaggaaggtaacagaggtttt

SEQ ID NO: 108333 - DNA, 730 bp, Cannabis sativa
  modified_base (41)..(54): a, c, t, g, unknown or other
cactgtaaggtttctcataatttatatgtgtttatttcatnnnnnnnnnnnnnntcatatttaggatgttaaacaacacacttgtgagtagatttgcatatgaggcaaagacgctggctagagttggtgaatgattatgattgtgagatcctttatcaccctagtaaagccaacgtggttgttgatgccttgagtagaaagggacagagtgagataaatacggtgaaacaaatctcccaacaactagcaaatgagatgacccgagctatgattgagttggttgtagggaagttagctaatattaccctgcaatctactcttctaatgcgaattaaagaagtgcaaatgcaagatccagaattggtaaaaactcgagatagggtttcggctggaaagactagtgatttttcagtggatgaaacgggaatttcgcggtttggaaatcgtgtttgtgtgcctacggatgatggtatcaaaagagagataatgaatgagtctcatacgactccttattcagtttatccagggtcaacgaagatgtatcaagacctgaaagccatgttttggtggtcaggcatgaagaatgacattgctgaatatgttgttaagtgtcttatctgtcagcaagtaaaggttgagcatcaaaggcctgcagggttgctgcagccactgaacataccagagtggaaataggaagacatggctataaatataccagagtggaaatggg

SEQ ID NO: 108334 - DNA, 624 bp, Cannabis sativa
acctgagctgcatagtcttgggtttcctcatctactgggacttgaacctgttgccacgacgtatacttgggatacttataatcacaagtatactcgttttcagcaaggaggccaacatatctcagattggcttcgttcaagagaaacttcgctgatcgaagaccaaaaggaagacctagcagaagcctacgtcgctcagccatctcaggattttgagttggtcttttcaagaccgctgttaaaaggataaaatattacaagtcagcgaggccaaaattaaaagcatggagtaatttaaaacctagtttggaacaaatagctacttacgtattatgcgaaacacagttgtgttgattagggagaggccacttgcccagaagaaatcttccttaaaaggggtcttttttggtaacccaatgatgatcctacaatcgcttgtatgagtcccaagatagtaaaagcctcctacacaacgtttccttgcagggactgccttaaccgagtaaagatagactatttccacgggagtggggcactcccatcctaaaattttatacagaacccttagacttgcaaggattctataggaaatgggaaccaataggaatggggctattccaaggt

SEQ ID NO: 108335 - DNA, 1197 bp, Cannabis sativa
gaatatcaaaattttaactcatattgtcatctttctaatttctctacactcttaaatgagttaccactaaataacatacatgcacagtccattcagatttcttgatgtctctaactaaataaataatgtttaatatcaatagcaattataatattgcccataaattttaacttgagttggccgaaggaccaatatctggatccccttgaatcataactaacacttaggcaagatccgtacacttttcttctttaacatcaatctttcttaactgtgggcaggttcttttcagatgacccactaccccacaataaaacaagattcgactctacattggttcaaatggcccctttttgtatcttgaatactcaggataaggtcaccgtttcttattctcaccttgaccgctatcctgaccatcctagaatctttttgtcctgtcccataattggtggttcatttagttttcgcttcttgatctactagtaagttggcttcatatattccaccacatttagtggtacaacaggaagtgtcggtaatacaagaacagatacaagatgagcctattgttctttcagaccttgaatctattttcccttgttgtctaatcatatcttgcatagcagaatttacatgttcctaacattatggcaataaaaaattctctttcttaccattttccccaagcctagatagctcgtttatcagactatttgattgcccttactgtataacttatcacacatttagtccacatcttctaaccatttaaaactcagacagatatcaatatcaatatggatataccatacacatattcttatcaaaattattagtatgctactttccaacatactttataatagcctaggcaggtaatccaatagcaaataatataagcacttactataccatgagtcgacctgtcctcgcagaaaatgtacatattcgacaagtctacaagacctttaaaaccatggctgctctgataccaagttgtaatgccctaatctatagggacgccacatgtgtaattttataaactagtttaatacgaatagaataattaattattaaaaaccgtgataatattaagaacttgactaaaattaaatactaaaaacagacatcataatgcctaaaaagtgtgttacgaggatccctgttattaaaagttttgctaaagaaatatat

SEQ ID NO: 108336 - DNA, 699 bp, Cannabis sativa
aattctttatgttaaacaacatatatggtagtaaatctaaattctggtaaaataatccatgacaactggcctcagagccttggtaatgatttactttcatgctgctggtagctcaagaaggaaaaataatttcattcatgaatttataaaagatgagaccggttcttgagttcagtgggggtcggttctgtctcaggttatggtagactattacgcagatatttttcattctatggggtcgaattgtgctgaagttcttgatgttatacaaccatccataacatctgagaataatgttactcttttacaaccaattttggaggaggaggtaaggcatgctgtcttccaaatgcacccagacaagtcacctggccctgatggattgacgcctgctttctaccagaagtgttggcatattgtgggtaaagatgttgtcaagatggttcaggatttcttctgatctaagtccatgcctcggggtctaaatgctactaatctcgttctcattccgaagaagaactctccttctgttatgggtgatctgaggcctattgctctttgtaatgtatcgtataaaatcatttcgaaagtcatggctaatcggctgaaaagtttattatcgaaggtcatctcggagtttcagagtgcgtttattcctggtaggctcattactgacaatgttcttatttcgtttgagat

SEQ ID NO: 108337 - DNA, 574 bp, Cannabis sativa
gttgagtagtcccgagttatagcaggttgaccttagaggggtccctagctctacgcctaggttgactttgggaactccaaaatggaagtttggactttaataacttgaatccaatcaactatctttagtattatgtaccatgaagtcatggagtaacctaatccaagacccgagagctgaaattacacgaacctacaactaggggtgttcattggatcacatccaatggatttggacccaaacaatccaatccaattatttattggatattgaattttgtcatccggtctaatccaatcgaattgagtcatccaatccgatctgatccattgcatgtattggattgaatcgcttccaaccattggatgtgttgactggttttctattggatccatccaatctattttagctaccatttaagttgattttactaaaaagaaacatatatatatataacataatttgaaatctaataattcaacatacataataaatattagtttaatctaacttagttctcatgatctcataataaaactgctaaaaaatcaaatttatttcatacgcattgaca

SEQ ID NO: 108338 - DNA, 629 bp, Cannabis sativa
cgttcataaaatatagcaacacatcactttttatagggctgtaaacgtgtagagaaagtgtttcccttctcgttacaatgtgtataagcagaaagatcatgtgaaaattgctgaatacaccgatcgtgggattatgggataaatgtggaatacactgatcgtgggatcgtggatacggcatatctctgtaattctgacccctaagttatagggatgtcgttgatgactcatagtgcaaaagctaaatttgccaagtgttgatcattctgtgcggatggctgattatcctgcgcaaattgctgacgaggcatcttgctcggattgggtttctccgaatagatactcacagttgcttccacgtgtcaccatcatgtgatgccacgtcgtagtgcaaaaattgggataacattttccccctaagtctgtacgggacttcggaagttgcgtgtagacttcatccgagctgttctacctttggatggggtctcttgtcaaacgcatctgtctgagtctcgatgttaggttgactgggcaccccttcgatttttggctaataaatgttctgacaattaatatttcgaaatccttttttctctctccatggttgacggttgcacttgattattttt

SEQ ID NO: 108339 - DNA, 722 bp, Cannabis sativa
  modified_base (679)..(685): a, c, t, g, unknown or other
aaattaattaaaaaaaaaattaactttcaactttaatttaatttttgaaaattattatataaaaatatataaaatttcaaaaatattaaaattaataaaataaatacttgaaaatcatctaatttaagttgttgtaaaataacaaaatttttaacttaaattattgttcaaaatttaattaaataacaaattaagtgtcttgaactgatcaccttaatttgatctaaaattaataaatttttaacttaaaacaatttttaaggaatatttcaataactaattttctagaatatctcaacttaattatgaatttaaaaaatattcaaattcaagttgatctaaaattagttataaataactaattttcaacttaaaaatattttaatgaaatattaaataattaagtatctagaagaatctaattagttataacttctttatttaattaaatacaaaaaaatatatctagtttatcttgaatttgaatttcattaaaataagtgtgtttttctaaattaatttcaaaataatcaaatgaaaaattaatttcatatatttcgaaattaattatggtactaatcaattttattgggttaaactagtttaatttaccttaaacagttattcaaatcaggcaaatgggccttcacagttgggggttgttcatgtgagggagggnnnnnnncagtatgtcgtacacactactaatggccccctaactc

SEQ ID NO: 108340 - DNA, 710 bp, Cannabis sativa
aacccaaaccgtaaatttttttaaaaaaaatgttaaaaaatagtaaatgaggtaattccccttataattataaattaaattaataatattaaactaaatcattattcaattatttatatatatatatatgtactcataactatatatatgtgtgaattttttttctactttgcagaatataggaaaagtatttttttttaacagattaagaattgaacaaaaaataaagggggtgtgagattatgaatcaaattttttcataatgcattatttttatatttcaatcatataaagttgatgtcatcattgtagttcctattgatatcttcaaatttctaaacttaatttattgttctgttagttgattaataaagtatcatatgtaaatatagtattgtccaaactaataatttctttagaaaaaataattttaagaaacaaaaaataattaagataaattcatattattaaaagaaatattatatacatattaaatgaaataaaaattaatttttctatcttcttccagtcatattatctttacagattaacaataatttttttttataaggagattaacaataaattgattcaaccgattcaaatgctatttttcaattctattttcatatattcaaaattctcattccataaactttctactaatatttttcaatcaatgaaaagaaaaggcaaattttaattcccgt

SEQ ID NO: 108341 - DNA, 686 bp, Cannabis sativa
ggataacaaacaagtgaaatatacgtgactttggagagatcagttttaggtttaaaaatacgatagaattttccaactctccctctctctctaacccacgactcactctctccctcggacgcctatatctatatgtggtagttgttctttcctatctcaatcacagtgtctcatgagttgagtagacattgtacttaaaaaattatattcatccaaattgaatctaatagcccactctattcctagagtattaaggctggcttggaacatcctgatgtgaactcttcaataagtttttttggattggatgttcgattgtgtaatacaaaaagatagtgaggaaaccctaataggcaacaagaggtataaatctctaaacttatagttaggtttatgttatgtataattgtgttgagatttggggtttatggttcatatcagattcaacaatttttttttattgaattaaagtttattctcttgcgctatgactcttatatgaaccttaaaaatcaacaatttcaactactctagaaacgataaaggctaagaaaagaaattccctaagcattaagaggtcttatgtatgctcttgtatgcagtagaccaaacatttgctagttagtgggagttgtgagtaagtattagtttaatccaaaaaggaacattgaaagataattaaacat

SEQ ID NO: 108342 - DNA, 819 bp, Cannabis sativa
  modified_base (471)..(472): a, c, t, g, unknown or other
agtctatatattatttcttttacaatatattaattatcagtattcttagaggttataataaggaataaaatattaaaaaaaaaaagataaatttatagagaactttatagaaaaatatatatatataaaaatcatcatgctattttttatctaacaaaaaaagcacaataagagatttatttagttatagtgaaaaataatattagaactgaattctcacacaaaataaagatctataaacaaaactaataaaataaatctatagaatacttttatatgacttcaaaaccgttattgttactgtaatttacttgtaattaccattatatttaaagttggtgtcatcaccgtatctcattattactgtatattgaaatttatattaggtatgtgaaaattatttagaatttttactgaatttaaattatatatcgtaaagatttttaattaatatttatcaaatttagtganntcgaataattttttattttctatatgttaatatatatttttttattttttaatctaattttgaaatcgatttaaatctttaaattaaaaattccagaagtaatttattatcaaagtaatttgaaaggtaattaatattaaaaaataattaaaaaaacttttaaaaaaataaaaaaaatatatatgcaacaataaaaattatgaaaatttatatgtgcatgtaattattgtaaattattcaaaaatcactgaacttaatatttgaatttatattttgctgacaaaaaaaaaaagaacataaacatgcttcaaataaaaaaaaataggtattgtttgaataattaattt

SEQ ID NO: 108343 - DNA, 937 bp, Cannabis sativa
  modified_base (635)..(635): a, c, t, g, unknown or other
  modified_base (763)..(767): a, c, t, g, unknown or other
  modified_base (889)..(898): a, c, t, g, unknown or other
catcgactggctccccagcctcattgtactcctcatagttcaggggttcaacctcctcctgttcgtctgcctttggggaactgtaggacgaatgtcgtcctaccgctcagtttcctggacctcaccgtccccttcatgatccccctcctcctcgacggctggatcctgtttggctggatgccacttaaggatcagatgcgtcagccaaacgcgttattttcttagtacgagcaatcattttatggctgggtataagtgttgacttcgcttttagccaacaacaatgagtcttttctataagcgataaacgatatgttgtaatgaatatataataaagccataataagacacatgaattttctagaagttcagcccgagcagttcggtaatatcctaatcctcgttatttgtattgactcaagaataaggaagaagattccttttcttatagctcttatgacagtgtctctgaatatataattcttagataataatatagtcttagcttagctgtgtgtcgactttcaatctctcggtccccttgcccagtgaacatgcctcactatttataatgctaggaaacttgaggaggaagattttcctctctcgttacaatgcgcataaactgaaagatngtgtgatgaatgctgaatgcaaggatcgtgggattgaggttgagtacattgatagtgggatcgtgtgtatgtcgtatccacataagttgatccctgagttatagtgattgagctgatgactcatgatnnnnnagctgaattcgctaagtgttgagtgctctacacgaatcactgaatatcttattttggatgtgctagcgaggcaccctgcttggtctatcttcctgaacagatgctccaagtggactccacgnnnnnnnnnnctcgtgatgccacgtcagagtgaaaaatttgggataaca

SEQ ID NO: 108344 - DNA, 590 bp, Cannabis sativa
tttaagcctttgaacctcttttttacaattagcaatccgcttcttaaagttgtccgtatggtcttgaccccaaactatcaatttcttgccacaatatttattttgtcagttaaaggcagccccgtgcaaatctcccagctgtcttggattacttggcgacacaatggctcacggagccatgcattttcaaacctaaactgagcaaccgaatggtgaagattgatcgcagcagtacggagaaggataggacagtgatccgagatcgtcacttcaagattaaaaaattgggccgatataaaacgttgagtccaatcatgagaagctagaacacgatcaaggcgaacctcaatccagttattagaaccacgacccctttcccaagtaaaaggataacccgagagctccaaatctttaagattacaatcctccaagactttgcaaaaaccatctagtaaccattgtgggtacggctgcccaccttttttatccgcttgagatgttacattattcaagtcacctataatgcaccaaggtaaaggagagttagactttaaagcacgaatttgatcccaagttctagcacgaaacga

SEQ ID NO: 108345 - DNA, 547 bp, Cannabis sativa
taatatgcacataagctacacaaccagaaacttttagatgtgataggcttatctcttttccactccataccacctctggtattttgtactctagtggacttgataggccttgattaattaagtaagctgttgtattgactgcttcggcccagaactgctttggtaaacctgactgtatacgcatgcttctggctctttctgtcgacgttcggttcatacactcagcaacaccattgtgttgaggtgtgccaggcacaattctctccattctaatttcgtgctcatagcaaaacttcttgaacgtgttctcttcatattcgccaccattgtcagttccgaactttttaatcttcaaacctgtctcattttcaaccatagctttccatctcttgaaagcctcaaacacttcagatttatgctttagaaggtaaacccataccttccgagaatgatcatcgataaaagtcacaaagtagtgtttcccaccaatggatgaagtagtcgttggtccccaaacatcagagtgaacaagctctaatctttcctt

SEQ ID NO: 108346 - DNA, 1030 bp, Cannabis sativa
agcgggaaagaggtgctttccccgatcgatcctaatttctgtctttccgttcaccttctccggtgacgagtatcgtgctctgtttccgatactctgttcttcttttctttctgttctttttcgacatagctgatgaagatcaaacatcaacccagtccgatgctgcgaatcaacaagctagaggcgtagatacttctccagcttcgattcaacatgaaaatcaatttcttcgaatcaacagccaaaagaatcccatggaagatcctgctaatctatacttcttgcatcacggagacaacccatgtaacgttcttgtctctcaacttctcactggtcaagacaattacgtttcttggagtagagcgatgcagctttccatctctgttaaaaataaattaggttttcttgatggatccattcctaaatctcatatttctgatcatattctctataatgtgtgggtccgtaacaacaacattgttatatcttggatcttaaactcagtttctaaggaaatttcttctagcatcctttatgatgaatctgctgcaaacatatgggctgatctcaaagttaggttccatcagagaaatggaccacatatttacaatttgaagaaaggattgatgaatcttaagcaagatacacaatcgattgggatgtatttcaccaagttgaaatccatttgggaagaactgtcaaactacaaacccacatgtacttgtaatggttgtacatgtggtggagtttagaaaattcaagaatttcatcacatggaatatataatatcttttctcatggggctcacggatacctactctcaagtccgcagtagcattctgctcatggaccctctccttgaaatcaatcgggttttccgtctcattactcaagaagaaaaccagaaaggaaacatggctgcagcaaatacccccaatgctgatatggcttttgcctttcaaaaggacaaaaatatacagaacaagaatgacaatcaagggaataaaacctatcctcccaagaaaggcag

SEQ ID NO: 108347 - DNA, 516 bp, Cannabis sativa
gggggaatttttaacggccaaaacaattgagggggcacgatttactacatgtcaatgttctgggagaaaaattactaattagcctaataaaaatgataagagacattaagatggcaagcatgacaaaaggtaccatacaattattggtgcaatttaataccaactctcaaaattttaatttaaataaatgatttagaaaaatgctaactaattattggataccacatcaatcggtatgtattaaaaaaattaccaaaaaaaattagtacaaagacaattcagaacaaaaaaaaaacaaaaaaataaataaattttacatcaagttttgcaattgtgtattgaagtataatgctaaaaattgatgcaaatatatcataaagttttttttttttttttttgcaaaatatgttacattttttttacatatctcattagagatgttcttgcaaacttatatataattaaaaaaattaaaattccaataaaaaagttataaagatgcgtacatattaataa

SEQ ID NO: 108348 - DNA, 781 bp, Cannabis sativa
  modified_base (202)..(206): a, c, t, g, unknown or other
gacaaaaaaaaaaggtttaaataactcaaacggccaaacattgatttcggcataaagggagtagcgccatcgatattttaccgtattatttaattcaaggatatttttagaattatttacaaatatatgtatataattgaaaggaaaattttatttacactcaaaaaatttgtaaagacatctcattttaataatttttatnnnnnataaaatttatatttttaattatactaagtttttaaattttttctttcaatatatattcttaaaaaatatacttatcaaacaaaataaattatattttaaatattatgaaaaataattaaaataaaaaattatataaaattttcttaaaagaaataaaaatatatatacatgagttagaaaaaattataaaaatgaaatcaaaataagtactaaaattaacataaaataatgtgagaaaaaaatttaaaaaaaatatatattaaaagtaatttttaaaaattatttaaatttatatatattttttttaataataaggtgtatttattggggtacaaatagaacttctctaattaaaaatatccaatattaatttgatgaagaaattaatacattaataaatttttattatataataaattgactaattacctctacaagtgctggggatttaaggatactcttatcctgtataactacttcttctgccattttatttcgtctgtacgaaaaatcagtgctaattttgataatgaaatagaaaaaaggaaacgagttttgcaaaaaataattatta

SEQ ID NO: 108349 - DNA, 619 bp, Cannabis sativa
  modified_base (265)..(272): a, c, t, g, unknown or other
  modified_base (433)..(439): a, c, t, g, unknown or other
tgatggaatggttctgtacttagtataaaccattactagattcatggatggcctaatcgtaatcttaagaaaagcaagaactgttaaccaaggtttatatgtttgttttaacaaatattacttttctaagaaaatgactaagtctgaaaacaaagtagcaaaatagaggagatatttttttttcttgaatcaaaaagtgtatcatcatcttattcgaaataagatgatcccactacctctgttgtttttgacacaaccgaagagnnnnnnnncatttagtattcttagacaaaagtcacggtaccttgtcctagtgggagggtttcaaggaactcaccctgttatgacttggaaaacacttgtgataaaaattcattgtgagtttaaacaagtaatggattttcagaataagaaactaagaagcaaagccaannnnnnnatggttaaaaccattcatgtggaagaaccaaaagttttctattacaaggacaagaaatgaaattttgtgagtaagtctattaaatggactaaacaaaactttctgctcctagtattataggtttgagtttatctaaacctatggcttttggtatacctagttaattacttactctagtgc

SEQ ID NO: 108350 - DNA, 765 bp, Cannabis sativa
taacaacttatgttctcgaagctgctatagaaccatccggagatgttgctcatgatcctcttctgattcagagtacaaaaggatgtcgccgataaacacaataacacaaaatattaaggaaatccttgaatactctattcatcaggtccataaaagttgtgggagcattggttagtccaaaagacataaccagaaattcaaaatgcccatacctagtgcagaaagccgtctttggaatgtcctcctctcggattctcaactgatgacagcccgatcggagatcaatctttgaaaagaccgtcttcccctaaagttgatcgaaaagatcgtcgatcctaggtaaaggacacttattcttgattgttagtttattcaattcccggtagtcaatgcacatacgtaaagacccatctttcttcttaacaaacagtacaagagctccctagggcgacacactaggtcgtgaaaaccttaggtcaagcaacccctgaagttgaatttttagttatttaagttctgttggagccattctgtaagtggccttagaaaccggttctgctccaggtgccagatcaacaataaaatcaatttccctttggggtggtaaactcggaagttcatcaagaaaaacatctaagagttcccgaaccaccttgatgtcttttggtcgaaatgattcaggccaagtggtatccaataccacagccagaaaacctagatatccatctcgtaacaattccctggttgttagtgttggaaattatt

SEQ ID NO: 108351 - DNA, 568 bp, Cannabis sativa
ttttttcccggttgttcatcttttatttcccggttgttcatcttttaggcttgttcatcttttaggctgtttagttcatcttttaggctgtttatgtcatcttttaggctgtttatgtctgggtgtttttaaaatgttgttttgtggttgcttttctggtttttttctggaagtttagatgatgtttattttttcatattttattacctttaattctttctctaattcaatcataggtgagtttcaatgatttccagatctccttctattcgattcttcacctctaaacgcgatttgcttttttgactgaatgttgtttttgagttttttttttttgtacagcaatggaggttggatgatttttttttctttccgtttttgtatttggattttcgggatttaagttgttttcccttgagatctatattttttttagatttgatttttctggttttggaaggaaatggttgagaatgggtcgttgaggttcgtcggctgggtcacgaagaagatggaggcttccgttttccttggctggtatttttgtaattaacaacttttagtttct

SEQ ID NO: 108352 - DNA, 652 bp, Cannabis sativa
  modified_base (496)..(503): a, c, t, g, unknown or other
atcatagtagagggaattatgtacagaagaggattctctatgccgttgctcagatatgttactcaagaagaagttgcacgtattctatctgaggtacacgacagattctgtggaaaatcatgctgccagggagagtttatctaagaaaattctaaggcatagttatttctggccaataatgattgaagattcaaaggcctatgttaagaaatgtgacaaatgccagagattttcaaagatacctcaagctccgcccaacgagttaactcagatgcaaagtctgtggccctttgccatttggggaatcgacctaatcggacaattacccaaaggcaaaggatgagtgcactatgtagtggtagaggttgattacttcactaagtggatggaagccgaaccacttgcaactattacataaaagaaagttcaagactttattgtgaagaacatgatctgccggttcagattgctgtacaaaatagtttcggataatggnnnnnnnnttgacagccaatccttcactgatttttgtgcgaaccatggcatcatcaaaagattctccacagcgtcctcaagcgaatggtcaagttgaagcagtcaataaaaccttgaaggacacactaaagaaaagactcgaagatgccaaaggaaa

SEQ ID NO: 108353 - DNA, 838 bp, Cannabis sativa
tagagatttgaagtttacatcgatactttgggtaagtcttgctatgggttcaaagttgaagttcagtacagcttttcaccctcagactgatggacaacccgagaggataatacaaatattggaggatttattgcgagcctatgtcatggattttaagggttcatggagtaaataattgcctttgatagaattctcctacaacaatagctatcaaagtacaatagggatggctccctatgaaattctgtatggtaggaaatgttgttccctaatacattgggatgagactggggaaagaaagtatttgtgtcctaagctagttcaaaggaccgatgaagatgcttgcttcacaaagtaggtagaaaagttattctgatcccaaacgcagagacatatgatttcaggtgggagaacatgttttcctacgagtctcaccaatgaacagtgtaaagagttttgtaaagtagggaaagttaagccctaggttcacagggtcatttgagatactcgagaaggttgggcaggtagcgtatcagctagtcgtgccactagcattatcagttgtgcataatgtatatcatattttaatcttgaggaaatatgtcttaaacccaactcatcatgtcttgagttatgaagccctagaactataattagatttatcctacgaggaacaaccagttcaaatcttcgataggaaggaaaaggttcttctgaataagaccatagcattggtcaaggtactctggaagaacagttaggtggaggaagccacctgggaatcagagtccaacatgagggctcaatatctagagttgttcatgttagattttgagga

SEQ ID NO: 108354 - DNA, 503 bp, Cannabis sativa
ttttttatttttaagtgagcttttttttcccttttatgttggcagttgggaaataaatgtgatgagtcaatgtccaactgtggtcacagtgaattggactttgaatttttgagcacagaaggccctccttacaatttacagactaatgtttactcaaacgatgatggaggcagagaacaacagattcatctttggtttgacccaagtcaagattttcattcttatgcaattctttggaatactcatcaaatagtgtaattaaattaaactaacctatcaattattctatttatttatttggaaagctttttaggtaggaacatcattcgtacttttaagaaattatattcaatttttttatatgatgttatatattgtagatataataggtattctgtctattttcaagaaattcttaataatttatagtgtcaaatagtctgtttattttgaagaaattttatttttcaggttttttttggacaatacccccataagggtgt

SEQ ID NO: 108355 - DNA, 526 bp, Cannabis sativa
ttatggaaaatattattagtttttgttatacttagtgtaagttttatggatatgcacattcttggttgtattttgtccactttatgttctaatttgaaagtagactatgattcatttttttgcattttttctgggtttttcattttcttgcgatgtttaaacaataattggcaattttgtgcaattgtaaccaaagttagaggttagggatgaatctatgcgatatttgaacgatgctagtgcgattttgtgcaatttatgggcaatttttgtgcgatgtttgggtggttttttacttgttgtgtttcttgtgcgacattatgtgatatcattgctttcttgtacgattattgtgcgatattatttacttgttgtttgtggtttttttggacagattcaattatatttgtgcctatacaatatgatgacgtttgagttgtagaaggtttcaactgggtattcaatttcgcaacaagtaagacaatgatgtttgacagtggcactacactggaaaaggtgcgtgaag

SEQ ID NO: 108356 - DNA, 538 bp, Cannabis sativa
tttttgattttatacatttaaataacacatgtttttattcgatggattaaataccttaagttatatttccattacttctgtcactacttttttattaaattctattcaaacataggagtatttgcagtataaatacatgatcttttagatcttatacagttatataccacatattttttcttctggcagattaaatactttaagttacatttacattaccttcatcactacaagtctcttaaatcttattgtaaggaatttttttcaatattatacctaaaattgattttatttacaaaaatacattcaacaaatttatttgcacaaatacaaagaaactagaaaagatataactacaaatggcattttttatatctctaaaaaaatagaattttttcatatttttattaattaaataaatattatttaatttttttttaactttaaaattatttaataactttttttattgagtaatacttatagcaaaaaaatacattttttatgttctaattacatgttaattccatttttggca

SEQ ID NO: 108357 - DNA, 654 bp, Cannabis sativa
aatagaatctacaatgcttgctttctcttcataggtaagcatagtatgtgagattttgagagtacaagatttaatgtcatcttatgtactttttatttctctgaagttatgaaggaaaaaataatttgtgttttaccttacactaagtagtgtgatcagaatatatagcactttctataatgtcatactgttattgatataattaagtattagtcttacataatttaatttaataactgtaatataatatcactaaacattcacaaagtgtcacctcatgtgcttaatagcaatattctatttgttttttgaaacaaagattgcaactttcattaaaacaaattagctaacaaaataacaatactctattcaattatataaaaagtaactttgttacgtaaaaagtgagacttgcttaactaaaccatgggctacaagtattttgtgattgccatgagaaagaaaaagatgttccagaaggctagatataataaaacgttaatattataaaaataacccctaattttctatctcaccaaaaaaaatttacaaaataatagaaagaaagtgaaattagtatcaaatatttaataaatttatgatatttttgtcgtgcgaaacaaaaacaattagtgacttacgatatagtatact

SEQ ID NO: 108358 - DNA, 828 bp, Cannabis sativa
tctgtgagaattggttttttttttggcgaatttcgcccttgcttttgtattgtggttgtgattaataaagtcatcatcaatatcaatatcaatcaatcaatcatcaatatatttatataaaggagagtttaaaagtgatgatgtggcatctcatatttttttcatagtatttttactattttgtgggagcttcaagttttgtctactaaaaaaaatctactaacttcgtgaaaaatcccacattgtttaaaaagtattgtggttttctatatccaaactataaataagctttgctttgccactttcattagtcaaattattactattcgttagtgtagaaagtattatagcaaataaatatttattttagtaattttttttttgactaattaataaaattagtcttatccaattagttatatatttttagttctgttttgatatttataaattttattatttatatatattttttattcatataatatactctttagtaattttattttaatgtcgcataatttagattaaatatttaattcaaatggtgtctttaattttcaaacaaaatattttcaaaaaaaaaaaaatcaaacaaaaaatataactcaatgtgtataattttgcgaataattcaatgtttatgtcaaatactaaaaaataaatcaatcattaatatctatatattaatattaaggaaagcacacaaggatataggtggttttctataattttttcttcatattttttttaatttcttcacagtaccatgttaatgtattaagaaaatatgattattcaacaaagtttactttttgtaataatctc

SEQ ID NO: 108359 - DNA, 612 bp, Cannabis sativa
gggttggaaggctaaaactctatccaaagcagggcgtgctactcttatcaaatctgtgggcttgtctatgccaatgtatgctatgcaaacaaccaaactttcttctcgtatagttaacaaaattgatggcatagtcagagatttttggtggggttttgagaagggaaatcatggaattcatctcagagcttgggataaactgtgtcttccaaagtcgcttggtggtctgggcttccgaaaaactaaagaaatgaatcaggcctttttgggcaaatgggggtggaatatcttcaccggaagccaatctctgtgctgtagagttttaagagccaaatatctaaaagggaaagaattccttaattgcagatataaagatgcagattcttggttttcgaaaagtgttgttaaagcaaacgctatcttaagaaaaggtgcctgcaagttggttaccaatggtgagaatactaagatttgggacgatccctggctgatttattgttagataatgggaagtgggatgttccaaagctgtgaggctatttcgaccatgaaacagtctctgacattcttaaaggaggccacccttcgggacgctagaaagttccgggcgat

SEQ ID NO: 108360 - DNA, 766 bp, Cannabis sativa
acaagtaaaatatataaatataataattaaatatatgtagcatgccaataaaattacatatatattaaaatatttatattatgctaataaaattatatgccactgttatatatagaaaaataaaaaataaatatcatttaagaataataatatactatacaataaaacagaaatatactgtacaacaaaatttatataccaacaactcacaacaactgataaaaaaataaaaaagaaattaatataactttaaaataaaaaagactttaacaaaactaatgtagatatagcatgatctttaagtaatttctttctaattctaaaaaaaatataaaaaaaaattattgatttttttatatgacaaaagacaatataaataataaataatgtaaaaaaaattatttctttacaaattttgaaatgaaaatatttacttagatagtattatgatttgaggtcatgcgttataatttcctttactataatgaataccaagccttcaagttttaataattgaataaattctacaattgaaatcaatcaaaagaagaaaaaaaaattaaaaatatctcgtaacatttttttaattagttttctctttttaaaattagaaaaatgaaaatatttttcaaaaacatgttctataaaactgttttcactttttaattctttaattgagaatcaaaattttataaaaaaaaaacaaatcgctttcaatattttttttaaacagtttttttttcttaatcaatattttgaactccga

SEQ ID NO: 108361 - DNA, 544 bp, Cannabis sativa
ataaaataattcaaataaacctaaatattttaaaattagtttgaattttaagttttgaaaagatatttaaggttatttcaacaactttaaattttcaaaattttgttggttaattaaataataatttaattatattagtaataaatatcttattccacatttgttacatagattttcctttttttatttaattttttattcaaaaactttttttaacaaacttattatttatttgatctaatgatccaatgatctgatgttaatcatactccaattgtcaatagatcctataaataatttgtaacatgtaaattttgtatttcttgtgtaaacctagaaacatgatagggcccatgtaaatcaatttgacctgtgtgagcctatatgtttacttttgggcttagatggatataggaattccatttctagatagataaattgattaggttgctaaaataaaatatcacccatatgatagtttatttaggcctaattagtattgggcttattcaatgaataatcactacaacagttttggctatta

SEQ ID NO: 108362 - DNA, 792 bp, Cannabis sativa
taaaattgaataaaaatccttaaatttaacaatctcaatagttcagagaaaatttttaacgacaaaaaaaattcataattaagtacatgtcaaaattcagatctcaaaaatcttaattagcctaatattaatgagtgtcaaaataaattttgtgtatctcaaaaagtaatttacttaaatttgtctaacttgaaaacgattcaaagttaatgtataaataatctatttttctcaatttcttcaccttaatcactttgaaacatgagaattatataaataggagctgtatatctataggtagattcttaagagaggggattacttttgttctagttattttcgcattttaataaattatatcccaattttttatagtacgttgtatattgtaattataataagcattgtgttgttgtgtccattttcaagaaattttaaataccttttacaatataaaaaataaagttcaaaataatctattgcacttgagtaaaataaaataggtatgcgtgcaactgaatatttgaatcttatttttggcaccattaataatttagaattttccaaaaagagtgcacttggtgctgcattgggtgcagttggcttgcgagccttgtctaggaggggcgcatcaagttttatcctgcgataagagtgtcttgatcgattgccatcaggaggacggtgcgccaagaagaaaaagaaagcctgaaggtagttccacaagaaagagcactcataataatgaggagcatgctcttcaaagttagccctaaagcatcatgtgtaggg

SEQ ID NO: 108363 - DNA, 743 bp, Cannabis sativa
gattataatttgagttgtctattggagtttcagctgctgttctggattgttattagagtcatcgattggagtttctactttcttgatgattttaacaccgtaaatggagatcaacgtatgaccacatccatgtttcttatgtaacaagtgacttaatgtttcttttcaactactaatgttctttgatatggtgttttcacagatgtcgaagaaaacaaccttcactgttgcaaaataaaatatatacaaagaaactacactatcaccaagaccacaagtaagtatgatctttttttttctttcctgatacttcaagaccgcaataatgcctttgtcattgaatgaattaaaagtttgaagtttacattgtatgaaaaacaaaattctgtatcttttggaaaaagatgacttgatttgtatttatatatttatatttatttttgattgatttagattgatgccccctaattaaaggaaataagtggtgaagtactaaataaatgcatgtaagctaatatatacaaagcttgtatatagaacatacaagtgtatatgtatcttttggagtcttcggtcaaaaggggaaaagaaaaataagaattatttgatggtatcaagattgcattttcttataacttccatatatattttatgatactaagaattaagggaatgggatccgggacctcctactcaagtgtaatgtaattgagttgttgccgttgctgttgttcgtttttttt

SEQ ID NO: 108364 - DNA, 658 bp, Cannabis sativa
tccatgctgagaaaatatgtatcaaactcgacccatattctgagctgtgatgatgttaaacttcagacaaatttattatatgagaaaaactacttgtctaggttttggactaaaaaaaggaagtactttgaaatgagacaattccactagttaagaaagtgctatagaaaaacagcaacatagaaaaagcaatttgagagttagaatcataaatacggggtcccgaattgtttaaataaattttgaggacaaaatttctataaggaatggatggttgtaatatctcgataagcgtaatggtaaaaattagggtttatatttatattataggttaatcaggtaataagagggattatgatactactaatctatttcagtataaaatttaaatttttctataagtgagaaaataagcgtaatttatagattacggagatttatacagcatgtgtaaatgtaattatgagttatatgtggaataaaaatattttccagtttggcgaccctgaagacctgataagtggataaataagcgtaatttgttaattatggagatttatttgaaatacatggatataatatgagttatttgtgagatgaaatttttttcaggttcggtgatcttggagactcaattggaggcaaaaaatgtcacaac

SEQ ID NO: 108365 - DNA, 691 bp, Cannabis sativa
  modified_base (476)..(479): a, c, t, g, unknown or other
aggacctcttgctctgagagccttgagaaggacctgctaagcttgcggtcggagcagagtgagacgggatttgtccacttatcccaaaagggttcccaaaatgagatgatgcaggggctaaggcctgaacctgactatatcctagggtagcggaaaattgtatgccgctcatcggtggagcagctgctggtaaagttcctgggagctaagctccgtgtacataccccactatcccagtagggcagtatcccccataggccactatctgggcctcttctaggtttatatatttttggactcttttctagaaatcttgaaggttggaggctccttcttgctgtaactcgatccagaacgaagtcgctgtacggatccctgcttgaagaagggcaagctgttgtccgtcatcaacttttttggtttttgaggcttcttccttaaacctctttatgaaattcttcaatgtttccgtaggnnnntgcttgatgttagtcaaggcgctgtcttccagattaactttcctcgcggcgacaaactgtctccggaagctagtttgcagcttattccagcagtctacggatcctggctccagtttcttaaaccattcttccgcgggctcgctcaatgttagcgggaagcataaacacttggcgtcattgctgactctcgtgactgtcatgactcggttgaa

SEQ ID NO: 108366 - DNA, 594 bp, Cannabis sativa
aaatctctacttgttcttttctattctggattattatatgatgatttttgaatttttcatgtataaaaagagataaactagaaacgacatctcttatctcaatgacactaaaggaatcttaaatgaatgaaattagaatgttgatggaatataatgaaatagagccactttgaggttcgttatgaaatgaggcatggaatagagccacaaaaaagaagtttcgagagttacaaaggaaacttcgagttcatatgggttatgtgttgagaacgagaattgaattttataagttttaatttcttattgtttctcagtggctcactggtagagtaattggctattaacctgacataattatttatttatttaatgaaatcatacatccacttatacacaattattcacatttaaactagaacaacacaccatttgaatttacaaaggtaatacccaaaggtatctcatcgaatctcgtaaatttattttctcgaatttgctcttttatcttgcattgttttattttctaaatatttataaaatatttgaatcagtccccaccatctaaatattctttgggaaatttgaatttcaata

SEQ ID NO: 108367 - DNA, 553 bp, Cannabis sativa
acttgaacctaggatccaactcgttactcgacccccaaaatggaaccagtccaagacccgagatcaggatccaaactttaacctggggcttggaccgaacccgtagcgggtgtctcgatctgggacccagccctggacccgaaccaagaccaggacccgaacccaaacccggacctgaacccagtcccagaccaaaaccttgagcaaaacccgtagcctgtgactcaaaattggaaccaaaatcgaaagtagagagggacccgggaacgggaccagaacaagcacttggaccaggacctggaatcgtaaccggatctagacctaccccaaaaccgtaaccagactagtacccggactccaaccaagacctagacccgaaccgggacccgaacctggatcccaaccaagacttggactcgggacccgaactttgacccaaactaagacccaaacattgaaccagacttgggacacagaatcggccgtgacctagaaccgcaccccagctttggtcctgaacgcaaactcaaacctgggactcgcgacctgaatt

SEQ ID NO: 108368 - DNA, 614 bp, Cannabis sativa
caatgtttgctctcatgaagataataggggagggaaccgctatcctgagtttttaattcaaggctttcaacaagctttgaatgacagttgtttccaagatatggaactttgtggttatcctttcacatgggaaagaggcagaggcacttctcattgggttgaaattcgattagatagatgtttggcaaacctttcttagctgcaagctttttcatttgttaaattatataaccttgagcttttgacgtcggatgattctcccatattacttgaactagttaatactgctacgcaaaggagagtaactctgtttttgttttcagaatgcgtcgcttcgagagcctctgtgttaccaattatagtcaaagatagctgggatggaagtggtgtaacagatgtgcaacaaaaaatcaagatttgtgggcagcagctgagttcttgggggaaggaggttacggggaactttaaggacaggataaagaagtgtaaaaatgcagtgcaacggtggacatgagagacttaagacctattgccctttgtaacattctttataagattgtttcaaaggtcattgctaatcggctcaaagctgttatgccttcaattatatcgga

SEQ ID NO: 108369 - DNA, 606 bp, Cannabis sativa
atatagacattgcaaactaactatacagttcaacttttcttacaagttaataagatttgaccaagttcctatgaagtgaggtatcttgcctgtgagttcattatctgatgcataactggtaaataaaaaatcatcatgtcataattagacaacaaactttttaaacttattttaaatcatatcatatcatcatgagaaaagggtacatataataaacagtttacaagctttttatgctttgtagattttcaaatgttgaaggaatctcgccactaactccacaactgggaaaactactacaaaataaacaaggaaaagcaaaggaatcagggtggatattgggaccaatttacaactccattactcattaagttgaataggaaatcttaaaggataaattgttaccaccaacttacaatatttccaatttggtcaaattccctagttctggcggcaacggaccagagaaattgtttgatagaaagtacctatatacaaaagtatttccaagaattaatgtcaataataatgtgattgaattggtcaatggaaatttaacaacttacaaagatgatagctgactaagtagtcccaattcctttggga

SEQ ID NO: 108370 - DNA, 522 bp, Cannabis sativa
  modified_base (219)..(224): a, c, t, g, unknown or other
tgaaaataatgattaattaaaattttgcttatttaattaaaacataaagtaatacatttataaaattttgagatcccgtttacaaaacactgttacataagtttactattcatttacaaaatatttgttgtcaagcgaataaacaacaacagccctgatgtcctgaggatcgtacgctccaggcctaacagccccgacatgtacaaccttcacctgctnnnnnncacggctcctcagctttagccttgcccttacctacacatagcaataacactaagagtcaacagacccagttagaaaagcagaacataataaacatactaacattcggggttatagtcaaaagcccatacacctaaccataaccctaactgaatcaggatcgatcttgacaaagtataactaaccacgaatccagcctacactcaatactctaatcgcactgatgtggtagcagttaattcataatatctgatagtctagcatatatctgttggcctcttggtgcatctctatatacac

SEQ ID NO: 108371 - DNA, 751 bp, Cannabis sativa
tcctcccaccagcagctccagagaagagtcattgtcagcaccggccatctgctcactaacctcaggaatcgaccggttcatatagtgagcaaccacctccttgcccttcttggcctctggaagcaccgacaaaggtggagtagaggtccgcaccagctcagacccacctctcggttggtcagacctatccgaactccctcctcgagactccttcggctgggcaacttttggagtggaggggtttgcaaccgttagctcctcaaaaagatcgatgacctccccgacagacgtcttttccttggaagaggttccctcaccgcctttagacttcttggccgggggagatacgttggagcctccgccaatcctcttccttagagcatcgagcatcttctgagacatgtctgcacggaacaaaaaacaacatggttagaggaaacatacatcaaaaacatgaagcataatagtcaagaagcttaaaagcaggacggagtattatgcaagatgattgctcgagcagatctcaaaagtccatcgcacctgacatgcctctgatttcggacataatagctttcccgtttccgagcacaggaggaggcgaccgagcaggagagatgggctccctgatgtaaattgcatgttcgataggcctaggctgggctggaagtttttcctccttttgagtggagtcacatgctcttcctcagcctcatcttcaagattcaagggctcctgagcatattgcttggcc

SEQ ID NO: 108372 - DNA, 1619 bp, Cannabis sativa
gaaaaattctgcaacatacgtcacctcataccccctgcagatccatttgcatctcaaaatgcttgaggtgggaaagaggatcttctcttccaatgtacatcttctaggttggcaatttaaacttgtggggtaatgccaagagattgatctcgggagagaaaggggtttcgcgtgctcggtccaactcgagatcattgtttctctgtccggccatgccttggaacatattctttagttcgtccagttgtgcctgcacagctggactaatctgttcgacattttggtcgatctgagtcacgtcagcatctttctaagcgagaatttgagcacgggttccgggctgcacgatcggcgagccaagttgatcatcaactcctgtccttctgttcagatcatgtccgagatcatgagttgtccctaacctttcgaatacagatacgcctggctgtcttagttattgattgatttgggtaacgtgctaaccagcaccattaacctggttggaattatcaggtatgacttctcccgatgaattactagacaaggtctgcccacactgcttggcgtatctgtattcgtagtcagagaagtattcatcgctggatctttgtctgtttcacccaaggggatgacatttgggggtttctgcccaacagtttgataatcttttcgtgtcagcacagtagcttgccgactacgattgtcaatctcaacatgatgagcccttaacacttccatctctttgtcccaccattcgacaaacatgcatctctgttcctcgaacgcaagatttactgcagggcagagttcctcgtgtgatcaatgaatgtagagggtgttagtatgaccttgcatgagtccaagggcagcgcggaggttttggatctcaatataatctccaatggtcgttcgaacgttggtagcaggcagaacagctgtgttatgaatgccatggctgggtgcttaactagtattcgcagtctcctacacacctggcacgatttcatccacaagagtcgttacaccatgacccgtgtttgacggctggttgatattaacagctggcagaacccttgtgtttcctgggttctgcaatgcaggatccactgcctgtagattttccggatcaaccaggcccatacgagtctgtaccaccatcgtacttgtggttcaatttagaatgaagagcgattcttcattcagctctcaatgaaagcaccaaaatgttgatctcgcttttagccaacgacagtgagtctaatttagtaagcgacaagtagtttataacgattgaaatataataaagcaatataaagacacaaaaattttatagaggttcagccccgagcagttctgtaatagcttaatcctcgttatgtgtattaactcaagaacaaggagaaagattccttttcttatagctcttagaacaataactttgaatatgaattcttagacaatatctctcaagtaaaatccttcgaccctttgcacagtgaatatgcatcactaagtatagggctatgagcttggagaggaagtatttccctcctccttacaatgaatataagcagattgattgcataatagataacggtgaagaaaagagattctagggt

SEQ ID NO: 108373 - DNA, 503 bp, Cannabis sativa
agatggttgctttatgaggtaacatatatttattatttatatgactaaatgaatataaattccattgttggtataatagttttgttactaaatatctatatactgatggattttatcttatgaacaatgagtaatggtttgattcttattgtgtatgaatgacaatattcaaataataaactatatgattgttattattacttttcttgctgagtccttgtgactcatgggtgctatgtggtgcaggtaaagacaaagaaaagctaaatcaaccatgaggtggcagtcttctccagcaatgtacatattgacctcaccgacctgcgtgccgagttgccaagagttgttttgggctggctgtatctgctgtgtattttgattttgtgtttaaatacttataatcgtatatatttctttagcaaatttttttataacagggatccccgaaacacactttttatgtcgttataatgtccgtttttagtattttattttagtcaagt

SEQ ID NO: 108374 - DNA, 605 bp, Cannabis sativa
  modified_base (390)..(392): a, c, t, g, unknown or other
gtgacggtattaatgatgacccattaacctataaataggcaatgacaagttcgtaacgaaaacaacggtcagccggcatggattgcatgaaaaagaataaagttgggaatatgtagacacacctgataattatcatccaattggaactaagtgggtctacaagaagaaaagaggtgctgatggcaaagtcaaaacttttaaagttagaatggtcgcaaaaggttatagcgaaagagaaggtgtggactatgaggatacttttagtctggtttccatgctcaaatccataagaatttttctctccatagctgctgcttttgattataaaatctgacaaatggatgtcaagacaactttccttaacaaaattcttgaagaaaccatctatannnagcaaccagaaggttataagcttccaggacatgaaaagaaagtttgctaactcaataggtccatttatggacttaagcaagcttctcgctcttggaacaaaaggtttgatgaaataatcaagacctatgactttcaccaaaacgatcatgaaaattgtgtttaccaactcaaggataatcaagttgtagtattcttggtcctttatgttgatg

SEQ ID NO: 108375 - DNA, 680 bp, Cannabis sativa
atatatatatatagtgacgctcattatgggtagctaatagttttagagtttgacttggagggactctaaaaggctatagtgacacttattaagaaactctaaaagtctttagagacacgctctgatgagtcactaaatattacttttccagtcacctacattagtgacacgcagtgaagtgtcacaataaagttttagagtcattcaacatgtgtcactaaaactcatttttgtagtagtgcgggttacctattcgtcccacattcttgaacaataatcttccccccaagtatttcagatctaactcttcaagttggatccaaattgggacacattttacatcttccttcttgaaattaacattgggatcccacggtttcattattaaaggaatgatataaaaatgatcttatttgcccatgtatttttataaaaagtttaagtttgagtttgttataattgttgtttatgttgatgatttgaatattattgaaactcctaaaaaacttttagaagctgtggaatatctaaagaaagagttcgaaatgaaagatttaggaaaaacaaaatcctttcttggtctacaaatcgaacatttaaaatgtggaattttcattcatcagtcaacttatactgaaaagattttgagacggttttatatggataaatcacacccattg

SEQ ID NO: 108376 - DNA, 1614 bp, Cannabis sativa
  modified_base (1200)..(1202): a, c, t, g, unknown or other
ctagagccatggagatatgatagggatcaaccctaatattattttccatcatttaaatgttgatccaagctacccatcgaagaggcagaaaaggagacctctggattcgaaaggaaagggtcactaaaacaagaagtggataagttgttggttaacgacttcatacgcgaggtgttttatccatcgtggatagttaatctgttaatcttgttctcgtctcgaagactaacggaacttggagaacttgtattgatttctccgatctgaataaagcgtgcccaaaatattgttttccactactgaggatcgactagttagtggatgcaactgctgggcacaagcttatgtcatttatggatgcatattcttgatataaccatataaaattgtatgtccctaatcaagaacatacaagctttgtaaccaacaggggactctactgttataaagtcatgtcgtttggactgaagattgctggggcaacatatcagctattggtaaacaaaatgttcacaaaccagatcgggtggaacatggagattacgtcgatgatatgttggtaaaataaataaaaagtaggtatcataccacagacctcgcggaatgcttcgagatattaaagaagtataacattaagctaaaccgaaaaaagagttcctttggaaaatcctgtttttgggattcatagttaacacaaggggtatggaagcaaatcttgaaaaaaaaatcaaggcattaatagacatgccatcaccaacaaagcctaaggaagtacaagccctaacaggaagaatggctgcacttaactgattcattttaaagtcaactaataagtgtggatcgttcttcaatatattttgaggaaacaaaaagttcgagtggaccaaagagtgcaaagaggcatttcagaacgtaaaaaggcatctagcgacgtctccagttttggcaaaaccaataactggagagatgttgtttctctatttggccatctcgaaagatgcgattaatacaaccatagtgcgagaagagggtaagcacaataaacctacttactatgtaagtaaaagggtactaggtgcagaattcagatatccccctctagaaaaactttctttgtgcctagtccacgcatctcgtaaactatgaccatacttccaagtgcacgccataaaagtgttaatcgatcagcccttgagacannntttatcaaaaccagatgcttctggaagattgatcaaaatggtcgattgaactggggctgttcaacataacatactatcctcgaacatccatcaagggcccagccttggccgttttcttgatagaagatataactccagaagaaattccacctgtttagcgagatacggaaacctggaagttatacgtggatgctgcaaccaacgagcagggttcgggtgcaggggtaatattaatattgccaaaaggctttaagtttcactatgctctgaggtttcaatttgatgcatcaaattacgaggctgagtatgaagccttgagcgccggcttaaagatagtcgagccattgaaagtcaaaaacctcatctgccatagtgattcacaggtgattgtgaaccaggtcctcggggaata

SEQ ID NO: 108377 - DNA, 710 bp, Cannabis sativa
cagcataggaaagccgatcatcagttgatggcaatcttggtagaagaaaatgaaaagaaagatgaagatcttgacactcgagttcaagatgagagaaacttattaaaaccaattgaggaattggaagaggttatccccgacctaggaaatcccacaaagtgtgtatacattgggaagaacctagacgagcagctcaaatagcaactaataagttttctaaaggcaaaccaggatcagttcgcctggagttatggagatatgatagggatcgaccctaatattatttgccatcatttaaacgttgatccaaagtacccagcgaagagacagaaaaggtgacccttggtttccaagaggcaaggggcactaaaacaagaagtggacaagttgttagtcaagggctttatacgcgaggtgttttattcctcatggatagccaatcttgttctcgtcctgaagcctaacagaacttggagagcttgtattgatttctctgatctgaataaggcgtgcccaaaagactattttccacttcccaggattgaccagttagtggatgcaactgctgggcacgagcttatgtcatttatagacgcatattttctggatataactagataaaaatgtatgtcccagatcaagaaaatacaagctttgtaaccaacatgggactctattattataaagtcatgccgtttggactgaagaac

SEQ ID NO: 108378 - DNA, 758 bp, Cannabis sativa
aaacatcaatggctggaggtatttcgatctttccattgcatatacatttcgatatgtttacagtttattctgcattacatatcgtttatatatgctgtattttcatattatatatattatagtctagcagtataaactgaaaccctaatttttttaaaaaaatttataaaggaggaagatgggtcaagtggttgttgcaaaataataataagatgtaatttttaaacattaattaattattcaaaaattaattttagaaggggtggaagtcaattttgtaaaaaaaaaaaatagaatattattgtaaatattatagttgaatgatttaaatggtttaaatgttaaaaatattataatagagacttaaatataaaaataaaattatttataaatattaattgttaaaaagggtcttattaaatatttaaattaaaattaattattttaagaaaattattaaatatgattaatttaatgggtaaatagcggcataagtacccaaagtttagagtttgtaagcggcataaacccaatgattttttttagtggcataagtaccaaatgtttgtaaaactgtaatttttctctattttcgtcagtacaagctccgttttaaatttattaaaaaaagatttggaagtaactggtactacatatttttcgttcagacaaaataatctaaaatttgggtcttatatgtgtcctgtttaagacaataacagagtctgtactgatgaaactggaagaaaattacagtt

SEQ ID NO: 108379 - DNA, 683 bp, Cannabis sativa
gtattttggtgagataaattgatagtgtattaggtattcggggtattcatccaatttaattcgtactattttattcaaatttcatattttggatacaatcaaattcgaaaaaattgtagattggatcggttattttttattgttatgttttaatattgaattaattaacatttattaaaaaatattttttttttcacacaactaataataaaataaaataaattattattattttgtatcttgaacaaccaattcaaataaataaataaataaaataacaaattcaaaaaaagatgaagaaaaaaaaaattaattttattctagattatattttgctataaataagaatgcaatataatatttgatttattattatttttttaaatacatttatatgatatgtatttttttctttgaaattttttcatattaataatagagaaaataggataaggaatttacatattattattatgatatgaatttattttatatgtattaaatttttaaattattattttttacattaaaatatttttttttgaaatatttttacattaaaatattaattatatataaatatgtgtattggattagataagttatttttatatgtcaattaacatctaatcgcataagtgtaaattttaaattttccaatttaatctgaaaagtgcagaatc

SEQ ID NO: 108380 - DNA, 674 bp, Cannabis sativa
aggaccctagaacaagactgggactgtgaccaggacccggacccatgcctagaactaaacacagacctagcctcagacccaaactgagactagaatttaggctcagacacgatcgtgtaggcagaccggaactgagacccggacatggacctaaatctgggacctgatcccaaacaaagacttggacctagatagggatacggatacgaacctagactcggaccaagacccacactaagaacgaaatgctggacctagatttggaccgagatcctgaccctgacccaacgttggaccggcactcgggaccacaacttatacctggaccagaacctagacacagatcggggtccagacctggacacaaacccggacacaaactcagggccgatctcaaacccacacctagaatcaaacccaaagctatacccggacccgaaccaaactcgaacccagaacaggatcagaaccaaggacccaaccaagaccaagaactgaattcagactcaaatcgggattggaacttgggacttggaccaaacctagaccaagacccaggacgcgaacccacttccggagactgatttggacctagattgaaatccagacccaaacccaaactcagaacaggactcgaactctgacccgaactcaaacccaaactcgaactcaca

SEQ ID NO: 108381 - DNA, 568 bp, Cannabis sativa
ggtgtacttatggaatcaagatcttctgttaaaagattgtgtttcatagtgtattaaaccaatctcattgtgacacatcaattaatttgagcattaaggaaaaaaaaaatgtatagatggttaattttttaataaatgaataattagttgacgtgtcaaacatacattggtttaaaatagtatgacacacaacattttaacaagagatcttgattcctctttaaataactactacataggtgtcatattaatgtcacgtgtgtaattaattttttaaaaaataatctaaaaattttgaatttagttttaagtaatttttttaggggtattatcctatatactatttttttaactttttttttcttttcaaatttacggtttgggtttgtaaagtggttgcagcgctagttgcaatagggatttctatacgattttttgttgcaatttagattgcagtgctagttgcaataggaatttctatgtagaatttcgtaaaatgcaaaaaaaattgttttgaagtgtaaaaattaaaaaactctaaaattaaattcttcttaaacacgttaac

SEQ ID NO: 108382 - DNA, 630 bp, Cannabis sativa
tgtttcacgacctagtctctgtgtcatcataggtagatcaggtgtgcactcacctgtaggtgaaagacctagaatctggtaaatctgagcttcggtattatggtgggtatcagatgtgactactcagttttggatgtcattttctattattggtatcgagagctaggggtctagtggactgtgtgatatgcatctgatgcttgaatttatgattctttgtggtctctttattttgtttatacattttgatactagtgatgagatattttattattaccaagctaaccatgcaggaattttattaaaccaagggtcctttgatattagttattttcctactgggctttataagctcaccccctattttctcccattctaggaactcagtttgatgctagcggatgaggatggtactgttgagaaagaaagtcgttattagtttagtcttattctactctctaatcttccaatgaaactgattttgtatttaagctaaaatggatggtcttgatgacttaaattagctacgtactagatagaaatgaggaatgatggatgctagatattattttggtattttattgacttattaaatctatctattttgtgattacataactgtggggatat

SEQ ID NO: 108383 - DNA, 766 bp, Cannabis sativa
  modified_base (119)..(121): a, c, t, g, unknown or other
  modified_base (373)..(376): a, c, t, g, unknown or other
tgctaccaagtgtgaaagagcaatattttctctactggaagcatgttagtgtcgctgtcattttctgtttttttttattgtttagttcttgttatttttcattactcgaggatgagcannnctctaagtttggggtgtgataactttatggtatagagttattttttatgcttttaaactaaaagtattgtgagaagagtagtgaaaatgtgtttgtttacttaactttagttagttttagtttcattttctatttagtaagctaacttttaagtcttgtaaaaattgttattgttaggtgtgtttttcaattaattgtgcttgtttgctgttgaaaaaggaagcaaggaagaagtggaacacaagctgaaannnnggcagattgctgaagcaatgctgaagcgaaatcagtattcaagcagtgacgtggaaacacgagtttcacttatccacatcagcaaattcgtcccagtcactcaaaatacaccagctggctgctgtggaaggaaggggactaaacctagtgggccaaagtgcaaaaagaagtgggcttctcatttttaggagtgattttgtaccttaggaaccaaacaactaaaagggggaaagaaagaaagtacatatcttcaacctccattacgtgagcagagctgctgcattttttttagaagagaagtaaatgcagaaaaagtacagcagaggaggaagagaaaagggggtccaagctttagtgattgatttttcttttaccctctcttaattgttt

SEQ ID NO: 108384 - DNA, 827 bp, Cannabis sativa
aaattatcaaacaatttaaataatatggaactgtagtaaaattgtttgaaaaaaatttacttttattttatcaaatacagaatctgacaaaacagaaatatactgcagaaaataaaatgagacacaacattttatatgtggtatcagcaatccttttgaattgctcctagtccacggagccatgtccagagaataaaatttattagatgaatctcaagtgattacaaaaccaaattgacttatacaaatacagactccctctttgaatttgccgcaattattgtaatctattcttctgatcaaatttatgaggtacccagaacttgaactcctttcaaattgtagcacttgcacacttcctcccgaagagtaagtcacttgcaatctttctcctaaagagtgtctaatttgcacttttcctcctgaaaagtgtctcacgaaccagatattggctataaatgggtatacaaaatcaaatacaatgtttatggctcaggtgatcgctttaaagcacgattggttgccaaaagtttcaatcaaaaacaagatattgattatcttcacacctttgcccctgttgaaaagtttaataccctaaaacttatgcttgccattgcgaccattaacaattggtctctgtaccaacttgatatcaacaatgcatttcttcatggcgatttaaatgaaactatctatgtgacactcccaaaaggatacaaacccaagggacaaatttccccaaattctatttgtagattaaccaaaagtctatgtggcttgaaacaagcctctagacaatggtacacaaaatttagcaattatcttct

SEQ ID NO: 108385 - DNA, 505 bp, Cannabis sativa
taaattgaccaaaatcaaaataccacacaattaaatgaaaaaattaaaatagagcaaaatgataaaaaaaaatggtccaaaaagaaccctccacgcgcccccacacaccacacattttttttttttttttgaaaaatctggtctgtccatacgacatgtcgtttgtctgaaggagagctcaaaaatgacacattgttttgaggtcatccttgaccttcagctgggcacacaggtcaaatccagatcgtgcgatccgacagcgaacctggtttcccgaccgactggaaaccccacctccggtgttccgttttcgacgccgtttgaggggaaattcaccattttttatattctctcttttttccaaactcatttcacccgaaaaacactctaaacccgtaaatcacatacccatattcggcgattaactaacttttttgaaaaagcttgggttctcaacattttcaacaaaaaaaggaaacaaaaaatatgatttaaattgattaac

SEQ ID NO: 108386 - DNA, 911 bp, Cannabis sativa
aagctcttccaactttacccgttttagagagagaaaatgcaaagagagagagagagagagaacgggagcaagagagagacaaggatgagggagaggagttggggttttctggttcatttgaaccactagtgagagagaaaatgcagagagagagagagagagagataacgggagcaagagagaacgatacctgaaacatcaggtttgtcatcaagccgaggccgcttcggctccgtttcttcggatgcatcgccatcaggtgcgtcgtgctcgacgtttgaatgggcctgttcgtcggagttcagctcggcgtgtttcagagcttcgagttccagctcttccaccatcgcgccgcacaaagagaaggtagagagaggggatcgggagaatgaaagagagaagggattagattttcacttagggttttttttttatcattttctatttatacttctcaattttcgaaacaaaatttattttatttatttcattttaataaataaaaatttgatataattaaataccccaaattaaaaatcccaaaccttatataaaaataaaatgccataatttttaattaaagacctaaattaattctccaatgacattttaattaaaaatgattgtctaatagtattttagtcctctaataatttttctcttttagataatttttttttgaataacttttacaataaatttttaaatacaactaacttttaaaattattctctaattgaaaatctataaatttcaaatttcccaattttataaattctcaaattataaatttaataagcaaaaaaaaatcttttttcatttttaaatctgtaacttttttttttggtattttatttaaggtaaaatttatttacaccccaacaatttctaaagacaccctattttaataa

SEQ ID NO: 108387 - DNA, 746 bp, Cannabis sativa
  modified_base (126)..(127): a, c, t, g, unknown or other
  modified_base (585)..(587): a, c, t, g, unknown or other
atatcagtatgttcagattgttgaggttgagaacctcctacgatagaatgacttcctaacgttggagtcgatgtccctctgagtgtttattgatgagagacttgggtctctgttcttataggagtnnagtctagtgatgccattggtgtaattggaactcgaaaccgactttgagcaacactaggagtcgtcatggtagcctttagtgactccatttgtgattttattgcggtattttcactcctaaatatcgcgttctcctccttaaaggttgcattttctcactccaaaactctagttcgctcagccatctcgcgcatctgggccattattatggcaagttgttcattgacattggttgttcttgggcaacaaactctccttcttcttccatctgaagtgtggtaatgatagatcgctttctcacagtcagtttgtcagggcccacggtgggcgccaaattgtagacgctaaaatctacaatgatcggaatgagcgttagtgggcaccgacaacctgcggaacaaagacaaaaggatgaccctgaaatcttgggacaccggggtggtgccggccgaaggcacnnngacggtcaagtcagtaaatttatagtgcaaagtagaaaagaaaataagaaatctaaacaaatacttcctgtgtctatggttatgtgatgatcgacggtcaaaccttgctcaccggaatgagaaagagtacgtcacatcgtagagaaatgataagtttag

SEQ ID NO: 108388 - DNA, 529 bp, Cannabis sativa
  modified_base (345)..(347): a, c, t, g, unknown or other
ttgcagatagtaaattccattcttaatgtctcccttcattactatcctagtgcctttcattactttcattgagccatctatctttacagtccagcctttagataccaagttcactaattgaaagtaaatttctcttaagttcagggacatacctgacttcttgtatgagtttgatctaaccatcattcattttgatcaatacacttcccattcctgaaatcttacaagttttattgtctcctagcagaaccgatccaccctcaatctttttgaagtcactaaacagttccctccttggtgtcatgtgaaataagtacccagagtcaagaatccattcacaaccannntcttgacttgtcacaaccaaagcttctgcagactcataaccatcaagaacaatgcctgcagcacctctttcttgtcccttttctctctctccaattttgccttgagtgctctacattcatctctgaaatgtccttcctttttgcaatagtaacaatgctttccttgcttggactttgcttta

SEQ ID NO: 108389 - DNA, 665 bp, Cannabis sativa
ctgcaatattataggtacagtacatattttgatcttccttttctgccatttattacacttctatttctatatctattttatctacatatataactatattctatatctatatatatatatgctcaaagctagaatgtgactatcatgtgctctataatcgatatttaagttgtacgttattcttttttttattatgattattaaaatattattttaacttcacttttattttcaaattttttaattataaaaataaaagtaaatttttgtttttaaaaaataaaaatgttttaataacaaaacaaaaatataatctgtaaattttatttttattttcatttataaattttatttaagtcggttttgaggtcaggactgaagttgggtccaagttcggtttccaatgtctaagttggagccccaattcaaaatattaattaaaaaaattgtatcaaaaaattttaaaagtgattttttttttatttgtaaagtttagattcttaattaaaaaattaaaaagtaaaaacagtttcataaaatataatttttaaaaaataatttaattattttaattttaaaaataaaaaattaattaaaaaagtataaccaaatacaaacataatttttacaataaactaaatatctctacaagatctccactaaag

SEQ ID NO: 108390 - DNA, 524 bp, Cannabis sativa
caccagaaatggaaccagactgggaccggcgattggaatcaggataaggacccagagcttggacaaaacctgtagtcggtgtcgttttgggacccagcccttgactcgaaccctgacaaggaatcgaatccacggctggacttgaacccagtcccaaattaaaaagtggacccgaacccgtacactgtgacctaaaattgcaaacaaaaccagaagttgaccgggactggaactaggacttggacatggaatcataactaaaattggacatagatttagaaccgtaaacccggactccaaattcgacctagacccgaattgggagtcacacccggatcccaacacaaacttggactcaggacccaaacccgaacctgaattcagaccaaaacatggaagtagactagggacacagaaccagggtcgggacctagaaccgtacctcagcctggatccagaacccaaactcagaaatgggactttggacctgaactagaactagaccgagacccgtgacaatgatc

SEQ ID NO: 108391 - DNA, 595 bp, Cannabis sativa
aaatttaaaggatgacggctacatctccctgaaagagtgaaagcctcaactggttggcaaaacccagagagtgtctgtctatcaattattcgaaaatgggagagaaatttttttaaaaaaaactggggaaagttatctatcttctcttttgagtgtcttgtttgagatgagtgaagtgccttggtcaacttcttggtgcttcacatgaagtcacttcacgcacaaatggtagttgggtgattcatccttgatcatgtgtcaattgttatcctctcatgcatatgatattgatccctgttgttctcaaatcttattgactaacttacctgtgctttaagtgttgttgtcctgtgtaggtgtccttctacagattgtctttcaaagcattggtgttcgtttctgaagagctattttttttcaaattgagtgtctgttttaacatgtggtaattttcaaaattttaattccagtcgttttttttacgtattgcctatctcgggtttgggctgttgttttttctattgttaatgggcttgggcttcattctatataacgataagggcattttggtctttttcaataaatggtaataaat

SEQ ID NO: 108392 - DNA, 854 bp, Cannabis sativa
cccccttgtcatagagactcccatcgccaataaaattgtggcaagaatatttggtcgacaatgggaattccatgaacttattgttcaaagaagccttcacagccataggcctcacggacaggaatctgtcgcctagcggctctcagctcacaggtttcaatgggacaatacttatcccaatgggaaaagtgagactaccagtcaccctgtgcctggatacccctcagagtacttttaagtactgcaccttcttgggggtggattgcccaactgcatacaacgctattcttggtcgactggccttggttgatttcagaggaatcacctccatctgacacttatgccttaaattccctactcaggaagccagagtgaggacagtaaagggaaatcagggagaggcaaggcaatgctacaatgtagcagcgcacttatcggtactggtagtatgtgagggcattgaacaagcattgatggaagaagataagttggatccccgcgttggatcagaaaaaattctagcctatggaggacaccgaggaagtataagtgtgcgactttgactccaccaagatcctccgtctaggaaaaacctagaaccggaggaaagaaacaaaattattgaagcactaagggcggccatagatattttcgtgtggtgccaaggagatatgaccggtataagccctcacgtgattacccatgtcctgaacgttaacctagacatgccgccattacagtagaagcgacgtccccttaattcgataaaagtagatgccctagaaaaagaggtagacaagctgttgaccaacgacctgatctgggacgtgtactacctggaatggctagctaat

SEQ ID NO: 108393 - DNA, 855 bp, Cannabis sativa
aaacaattttttaacggtatgcgtgtaacggtatatatgccaattaattgaccaacaatattataacaattaattttaaattttagtatgttgatacaattaattctaataataaagtgtatagacaatgaaagaaaaaaataagagtatatatattagaattagtatgacatgcataacatatcatgtttgtaagagagaagaatatacacaacaaaattaacttataaaaggaataaaatataataataataataaagtgtatagataatgaaaggaaaaataagagtatatatattagaattagtatgacatgcataacatatcatgtttgtaagagagaagaatagtgataaagaaaaataagaaaaaattgataattttacttatagatcactacataaataaaatttaaaatctaatatttttatataattcatagaaagacattacaaagaaaaacaaatgaagtaattatacctgatcatatatgtatttttgtatttaacttttgttgttatgatatgattatatatatatatgaattatgtataataattcattagaaaaatgatagagatatgtatttttgtatttcaatttttgttgtggttattgttactacttactattatacatcttcttcaaatctatattcctatatatatagtgagtaatatgcaagaatcaaagaattgtagggaagtgaaaaagttgtaactgattttttttattttacttatttatgttagtgataaatatgtaataataataagaaggttatgaataagtgaaaaggcatgtaattgaattattattgttgttattatcaattatactttttacaaataaata

SEQ ID NO: 108394 - DNA, 561 bp, Cannabis sativa
agatcctggtaaaataaactccaaaaccaacttcatcaggtcgacactccttgccataaggcttgtgtagtcaccatgatttattagatcccaatcgtcttgttagaaggtcctcaagtgccaccaattttgcatagcatactgcgaacaagcctaggattttgtgatctcaagttcttggtaagtttcttgtagctttttgttgatttcttgagttggcccggcccgacatcactttggcccggcccgtcccgacccgactccttcttttggcctagcaggtcaagcccgacccgagataatcgagctgggttaggcccgacctttttttttagttagaatacttattactttgttttgtttcatttggtaaagtgaatggtatttaattttggtggtggttgagacaattcattatagacacttttttatttattatgttattttacagagagagaaaatttgatgcgaaaatagataatgcatcaaaacccaccattgattattattattattttcccacttttctttttattttctttctaaaaattattattatta

SEQ ID NO: 108395 - DNA, 915 bp, Cannabis sativa
aggttggggtcggggtccaagtcttaatctgagtttgggtacgggtttttcggatcctgggctaggtccaggtttgagtttgggtcctaagttcgggtatgggtctacatttgggttctagtccaggtcccgtgtttcgatcccagtctgggtctaggtcggtattctgttctaggtctaagttcgtgtccaggtctaggtccaaatcccaatctcgatcaagggcttggtctgggtccgagatcaagtcccgagttcaagtttgggttcgggttcgagtctcagtcctagtctgggttcgggaccaggtccgtgattaggtctaagctcgagttttggggcttggttatggtctagttttggtgcgagtcctgagttccgatctaggtctgggttccaaggcctaggtccaagtcctccatccagattcgggtcctagttccggtctggatcaatgtttgggtttgggtcctagtcccagttttgattttgattcagtgtctcggttcgggtttgggtccgggtttgggtcaaggtctaagtcctagtctgagtgtgggattgggtttgggtccaggttcagatcccactcttggtctagggtcatttcaggtccgagtttgggtcccgggtgcgtgtctaggtctgggtctgggtcaaggttcatatcaggatccctatctacgtccaagttatggtctgggattgggtccaaggtctaggttcgggttcaggtctcagtcctggtctgggtacacaaccgtgtttgggcccgagtttcggtctcaggtaaggtctggggctatgttcgagttcggtcctaggtctgggtctgggcccgagttccaaatcccgatctcgggtattggtgtggttcaagtctaggtctttagtcgggtcttgggtcccggtcct

SEQ ID NO: 108396 - DNA, 544 bp, Cannabis sativa
ctctgaattttgtagttcaatcatgtcagccgaagtggctgctgcattatttagcagcgaaaccttcttttgcacctctgaaatttgttttttgaaattaccaaacttgaatacatgccatcgttgaagtgcttctgtgcaagaatgcagattgctcatgaaaagatcaatatcaccactggaagttgcagaccaggacgcacgaattatagcagcagcttcgggttcctccagccataatttttcaaatcgaaatcttgttcttcttgctggtttttcctgtactgaagtggtgtacaacacattgacagcaatggcccgatggtctgaagaaaaataatccaaatgtgaggttatcatgggtttaaaaaaggtactccataagtcatttgtaaaacaccagtccaaacgctccttgattgcattgatattgtgtctacccttaatccaagtataaggatccccctcaaatggtaactgagaaagagaacaagaatccaacacctcccggaaatcatccatttgtttctcattccttaaacct

SEQ ID NO: 108397 - DNA, 519 bp, Cannabis sativa
  modified_base (358)..(366): a, c, t, g, unknown or other
atagagaaggtagataactatttgggaaatataaagatgaaaattccttcttttcaaggaaagagggatcctgaagcatacctggagtgggagaagaagatgtaattattgtttgattgtcacgactattctaaaacgaaaaaggtaaaacttgctgccattgaatttaatgactatgctattgtttggtgagaccagttgtgcatcaataagagtggagaatcagagattgactcttgggaggctatgaagagggtgatgaggcggcattttgtaccatctcactattatcgagacttgtacctcatgttgcaaggtctttgtcaaggatacaagagtgttgatgagtattacaagnnnnnnnnnatggctatgattagagccaatgtggaagaggatcaggaggcaacaatggcaaggtttttgaatgggttgaatcgggagattgctaatatagttgaactacaccattatgtggaattggaagatttggtgcatatggcaatcaaaattgaaagg

SEQ ID NO: 108398 - DNA, 515 bp, Cannabis sativa
acaactaatccatgggcagccacaatggctaaccaaagtacataaattatggacactcccggaaaacttgataataaacttgttacaatgtctaacaatgatcctagattactggaaaaaaaaaaaacaaaagtagacacaattgctaaggggtaaaaattcctatccaaggtcattaaggccccgtttggggtagcttttaaaaaagttaaaagtgctttttgagaaagttattgcttaaaaagtgtttggcaaaataaaaaaaaaaaataacttttttaaaaatttaagttaaaattatagcttttagctaaagttggctcacaccaacttttagattttagcttttaagggaagctgaaatttgagtttaatgaatttttcatttgacccaatttctctcatctaattttaaaattctccatttaccaattaattttagggcttcttacattctttcaatctcatccttattcagaaaaaaaaaatcattctctaatcaaaaactactcaac

SEQ ID NO: 108399 - DNA, 504 bp, Cannabis sativa
gcaccacatctgccatggggattccagttgtgactgtaacccgagtgcttggatttgcgatctatgggtcttgagggagaccttcagatgtagatgatgcgataggagttcttctttttttcaccatggcgtttgattagatcacgatatccacactcttaatcaaagcaccaaattgttgacctcaaaaagtgatcaattgacagtagggtcttgtagatgtgatgctttccacgtgtgtacataaataagaataaaaagcaatagataataggatttgttatagaggttcgacccccttgtgataacgagtaatgacctactccccttttagttgtattataccgagggaattactatccagatcgctataggtgggatctgctatagtacccttaggattacaatatatgaatcaatgtttggcaaaactcaagtgttggacaacctatggtgttcaagtgctggacaacctagggtaggcgtgtgtgtgtgtgagagaga

SEQ ID NO: 108400 - DNA, 550 bp, Cannabis sativa
gcataaaacccaacaatttcaccttgtaattgaatcttgataaaacttcaagagcttgaaatcccttcgatgtatgaagagtgcttgcttcctcccgatgcaagacttgaaaagcaatctcttgaaagctttgtaaaaccttctcccgaaggtagcactgatgttcttcttctttgtagacttgaatacagattcaagacaatacaaaatacatataaacaaagtaagagttgaacaagctcttctctacaaaacaaagacactcttttcttaagacatgaatacaattctaagtgtatgaaagaggtactaaacctagctgtaataaggtgtatttataatcaatatagaccttattgacaacttacacagggtttgaacaagaacccagcccactagaaaattccctaaaatagatcttcaattagcccaagaatttttatttttgtacatacagaatcgtgagaagtaagtacaacttttcttttatagaaaaggaaaatttagctctatttttctcttcaagaaatctgatctaagaaaatggaaa

SEQ ID NO: 108401 - DNA, 664 bp, Cannabis sativa
attgttttagttattttaaattttagttgcattaaacttgaaaagatgaaatctttatatagtattaaatttaaataaagggtgatatttagtttttatatattttttatttgaagtcaatattaaaaaattaggtatgtaatagaatatgtaattataaaattgatcaaatctaatcaatttgatccaatgtgtaattagagtaaaagcgataataattttttaaatataagtattaattgaattaaattataggaaaaataaagattgaattgaatgggaaggccagcccaaatcgtgatcaacgaagactgttaagaaaaactgaatggaatgttgcatgaatgtggcacgtgaagaagagagaatttttggggattgaggcctttttcaatttatttcttgtcatcaagctgtcaaacaaagtcactttcaactaattttaacttttaccatttggtagtaagaatagttattgaatttttttttagtacactctttaattatattattatagtttttatttgtgttggcattaaatgaaatttttagtttataatttttaaagtatatgttgtagttgtttaatttttttttataattttttaatagtttataatattaaaaataaaattcaaacaactatttattatatatatatata

SEQ ID NO: 108402 - DNA, 600 bp, Cannabis sativa
cctttagacagaaaccgcccttcccatgtcttcaaacgatttctgactttatcacgaagatagccaagaaccgtggttttgtttctactaatagtactcgggagtcccaagtagaagcttccatcttcggcaatagacatatcaagcatcgaacaaatctgattacggaccgccaactcagtattactgctgaaaaagattgatgattttgcaaaattcaccctctgtcctgaagccagctcaaacttcctcagcaactcttgtatacgcattgcttcctgggttgtagctttacaataaaggtagctatcgtctgcaaaaagcatgtgagacactcgaggcgcaccattagctactttacaaccatgtatcaaaccattatgctcatatttctgaagcaaagccgaaagaccctcagcacaaattataaacaagtatggcgaaaggggatcaccttgtctaatgcctctggttggaatgataggacctacttcatggctgccatgaatgatgttatactttgccgaagtgacacaagccataatcaagcgaatccaatgctccaaaaaacccatcctccgtaacattgattccaagaaa

SEQ ID NO: 108403 - DNA, 639 bp, Cannabis sativa
  modified_base (410)..(410): a, c, t, g, unknown or other
tctttttcataaataacactggagcaccccaaggtgagtagctcggtctaatgaatcccagattcaataattcttgtagttgtatcttcaattctgtgaattccgctggagccattcgatacagtgcttttgatactagatccgctcccagaaccaactcaataacaaactcaatctcccgggtaggatgcaatctcggtaaatcttctggaaagacattaaggaactccgcataccaatcttttattctcaggccctgatgttacaggttggctggtatccactgcactgactatgaatcctagacaacctctgctcatcaggtccttagctttcagcaatgttattcttggtatgcgccccccctgaaccttacccacgaacactgctgggttagcactatcgggctnaaacaccaccatcttccgtttgcagtcgatcattgccccatacttagacaaaaaatccattcccaggattatgtcaaaatcagacagttgtaattcaattagattgatagtcaattcacaaccgtcaatccagaaagacaaagaccgaatccacctagtggatacaataatgtctcccaaaggtaacagggtaccaaaccccgacgcatatatatcacatggcttatga

SEQ ID NO: 108404 - DNA, 1034 bp, Cannabis sativa
atgcaactataaggcaaccacaaaaaataataaacggacttatatgtaacatgtcgttccttaattcgaattagatcttgttattgtgttttaaagaaataaatttcacattgtaaaccagaaatcaaccagaatgcaactgtatataacgtagatttagtattttaaaaaatttcatatcataccttgttttggattcgaggggaagctccagatctgtttaatacagatttacattgcatgaatctggatttttaattgtagagggagttgttttgaacgattaaaaccaaaatcaaatgtttaatttcagtttcttcccagtttttttggttttttcacagtttttctgggttttttttttcgtaattttctgtttagatcatcgcagtttttcttttccagttaatttttgccggaattgatggttgcattaccctcattttggtttcattttggttgtggtcttgatttgaaagatagaggtatgttcatcttcttcgttcattccctgtggcttaaggtatagaccaggtggtatttttgtaattttttaattttggactgtataaatgttgaataggttgcccatagtaataatgtaattttttatccttttatgcattttcttgtttttttccctattttatatataatgttatatcttcaaacataataataataataataacggaaaaatttacaccaaatactatttttttctaaactttatatttatactttgataaggaaatttttacattttatattttttctacttaattttttttctttttcttttttactgatttttacttattaaagcttaagaaaaactttttttttctcttctttatatttttttagtcatttttggcagactttttttaagtcagttttttacttttttttttctttctttcacttttctctctctctatttcttttttttttttttccaattctctttctctctccttgtgtacattttttttatctcttttttaacactctttttctcttttacaaaaaaa

SEQ ID NO: 108405 - DNA, 648 bp, Cannabis sativa
  modified_base (439)..(445): a, c, t, g, unknown or other
attcttatgtatttaaaaattaaataaaaaattacaaaattatcaaacacataaacttaaaatttaatcctatgttaataaaaaaatccaacaaaagaggattcattaaacacaaaaaacttaaaattaaattaaatacaaaattaaatttaaaacctaaaaaatctgatatcataaaatccctaacccctaaaatcatgttctctccccttcacttctgcgaatgagaacaaatctcatcacttctcaacatcttacgatcaaccagacgcttgccaagaccaatagtgcatcgtccttttcctctcttctcgacaacctgcctgcgaaccagaggcctaccaagatcaacaccatatacaaaaaacccagaaaaaaaatacaaaaaacccaaaaaaaaatacaaaaaaaattcttgagcttcaaagggttgcgaacnnnnnnngccaagaccaggcgtcccatcgaagcctctccgagatctccgtcgagatgctccgtctggcatcaagctaagagaaacagagagagggacactgcgaggagggagatagagtgaagctgatccagatctaggggttttcaagggttgcgaacctccatttggctctgagaagatagaagtcgagaaagagatggagagagagt

SEQ ID NO: 108406 - DNA, 796 bp, Cannabis sativa
  modified_base (311)..(315): a, c, t, g, unknown or other
  modified_base (727)..(761): a, c, t, g, unknown or other
actttatgaatctgacttctgaaacaccttcaaacagcgaactcccttcgtctttgaagtatgcatgcttacttcctctcgaagtaaggcttggaccagtcttctcccgaacactactctcttgttcagtctagttgttctaacaaactctaagacagagtaagaactgatatgaaaaatactagaacctagatgaaccaactaggttctcacaaaaagaaaactctcttctcacaaataataaacatgcaaaaaaaaaaataaaaactagaagagttgattcgaatagctgctctctaggttctatttannnnncatagaaaccctagagacagccacaaagtcgaatctacagctgtacaaaactttcttaagaaaaacttaatttgcagcatcagaaacagcttctgtcgcagtaaatcagaccagaaaaggaaacttgccaaaaacgagtccgatcttgtattgggtcttgatacctgccataaacagtgtgtatgatctgatataatcaagacagaatcgaacttattaaggaaaacaataatagtcaaagtttcctttaaaaactttccataagagaatttcttctcttacaagaagttttcatacaagaaatatccagctaaaaaataatctttccttagatagaaaagagcaataaaaacgaataggaaaggtgattaatcgtattgaaagcacaaaacactacaaaaaactgctactnnnnnnnnnnnnnnnnnnnnnnnnnnnnnnnnnnnttgtgactaaatgtgactttttagtcacaacaaaa

SEQ ID NO: 108407 - DNA, 706 bp, Cannabis sativa
gacgatctggacgaatgcttcaaagtcctcaagaagtacaacatgaaactaaatcccttaaagtggtcctttggagtcagctcgagaaagtttctgggtttcattattaatgaccgacgaatcaaagccaatccagagaagattcaagtcctcctggatatgaaattgccaactaaaactaaggaagtgaaaagtttgactggtcgaatcgccgcactcagcagattttcttcaaaataaccagacaagtgtgtcacattcttcaacatcctgcgaggaaacaagcaattcgagtggacggaggagtgtgaaaaagctttccaacagctaaaagcacaactcgcaacgcaaaacctcccatactcccaaaacctcgagacggagaagaacttgggatatacttagctgtcacggagcatgctgtaagtgccatgttgattagagaagaaaacaacatacaacacccggtctattacatcagtaaaagactcattgaggtcgaaggccagtatccattgatagagaaactcgcttactgccttattctagcaataagaaagttaagaccctattttcaatctcatcctgtttaggtgtacactgaccaaccattacgccaaatattgcaaaattcggacgcctctggacggctactcaagtgggcagcggagttgggtcagtccaaaattactttccaaccccgaac

SEQ ID NO: 108408 - DNA, 546 bp, Cannabis sativa
  modified_base (352)..(360): a, c, t, g, unknown or other
tcgttgaaagttatggttggctctcctgcgcgtggaactttggacttcctctcttccacgggcaggatgacttcttcttgctcatactaagctgttcatgcatatcactctcgagctttgcccatgtccccaacgatgtgtgggcctccaacaatgacgtgaaagtgtctatctatcggtggaggtaacagatcttggttgttctgaccttggttggccttgacatacttttgtaagtgcgggttgtttttcttgatcagatattctatttcccgcttcaggttgtagcatttgttggtgtcgtggccgtaatctccgtggaaccgaaaaaatttcgtcatgtcccttttgnnnnnnnnnttcttcatgggcccgggcttcttgtacgaaattaacgactgagttgccatatacacactctctatatcttcagttagaatagtgaatgtagtgtgtttggcatgatcagggggagtttgtccggatttctcggtgattttcatttcttcccgtttccttgcttgtggttgttgcctgaacgcttgc

SEQ ID NO: 108409 - DNA, 749 bp, Cannabis sativa
ttggatggccaacattgctttttaatgcctcctacttttaagtttaaactttaatatgcggatgtttgcttgcgttttattcacaatataaacaaattacatgcataaagtttacaaattacatggattccacctcgcgatcatcagagatgatcttattttaagcaaactcaaatatgttttgaatgaacttgtcattttcaatatattttcattgcttacatgagtagttaaattttctacccacgtgtttggtttaagtattttttcaagacactttgatgtctcgtttattactttccctaagcacgagtcgttagtattcagctttatacgctagtcataacctttgatttttcctttctcgtcaaataagatataaataaaaaattacaactgtttgatcctttcctcgtcagaaaggtttgatcaaggcgttataacgattcgaccccttttccgtcaaaaaggtttggtcagggagttataacagttcgaccttttttctgcaaagaggtttggtcgaggcccttaaaaagttttcaaataattttattttttgaaacgatgggtttgcattgtactatgtatttgcagattaattcttgttaaacataaatatatgcccctcaagtaattttaaagggtttacgctttataattacttgtttgaaagaaatgattattttattcacaactgaagttcaaaatgtttcatcaacatagtgatttacaatcattaatctcat

SEQ ID NO: 108410 - DNA, 1039 bp, Cannabis sativa
tctcattaactcatgaatcttatgtctaaaccatcaattttttcaaaacaaatttataacaataggaaaatccaaactaaaacttgtaattaaagtacgacagtcactacccaatagataacaaacatataacacatcacatttaaagtaacaatcaaattaaaatatttaagaccatagttttttttaccaaactcaacacatgacagccatcaccattccattgttttcctttctttcaataatttttttgtgtcaaaatagggaagccaagggtattaaattgtaaaccaaaacacttgggtaaaaaaaaacacacccaaaggaccaaacacatgaatcgactgatgcttttcacacaaattaccaaataaaattgattttaaagagcaagtatttttcatcaacactgtatataccaatgtttacattgcttttgtttctttcattacattcttttggtaaaaatgtttcactgcaagggtattaaattaatccaaaacactttcatgataaaaaaaacaaacaaaaaaggtaaacacatgaatcgatttgacacaaaatataggaactgacatggatatttttaagtaactactttccagtactctaaatgtagaaatggggaacataaaatgtaccttcgactttcagcaatctgtgaatcaaaacttgttcacaaagcagatttaaggcctgtaaaacggattaaaactactcaataaaccaaaaatgaaacagaaaaaaaataggaaatgcacatacacggattgaagaacaacacttttctttacaaaagttttaatcttttttaacaatgttagccaaatttttaatgctccaaagtaaagaacgaacaacatgcaaaagaagaagaaaatttgtacattcggagacacttacttgtacaaacccactgcggttggagacggagccggagatacaaaaaaccaagtacaccaactctgaaactactatagtttcctcccccaaattttaaatttattttattccgtaaaagaaaatgtgaagaagaaga

SEQ ID NO: 108411 - DNA, 534 bp, Cannabis sativa
aatattttgacaatcattggaggagctcacatcgccagagacttcaggaagtcgcaagaacgatatgccaaggaggaaaaagagaggccactcactaatgtgaatattttgactgaacggctagaaaaactattcaagaaggagtgcgatgacataactttcatggaaagcgacgccagatgggtttaccacccacacgcagacgcactagtcatcgttgccaatattggaggagataatgtccaccgcatattagtggacaatggaagttcagtgaatctcattaactttcaagctttcaagcatatagggttacaggagaaagatctgcaaccagtagttttgaatatctacggttttaccggagatgagattgcattaaagggaatgattaaactaccaatcaccctaggaaccgcacctgtcgctgccaagtcgatggctgactttgcggttatcgatcagtatccaacatataatccggttattggccgtcctatcttgaaagaaatgaagattgtgacctctatctat

SEQ ID NO: 108412 - DNA, 714 bp, Cannabis sativa
atcagaaccagagagaacttgtgactttgcagagtcaaattcagatgagagtcctgcaagaaaactcataatagccatctgctctctttgacgttgttgaaattttacatcgagactaaagggtaatagcacattaagttcttcatacgctttcttgaaagccataaaataattcataagagacgtatcttgtttctccgcacgataaaaggctttgcaaacatcatatatgcgagatatgttgtctttgccagagtacaaaaactccaagtaatccagtagttctttaaccaattcacaatgattaatcaaactaattacctcattatcgatagaattttgaatttgaagaaacaagcgagcatcctcacggagccataatttccttgaatcgtctttttctttgggaggatcatcagtcaagtgatcatctttgtcaatactcctcagatacaatcgaatagtcttactccattccaaataattcaaaccaatcaatttatggtccgtgattttagacatcacgggaaccacatcagaaacaacgattgatttcgaatctgattttatctttgccataatctcgaaaccaaaaaaacaattgaaagggaaaaggaagagagcaaactcaaagaatagatacccaaacacaaagaaggcaaaagtatcaaaccacaaacggccaagaatcgccggaaaccgatgcaaggagga

SEQ ID NO: 108413 - DNA, 776 bp, Cannabis sativa
  modified_base (600)..(602): a, c, t, g, unknown or other
  modified_base (681)..(683): a, c, t, g, unknown or other
agttgttatgattttgtaattttttttccaaagggtatataatttttcaactactatctatgtataatgccacattattaatttaacagtcaactttagtcaattttaacagaattagatagaaagattatactattccgatatatattagggggtatttttaactacacttatagattaagaagcataatagtatagtgtcataagtagagggggtaaaaaaattaattattctttactttattattctaaaaaagagacattaactttcactagagagagaaacaaggccatttgctaacatttctctagaataaacttgttttgagctaaaacccggcccagatgcacttttatccagatttggaccagtactatctctttcgaatatttttttaagaataaataaagggattttataaaagggaaacttacaaaaatattagaatttgggttaacttttacaaaaatattgtcacacagaaaagttttcaaaaatattgtgtttttataaaacaccaataaaacaagcagaacaacttaaaacaacagtagaacaactaaaaaaataccagttaaacaccagtgaaaacttaacannntatactgcagtatgaaacttataacaaaatacagtaaaaaagtacaaaaatatttgtaaaaaaatggcaaaagttagtnnnccatgtaaatttcccttataaaattactcttttttttttgttatttttactgttatactttttttttacttttactgtactaagtattcaaaa

SEQ ID NO: 108414 - DNA, 747 bp, Cannabis sativa
  modified_base (190)..(197): a, c, t, g, unknown or other
  modified_base (244)..(259): a, c, t, g, unknown or other
gtgtaagtataccttatcgctgattatcatgttagtctaaattcagtgaactgacgaatcatgagaattaaacttttggacatatattcttcattactgtgctgacgacactataatcatgaataaatatatacatatttatatatgttctggacttattagaatttatacattaaacataatcatgaannnnnnnntgtgaaccattgcaacataaaagcgatttcttatctttattaattannnnnnnnnnnnnnnntgaaatgggttttatttaggacacaaaacccaacagtaataacattagactaaacaacaacaaactgatcaaatatattatcaactctgttgtcatctttattagtagagagctgctcattcgaattaaccacacgatctttttatgggacaaaagtctcaaccacacttcgtgaggtgacagttgggggagtaggccctgaattcacatcatttttacgttagtcacaaatagtgacaacaaattctccacacttatttttgccttcaaccctaagaacactctgacttgaccatctttcactaaaatcttgtggtatcatagttcctttcatgtacatctaatacatctctaatttcaattcatacaccaaaggtgtgatagtcagtagtcccatgatccgtaagtggaaataccgggtaacctgcgcaatcccacatcgccttggaaagatcaagtgggatgattctgagactgtgtaggtatgg

SEQ ID NO: 108415 - DNA, 569 bp, Cannabis sativa
gggacccccattcccttttttaacattagggtttggtttggggcctaactgctggatttcttattttttttcagaatagaaatgtctactcctacctccaggacaaaatcttccaagaagggggcagccaccgtgactacactggaggaagtaatgaagggccctgttgcccaggagaactacacttctcgcgccaacggcagggaggcggatgagctccattccaccctggtttgtgctcatcaactagagaagatcgtgaccgtggctggtatcaagccgtctgcgtccggggtctttcaccgccttcctcgagacgaagagatgcccaatcacaactatgggaggttcagagcttggagccaaacccatcttatttctggggctatgctccctcttcaagactacttcattaactttcttgtctttgtcggccttgcgccttataaattaattccacaagcttaccgtctgctctcaggcttgtttatcttttacgttgccagaggctgggcttcgcctagcccggccaaaattttgtatttttacgaacttgtatctgtccccaa

SEQ ID NO: 108416 - DNA, 693 bp, Cannabis sativa
agcaaaagttaagcgcttataaagctatacattatcaaaaatatatgtagcccaagtgggagattattggattaaaatcctcaatatgggctttatgtattggtgtattgctatttgaaatttgactcaaataatgtgatcattttagtaattatgggtcattgggtattaaaggattatgagctaaatgtgtagatactttaagggatatttctaatttattgagtggctaaattaaaaatacttaaaattaatagggtaaatagcggcataagtacctaaagttttaagtttgtaagtggcataaacccaatatttatttttagcggcataagtgcctaatgtttataaaattataattttcctccaattttgttagtatagactctattttgatttgttaaaggaacatttggaagtaactaatattacatgtttctgtctagactcaataatctacaatctagaccttatatgtggcctgtttaagaaaataacagagtttgtattaacgaaagtaaagaaaaattacagttttacaaacattaggtacttatgtcgctaaaaataatagggattatgccacttttaaacttaaaactttgggtacttatgtcgctactgtgaagtagtcaaaaatgcatatttattagtgtaaaaatacaaaataaaattaattctatataatatttt

SEQ ID NO: 108417 - DNA, 681 bp, Cannabis sativa
taatattttataataagagcatcactaacgagacttcatatttggtgatgccgtgaaattggccctccaacgtagctgcaaatattacactaaattaccgtgtgtgctaaagtgcacgacatatatattatgcactgtacacacggcatactttttttatatataattaatttttgtatatatttatagggacatgattttgtctcgtgattgtattacttttacggaatgtatttcgtgatgtatgacaaccatttgatgagggagttatttgatctgagggctgagattgatctaggaataattaaggttaaaaaatagtaacgtaccctgacactcatttaatgtaccctgagactcatctaatgtaccacggaatacattccgtgaaagtacattacgggacaaaattgtgtccctatgtttatattattaattgtatttattaaattacaatgtatctttctaaaagtggtacactgatgtacttctacctgtttcaaaatttgagactttttttatagtagcgtacattatacttatttaagacatcttctaaaattttaaaaatttgaataaacttaacacgctgaaaataaggttcaaactgtctattacacgggtaactcttttatttagagagagcattgtaaaagtaccttttaatttattgtgtgtaaa

SEQ ID NO: 108418 - DNA, 554 bp, Cannabis sativa
cacagataatgatattgttattgagtttgactctgattcttgttttgtgaaggacaaagccacaaagagggtgctgctcagagggatgcttaaggatggcctctaccaaatttctcctaccttttccaactcttcctgttaccaaagtcagagtccttgttcttcaagtggttctgtagggtctgctaatattgttcaacatagttctcttttaaattccaagaatgatgtgtggcataggcgtctaggtcacccatctcatagagtgttaaagttggtcttagaatcaaacaatgtaactgttccatctgaattaaaaacaaacttttgtgatgcttgtcaatatggaaaagctcatgcattgccctttaaaaattccaccagtagagctagaaaaatacttgaactaattcatactgacatatggggtcaagccccgattgcatctaataccaactttaaattttacattcattttgttgacgattatagcagattcacttggctctatcccttgaaacacaaatccgatgccttaaatgctttcattcaat

SEQ ID NO: 108419 - DNA, 771 bp, Cannabis sativa
  modified_base (345)..(348): a, c, t, g, unknown or other
agaggagttgaagctcaaagttggaaatggcgagttagtatcggtccaagctaaaggaagagcccgcctcaagtttcagaagaaatttttagttttagacactgttttgtttactactaattttagtagaaacctgattagtatttcatgtttacaaacacaattttataaattgaatttttcgagttctgtttgcacaatttctcgtaatgaatttcaattatgtgttgctcacatggagcaaggactttatgttttaagaccagatacacaaatcacacttaacaatgaacttttcaatatagctaaaagtagaaacgttaaaagaaaagagattgataatgnnnntcaaacttatctatggcatttacgattaggtcatataggctattatagacttcataggttaaccaaagacggtccattgaaaaatgtcgccttgggtgaattaccagtatgtgaatcttgcctagaaggaaaaatgacaaaacgttcttctctacaaaggtagagcgtgccaaacaaccccttgggttagtacattcagatgtatgtggaccccttaatgtcaaagcccgaggtggttatgagtattttgtcacttttattgacgatttctctagatacagtttcatttacctaatgcaaaagaaatctgaaacgtttaaaaagtttcaggaatttcatcgtttggctcaaaaccaatgaggtaagatattaaagatcttgctaattgatatgggtggagagtatatggatatgcagttcaaa

SEQ ID NO: 108420 - DNA, 568 bp, Cannabis sativa
cttattatgaaagtacttagtattccgatcacccatagcaagccaatccgccctcgacctcagcttccaataacactcctccctggccaacagatcattcaacttagtctcaagccgtttgacctcatcctttcgaatcaacggggccgacacactgaggagagcatccaactgtttctgagtttctcgcaccaacttaggaattgaaccaaacttacttttattccaagctcctaaccgatcggcacacctcccaaaaatatcaagaatactatcttggttatccaacgggccatccggagacaaccacgcttgagtaacaatgtcacgacactctgcatctttcaaccaatgagtttcaaaccgaaaacttctctttttatcatgcggttgactacaaacaatattttccagaaccgccacaacatgccgatggtccgaatgaataaaatttccattaatgactttaacagatggaaacaaactattccactcttggttacaaaagtatcgatccagacattcttgcacatgtgccgccccatgccttttattaagccaagtaaag

SEQ ID NO: 108421 - DNA, 1032 bp, Cannabis sativa
gtcttccatctcagcagaaaaagtgagttgttttttttaagtttattttatgttgtataatagttgtttaattgttttttttccttgctgggtaatagtgattgcggagcatttgtggccgcatttgacgagttcttcatccatgggaaagatgttcctggtgatttttacattgaagtttattgtactcgacttgcttccctcttcttctcgtacggtcaaaggaaaactgatgaaagtattgatagcgaggatgagaagaaaagcaagtctttcaaggctcctaaattgaaaaagtagggtcaatttttaatgaaaatttgttgttattggttgattttcttttcagacaattttttgtttttttgtttttttttttttttttatgtttgtaggtattatattcgttttatattctggaactggttataaacttttaggatatttgacttaaccattataatatgttcttttttttttatgttttgtaacagcaacagtgttataatttttcaattaattatgtttgttttttttaaagtcatccaactacagataaactattatgcaactgtatacaaactatttttagtgttcaacatacttgttatttaatttgtgacatgttacctcaatatattccttactgttatgcaactgttttcttctctttattatacaacttataaaaaatcatatctgacttttaaaaaaaaattatattaaaattcttttagtaataaatcattaataagtgtcaaaactgtcctgaaactattatgcaactactagcaaactatttaaactttgccaattaataacaatctatcaaatataatatttcatcctgtgtaaattctcatagagacttaaacaattcaaataattttgttgtatctattttattttttgattgttgcatgtctttcgattgtgaccgtgttgaccacatttgcaaaacctgttctatttttttgtatcccaatcagctataaatcttcttttccttggtcttccagatcttattttttg

SEQ ID NO: 108422 - DNA, 713 bp, Cannabis sativa
tgtgtaaaatggatttttcatgtaaaaatttcttattattttaaaaaagggacattaactatctataaagttaaaaatggggtcatttacttgcatttctctatatttaattaaacaaaaaagaaactaaaaagttatatatatttttgatcttttatttggtgaaggtaaaaagatatatattacttattaaaatgatcatttaaaaaaaaaaattgtaatggtgaaatttttaaactcaaataattaccgatgtggttggaaaagtatattaaatcttttttttttttttgacaaagaagatcaaagccaagagagacaacagaaaagactaagatcttcaagagagagaactagagtagttccaaattttctcttcgtccgttccaagggctgctcgagcgaggtcatgggctgtggaatttaatgtccttgggatgtaatgaaccgaggcacctggaaaaggaagcaaagaggagacgatcttggaaatataacctgaaagagcggaacgatcgtggctaaacttctgaatgcggtggaccaaattctggcagtctgaggcaatgatagcaagtggaaaacggactgcctggcaccaactcaaagcacggaggagagcttcggcttctgcaaaaatcggcgggagccctgactttgagggggaggataaagaagcaactacttgaccccgactgttggtaatgactgct

SEQ ID NO: 108423 - DNA, 936 bp, Cannabis sativa
  modified_base (562)..(574): a, c, t, g, unknown or other
  modified_base (899)..(902): a, c, t, g, unknown or other
ttccatatctatgatcagtgctcttactcaattgaacttccatgttcccaagatgtaagtatccaccagaaccaaaatttggcttccacgaacaactcaaagaacataaataatacaactgtgctgaacctaaccatctgatcagtagactttctagcactaaggcaagtctagaaacctgctttggtgtagtctaagagtattaaaataccacccttatcactaacatatagttcgtcttcatgatcttaagatttacttgattttattccaatgttcttttcttggattaatctggtaccaactcattactcccactcaacagcaagtgtttggtctaatgcatagcaaggcatatttgagacctctcacagttgatcctaagaaattctttctttggcctttatcttttctggaatagttgaaactttccttagacaaataaaatgctctaccattttactaaagtaagttacttgcactaaagtaaattaccaggcataccacaagccataggtttaaataatctcaaacctattttaatactaggaacatgaagttnnnnnnnnnnnnntgaatagacttattttcaaaatttactttcttgtccttgttatagaaaacttttggttactccatatgaatggtttgaaccatagttctcttggctttacttcttagttccttattctgacaatccattacatgtttaaactatcaatggatttttatcactggtgtcttcaaagtcataacaaggtgagttccttaaaaccctccaactatgataaggtaccgtgactttctgtcaaagaaaataagtggtattctcctctttggttgggttaagacaacagaggcagtggggccatcttatttcaaataagatgatagaacannnntggaatcaagaaaaaatatctcctctactttgct

SEQ ID NO: 108424 - DNA, 701 bp, Cannabis sativa
aagtgtgggccctaggcacgggcctagccagcctatacctagggccgaccctgctagcaatagtatgagcaactcaatttgctgatcatttaataagaggtaacttaacatgacagcacaataactcacatcaatagccgtggtgcttattataagtagtgctttttagcaattctccttaataatgcattgtactgtatgccacgtgtcttacaattagaagtttcttattttcacacgttaattaagtattctgttctgtttaaatcaaatcaaattatatatcacattaattcatgctgttaatttgtttgttttcccgacaaactgtatctaacttttttagatccaaataatgtgtttaattcgatcattgatcactgatcagagccaattacaaaaacaaaaattagtatctaattaataaaagtaaacctagctagatggacgtgagtcacatcgcttgatcttataattagcttatgattaatttctctaatgcgcctagtatatataatatattatataattaatataggattagacacattaatatgccccattcattctacttttcctttttaatattaattatgaactttgattagtcaatatatccttaaatttgaccaaccaaaaaaataaaaacaagaatggaaaaaaaataaagataagcaaaatgaccacacacacatatatat

SEQ ID NO: 108425 - DNA, 579 bp, Cannabis sativa
cggggttgaaagattatctcatatagacccaattccactatccattttagtaaccgtccagaagcattaggtttttgtaatacttggtgtagatgttggtcagtgtaagcttagattaggcagtaagtaagcttttctatcaatgggtatcgtccttcaggttcaacaattcttttgttgatataatagactggatgatgtacgttgttttcttctccgagcagcacaacactcacagcatgttctgtaacagctaagtatattcttaattcttctccgtctagatgttttgagagtacaagaggttttgcgagttgcctttttagttcttcaaaggcattcttgcattcctccatccattcaaatttcttgttacctcaaaggatgttgaagaaaggaacacacttatctattgactttgaaacaaatctactgagtgcggctatccgaccaattaagctttggacttcttttgtttttgttggcgatttcatatccagaaggcttgaattttctctacattggcttccatacctcaggcattaacaataaaaccaagaaacttacccgagctgactc

SEQ ID NO: 108426 - DNA, 740 bp, Cannabis sativa
catgttgttttgctggcaccgctgaggaggcacggcaggaggaccctactgcctcaatctctgaatctctttatcctgttggcggatcagatcttgcatttccgcaaatctttgctcccaatctggaggagcttgtggtggatttacagggcgaccaccctgagctctgccacggccacggccgtgaccacgaggattttggggatttctctaactgcctccggtctaaaccatgtcaccctgacttcttgtatttcgcagggcgtccattttataggacttagcctgcgaatccataagccaggcaggttagacagcgatcaaaatttaacacggctcttaagtacttaaagataacacactttaaaataataattaaaatctaatatgcttcctaacatactttcccattcacaattaattaaaatactaaacaagtacgggcttactgaaccatgaaccgagccttctctgatgaaaattgtacatgtcttggcaagcttcggtagacaaccctggcggctctgataccaaaattgtaacgccctaatgctaaggcgcgctacactgctttttcaattacagtgcaatctttgctaatcaaataattttcttgaaaaaattttcaaattaaaacttttacaataattaataaactttatattatattaaaatatttacaagtgtcgggatcccatttttaaactttttaaagttaatattccaaaatacatatatta

SEQ ID NO: 108427 - DNA, 880 bp, Cannabis sativa
aaatcaagataaaaggaatgacaattgacattaactagggaaaactttaaacaacattcatcatcttcctcaattgggaatttagttcatgttcaaatccatgacaatactaaagcagaatttatcataaaagaaataaaaaggaaggaagaaagaaactgttggtggaatgaatctgggctgccactctactccttctgccgttcttgactgcttttaggtttaaaatttgcttcccctcttctctttctcgcagtttcctttatatttttcatcccagatttcaaaagatgaaattagcctccagttgtacggaacctcaacgcggccatcgattacctcgtcgcggcgagtgttgctttggccgcggcggtaaagtaactcgccgcggctactggaccaacctcgaaaactcctttctgccaaatcttggtcgcgaccgttaataaatccgccgcggccaaaagtgaaccaaatcctgattttttttaatttttcttggctcaacttgtcttttatcgtacttttgaaaccccgaacgtccacagctatgggaaacctgaaaacatagagaacaggcataattctatcctaaaacatcaaaaaacgactcaatttgtgacccaaaacataggctaaaaatagcctaacaacaacaatattctaaaaataaaatataagcgtgaaaatcagtttcgaacctagaaacaaaataataaaaaaaaaacttaaaatcaaaatataaaataacatcataaaatggagcaaccctcattacaaaacccttaagacatgtgaaactagttttaaaacccttaaaatatgttaaaccattttcaaacctataaaactagttttgaacttgtgaaccctgtgaaac

SEQ ID NO: 108428 - DNA, 549 bp, Cannabis sativa
cacagagcctactccagcgggagtagggaacttcattgtgagatgatagatcgaggttacgatcttcatctccttcaatattggtcgaccaatcacagtattgtatgccgaatactggtcaattactgcaaagtcagccattgacttggctgttactggggcggttcccaaggtaattgggagtttaatcatccctttcagcgtgatgatgtcgccggtaaaaccgtatacactcgacgtcacaggtcgcaagtccttctcatgcaactccatttgtttggaagcttggaaattcaagagattcactgaacttccgttgtccacgagtatacagtggacattatctccgccaatattggcgacaatgactagtgcatcagaatgcgggtgatggacccatctcgcatcactttccataaaggtgatgtcgtctcattctcttttaaaaaaattctctggccgttcactgagattgtttacattggtgagcggcttctctttagcttccttggcatatcgctcttgagatttgcgggagtctcctgcgat

SEQ ID NO: 108429 - DNA, 554 bp, Cannabis sativa
tagagagactaactctagaggaaagtccacttgttcagcgagacacggatacttggaagttattcgtggatgatgaatccaacgagcaaggttcaggtgtgggagtgatattaattcttctagaaggctttaaatttcattatgctttgaggtttcaatttgatgcatcaaacaacgaggctaaatatgaagccttgatcactggcttgaggatagccgaagcattgaaggtcaagaatcacgtatgtcatagtgattcgcagctgattgtaaatcaagttctcggggaataccaggctaagggcctaaaaatggctaagtacctagagaaggttcggaagaacttggaaaagtttgattactttaaaatcaagcaaatcccaagagaccaaaactctaacgctgatgctttagcaaaactggcctcgcagaatgacttggatgaattaaacttagttccattggagatactaaaagagccaagtatatgtgaaaaagaagatgtcgagatgataggtagctcacctacttggatgactcctataatcaactat

SEQ ID NO: 108430 - DNA, 681 bp, Cannabis sativa
tattttgatctgcattagctaaacaagactatttgtagtacttattgaatttagagtttggttggaagaaataaaatttccattatagtttgtagcttttgatttcggtacgataagtatactacagtgttcctcgttatagcatatgtactttgtaaataaaaatataagaaaaaaaattcaattatttttcgatttcatttgagtttcagtactagcattgttactatttgattattttctttttttgttgtttactatgattaattattttattttttattaaatgttattgattgatctgttgtttgttgttgcttactttataatttagccaagtactatgtttttatatattgaatcttgattgggttattcacatgtatttgttttattattaaaatttaattggtgtttggttagaggtaatgaaatggaataaaataaaaatgaaataatttttattctattcctttgttcagttgcattttaaagtattggaatgacattctaatagaatgttctttccactattttggtggaatgactattctattttaaaaaagaaggaaagaccatttcaatgtaacaagagaaaaaatttaataatttttttatcaattttttttgtgcattttaatggttcacttggattgtaccaaatgtgcctagaatcgattt

SEQ ID NO: 108431 - DNA, 510 bp, Cannabis sativa
aacatttaatatatgttggtgctttctttcgacaaccgaattttgttgtggtctttccacacatgagtggtagtttatgatgcctttggaggcataaaaggattgtaaatttagttctttggcattatccgatcggatggcctttatatttgtggaaaattgcgtgcaaaccatgttaaagaaagtgggaatgatatgttggacatcggatttattcttgagcatgtaaagccaagtaaatcgagatttgtcatcaacgatagttagaaaatatttgtaaccttccacactaatgatatgaaaaggaccccaaatatccatgtgaattaaatcgaacacattcttggaaaaattgttgttggaaatgaatggcaaacgcttttgtttagccaaatggcaaatatgacaatgtaaatgtgaatctttatgtgaaatcttatgttctttattgaaaaaatttgaaatacacatagaggggtgtccaaggcgattgtgccattggtttacact

SEQ ID NO: 108432 - DNA, 717 bp, Cannabis sativa
  modified_base (690)..(690): a, c, t, g, unknown or other
aaagaaaaaatatgcatcaaaaaagatcatatatataaaaatcctggccctaagggcaggtaaaaaaaaatatatgtacaaagggccctgggacaggccttaatatttgtttccccttagaaaataaaacagttactaagttaaagattgtcttagataaaagagaaatagctgtaaataaaaaaaagaagtgagaaaaagcttggtaaagtgggctggactcaatcggcctagtcaatgcgaggaggaaggcgaggaccaatacgcgcctcaagcatggcatcaagtttcttcttcatctcccgaaatttggcaataacctcctcaggtttggggtagaagtcaagcttgatactctggccatttgtcaataggccatatagacgccatcatcgaagcgcttgacacaacgcttgtaggagacgggggacaggagctcatctcttttagccttctttaaggcttgatctctgaagtcttttagctccttcatctccacggccaagttagccttggactgcaagtccgcctggtgcaactcctctaaggacctcaccctggcggccatctcgtctatggcctccttagcctgccgaagctcgcgcttggccttggcagtggcctcgccctctgccctcagtgcctcccggtgcctggcctccagcctatccctccgcaggacctcctctnggagcatcgcctccgcctgggcttccc

SEQ ID NO: 108433 - DNA, 667 bp, Cannabis sativa
  modified_base (47)..(56): a, c, t, g, unknown or other
caaagattgagaaatctaacggctaggaatcatgcagaatatgaatnnnnnnnnnntaatgatctttgaaaccatacaactgtcaggatcaaaggaggtgtcctatccaagaaaggatttgccaaaaatgtccttcgcatttattaaaaagctctttttactaaaaaaataactttgtaagagacaattgctatacccgaaatttagctggaggacacatgtcaagataaatagaatgtgaattggtgccatatcttttttggaataactcattaattacgtaagtatcaaagtatatttgtaacccactaattgtaaggtcttaggtgaggaatcaatgtacgaactggtacttagtgtagtaacgagaaatcatatatcgctaaaggagaatagcgaggcaccagagaagagtaacacataccttagcttacaataagaaaactaagtataaaagtcggatcatctcgaagaacaagaatgcgagatgaccatctcgctacgagaaaacttcctatagtttcatccaactaatggaagcaagactcataaccctagcaaaacatatcatgtcgacctcgaaaagaggaatcgttccagctcgccattgggatcactacaatcaagtttctgtcgagacatctccagattcaacaattaaagacgt

SEQ ID NO: 108434 - DNA, 721 bp, Cannabis sativa
caacccgaactaacccgattaagagagttttttttttatatatatatatgtttttattatatataatctatatattatataatttatatacataattataaaaagtaaaaagttcaaattaactattttatttgtttatggcgaattattttaactttaaatttaatctttatatttatctcattatcacaataactaaaatataatcattgaatgtgaaaaaaaaaatagacattagtgctcggtttggacgggttaacctgactaaatcgaccaattcattgggcgggttgaaacttttctttttcttaattgggcaggttgccactacaaaaaatcttactttagtcacaacaaaatttgtgactaaaagtgaaaaaaattgtgactaattataaattattattcttatattgtgactaaaaggtccgtggctaaatgtattagtcacaaaaattacaatttgttgtaactaaatgtatttttagttacaacaagtgttgtgactaaatgtatttttagttacaacaagtgttgtgactaaaactaaattagtgacaagttgtaactaaatactatgttttagttacaagtaacattttgttgtgacttaaagtcacatttagtcacaaaaaattatgttgtgactaaaaagtagcaattttttgtagtgatacacttagattttagtaactcgatctttacattaagttaaataaaa

SEQ ID NO: 108435 - DNA, 522 bp, Cannabis sativa
agccttccaaaaatcaaagaagagctcgaggtcgacagtctccaaagcatcaaccttctccgtcaagcggttcgcctcgaccgtcagagcatccttatcatccttcaggcgaaggaggacctgccgcagagaagtcctctgatcttgaagacgattaacctcagcagataagaactcgatggtttcctcaaagcgatcagcagcctcgaggtccattgtcagcacggtgaccttcttctcagcggcaaaaagcttcttgttggcctcacccaactcatggcgaacagctgcagtctccgccctggcctcctcaacttccttcttggcgaagtttgcctccgccctcaatgtgtcggacagagtcgtactcttggaagtagcagatttagcccgggagtaggtataagccaacttcaaaccggcctacgtagaggaaaaagtcagtataagaagctaagtatgaaaagctaaaagggaagtgtcgaaaagaaaagactaaccctggtaagctccttcaagact

SEQ ID NO: 108436 - DNA, 565 bp, Cannabis sativa
tcctaactcaatcacattttttttctctatgaaagcgtacaagtgagtggtagtcggtggagaccctatgtaataacgactaactcatgtagagttttttgtagtttccatggagctacttagcctccctattttttttttttttcaagaagttctaaaacattaatgattggagttggctttttgccattatgaatacactcacgctcatctatgcctctattttgtcgctatgttttggacattgtttaactcaagtattgtaacgccctgaacctcaggaacgccacgtgtgtgcttttataatcttattgccattaatctattagtttaggaaaagtgtggtttaattaaaatctttaattaaatttaaaatagaaactttaacttaattcaaaatactgtcgtaatatggggatcccctgttggtaaaaattcttttacaaccaattttaaaaccgttatacaagagtaggttatacattcaatcataaaaaaaaaagtgatcctgcttcctgaaaaccaagacaacacggttgatatgtacattgctgggagacctctg

SEQ ID NO: 108437 - DNA, 652 bp, Cannabis sativa
ttatttgatctaagggttggggttgatctaggtgtaattagagttaaaaaatggcaaccggttatgtttttgaattttaaatttattaaatttcaaaaagttgaaactgacatccatcaatcacatcaaccgtcctccactcttccatttcattcttcactttctttttgtttttcattttttattttctctatccatttttccattttcgattctgctagggcaaagctctcattttcattttccattttccattttcgtttcagctaagataaaacccatattttacactttcttcacttttcatacttcgttcttcactgtggtgtacattactcgtcttctaccattgttggggttgttgcagtcgtgggtgtcgatggtgggttgtacaagtaagtttttccagttctactttacatacatttcgttcttcactgtgggtattaaaaaaaaaatctttttttgaagggaatgtggtgttagtccatttttcgtatacttaatagttttattttgtctcaagtgtcgacggtgaggtattcaaggtagtttccacttatgtgttgaggtatttctctctctctctctctctctctctctctgtctcccccgtgcatgtgttctgattcttagtgtgcaatgtactgta

SEQ ID NO: 108438 - DNA, 516 bp, Cannabis sativa
  modified_base (401)..(407): a, c, t, g, unknown or other
aagatcaaaaaggggtacgaaaaaactcttatacaagaggccctaaaaatttatactcagaaatctgaataagattgactcgtagactctgcagaattttaaatgcaaaaccacctaaaaatcctagtgttcatattttatttttctatagtttttactatttttgtgttgaatcacaatcgtgaggctcaaatttagttacaaaaatttgcgttaataaaattctattaagtgtagagcatatataaatatatacatatatatttgttcatgattataatgtcgtcagcatagtggaatataatcatgattatatgttcaaaattttacttcccatgatttgtcagttcaatagatttagacttacatgataatcggcgataaggtatacttacaccttnnnnnnntgttaagtcctttccagggcattgacaaagtttactagtatcaaatgtatggagtatacattggattggaccgatattaaatttcgataagatatcataaacttatcgt

SEQ ID NO: 108439 - DNA, 777 bp, Cannabis sativa
  modified_base (458)..(458): a, c, t, g, unknown or other
gcaaaattcaatgtcacaatatttcctttttcctaaggtaatagaatatggttatgatgaaacaaaaacatcacagaaacgcaaatcaaaaggttgaataactgtttaaaaactttaatacagtatctaaacttaaaaatatttaaaaagcaactgaaaactaactatcataaactataatggaaaatggaaactttactgagtcatttataaacatgtcgcaggtagccaaatgataaaaccatgttttatcctccacataatcaacacctaacctaaaacctagggaaaatttcttcgcaccatcaacataacaatcgtaatgcctaaaagaacaaacaaacaacaaaaaaacaatattaaaacacgaataaaactggaaaaataaaacagaatacaaatatagatttaataaaaatagtcacctaggatgtttaagcaagccttgaccaatccangcgtcaaactttgcctcaatctcaagagatacgggatcaacaaatgaattattaagagcataaaggcccttcacataagtaaccattttaaaatccctatcatccccagcttattgagaacctgaggacattacctccattggagtgctccccacatcagccgacccgaaatcaacaaaaggagatttcaaggccggagcacgcttcctattatccgacagaggtgtatcagatacagtgtcctcagtttcttcatcagtatgaagggcagctgacttttgaccaacaacatctggattgggttggggaacctaaaaaa

SEQ ID NO: 108440 - DNA, 633 bp, Cannabis sativa
agataagtaaggtttaactatgaaattagtcattaattctcaattattaatttatgatgatttatttgaattcaaaatgcattttatatgtcatatatagaaattttatatttttgcatgttcagtgcccggcaacattggaacgcggtgtatggctcagtagaatcacatcttggtattttagaatagcggggcggtattgttagatattggaaatgttgagattagtcgggaatttagaattttccaaaatacccttagtacccttttatgtcaatttaatgtgagagggcaaaaaggtcatttttcccatatgtgctttgtttttttgtggattaatctgatttttctagctttgtttggctgaaacaatttaataaaataaggaaaatcaattattttattcatttatgccaaaatcaaaagttagacaaaagtttgcatttcactctcaagttgtctctctctttcgaaaccctcaaaaccagctgggattgctgtgtttttctcattcttcttgtcgattccagcagattttaagcgattttgaactcttggtaagcttttgactttgtcttcttgagtttcttgaattgtaagtaagtaaaagttgcatgctttgaggttttgctt

SEQ ID NO: 108441 - DNA, 770 bp, Cannabis sativa
aaatgggccatggaactaagccagtttgatctacattacacactgcgcacttccataaaaggacaagcactagcagacttcataatggagtgccatgaggtagaagctagtgcaagcgtgcccacaccacaaaccccagcatggaaagtttttgtggacggtgcctccaacgaaaatggatccggagcgggggtagcaatgatatccccaagcggacttcgactccaggcggccctacgttttgaattcacagcttctaacaatgacgccgaatacgaagccttgaatgcagggctgaggttagcaaaagccgtggggccacaagagtagaagtcttcagtgtttcgcaactggtagtaaacgaagtgtcaggagtatatcaaacgcatggagaaaaaatggtcgcgtatgtagcaatttttcgggagttgctccacgagttcacggactacaaagtggaaagaatccccagagaaaagaatgctcatgcacactgtttggctaagttagcatcagacaacgaaattgagaaactgggggtggtgcccgttgaacgtctctcgaaaccaagcattaacgccaaaagtattgtggcggcagttgaacaagagctcaactggatgatccccatcatcaaatacataaccaaaggcgagttgccccaagaaaaggcactatccaaaaggatatggtatcaagcgcaccgttatgtgatgatggataacattctctaccgaagaggactcagcatgccgtacctaaggtgtgta

SEQ ID NO: 108442 - DNA, 671 bp, Cannabis sativa
tgtaaatatttgtatgtgggctgtataaatgtttaatgggccgacccatagtatttttgtaatttttttttccttttttgtattttcttgtttttttttcccttatatcataagctcttatttatttatttatttattttatatttataattaaatgtttagctagaacccctaaatattttagcgactatgatggggagcattttctttaaatagttcatatatatacttatatatatatatatatcaataaatatacttatatagatatactaaggaaaacactcaattcgttcacttaaaaaaagggaattctgttctctcatctaaatcaaaatgtctgtctctgatactcgagagccagacagtcggatctgaacagataccttgtgaaatgataacaacaacaacaataacaataatacaaatccgacgagcacagatgaggttgtgttatccagattggaaaagctccaaaaggcccaagatggcatgatgcagctactgagtttgcttctaccacagacacaccaagaagcatctgttgaaaggagcagcttacctgaagaatgtgcaataaatgaatctttgataaggcaagtacatactgttaaacaacaaactccggcgacacatgataatgttcgaggaatcagaacttctgagattgt

SEQ ID NO: 108443 - DNA, 1021 bp, Cannabis sativa
aggaatgatgatttataattagtcacatcttttttacttttagtcataaattttgttgtgactaaaaaaaaaagattttttgtagtattttttgtcattggcggagggaggatttaaacagtggcggagggacatggggtcatgtgggggcacatgaccccactcaattttttaaaatttgttttttgtatgcatttttttatatatttatatttttaccccataaatttaatttttattttagttttgccatcacatattataattttgtctatataaatttatattttttatttttatcttcacatattttcatatctattcttatatatctactctaatctctataaaatttatatttttctttataataaaaataatatttttttataattgtaattttttatcaattttttttgcccctctaatatttgtggttggctccgccactaaattcaaatttgggacctcctctttgtgtgaagtgtggaactactaaactatgtatatgaccactttaattaattgtatattaattattacttttataattattcttattatttttctaattttatactaattttagggagcacatgcattgcacgtgcccaaaaactagtatatatatatatagttaaagaatttgtgagagtatggtttggggctgtaaatgtaaggtgagaggtgagtgcaaatcgagaagaatgacattgggggggcaatcaaatgacaatgcataactgacaattagtcagaggactattgttgctttaccaatgcaagataaactaaaggcagagtggtacattctgaacaattgtaatgaagtggagaagtatatcacgtaagatactttttccataatcgatttagttctctttagtaacgacattatctaacatttttcccactttttgtgtaatgagcataggaacgagctacaacttaggggtcatcaaaatcttgacacaattcaagagaatgagtttcctagttggttcaagtctcgagtaagtat

SEQ ID NO: 108444 - DNA, 592 bp, Cannabis sativa
taatgtgtgttaaaaaatatctaactaattagaattttgacactttgtcatatttagttgtacaaatatattttacttatatttaatatatataagacactttataagggaccttgttttgtctctgagatattttattgtaactagattaagaatttaataatgataagagagtgaagtatataaaagtgaaggtagagtttagtttatattaacatattttctcttcaatttttaaataatattttttattttatcttttagcaaaaaaaaattaatattaaacttttttacctttatcttttttttttttttaaaaaaaaaaaatattttcacctttgatttagatttttttcttttttttatttttttatttttacttattaattttaggaaaacttataaaaatactgaaattttggttaatttttacaaaaatactgtcacatgaatttttttttaaaaaatactgtgtttttataaatcactagtaaaacacaaaacaaaacaactcaaaataacagtagtacaactaaaaaaaaatctagtagaacaccagtgaaaactgaacacagtatactgcagtatgaaa

SEQ ID NO: 108445 - DNA, 579 bp, Cannabis sativa
ctacaaaaagcacatttcccgtcagtttttaattgacattaaaagttttttcgtcggttcccccaaccgacgtatatactgtagacgtaaaaacgtctgtatatgcgtcggttatcaatcgtcatttcaaattattttcgttagttttcaacacttgcaaacaattataaaaaataatttttatacttatcccgtctgtttataacagacacactaaacagtcacacaaaaaaaaacctcacatcccaacccatatgaaaccagatctaagcacaatcaaaaataaaaataaacacaaatctcatatattatacaaagaaaaactatacattttgtaatctcaaattaaataaaaaatagcacaaatcaaatatatattgtgtaaatacaaatcaaatacaaatattacacaatatatattacatgaaaattatcatatatatatatatattgtgtaatgcacaaatcaaatatttttagagaagccgccaccaactatcgttgctcagacggcgcaccaccaaccacctacaaaaacgaagaggcagtgagagagagaaagctagcaacaaagagaag

SEQ ID NO: 108446 - DNA, 597 bp, Cannabis sativa
aaggagagatgctgacgacccattacatgaactggggctggtgctgacaatgactcttctttggatgtgctggtgggtgaagttttgaaggagttcaccagggtaagtcttttttgataattcccttgaatcttccacacttagcccaatatgctaaagtttttctttttgtgtaggccgttctgaagttggcctacacttactcctgggctaagtctgctgctcccaagaacgcggctctgtccaacaccctgaaggcggaggcagacttggccaagaaggatgctaaagaagccagggcgaaagccggagctgttcggttggagttgggtgaagccaacaagaagctgtttgccgctaagatgaaaatcactatgctgactaaggatctcgaggttgctgaccgttttgaggagaccatcgagatcttatctactaaggtaaacaatctttaagatgagaggacttctttgcgagcagttcttcttggatgaaggaagaaaagaatgcgaaggagggggagctttcggccgaggtggataggttgaaggagaaggtcaatgccttggagacagccggtctcgagctcttctttga

SEQ ID NO: 108447 - DNA, 622 bp, Cannabis sativa
tcaccctcaaagcttggtgtttttatgggttgaagctaaggaattgatcattcttgaagctaaggtaaccctagaaacttttgtcatggaattctttaagtttttacttggtttgagtagtgatattatgaagtgttggctgttaggtttagaagtgtttagggagttaattttatggttcatttgagttagtttaagcttcttgcagctggttttgatgtatggaattggatttatgcaagtttgggtttgaaaatctaaactttgatatttaatggcatgttttgattcagtgggtttttctggggtttattggctagactatgttgtgtataccctaattaggtactctggaaggtttggttacatttggtagagttttgagcaagaaatgagatttcttgggtgaactggtgcaaaccgggtaaccggttttggcagggttccctgagtttctcatttcctcaattctcgtcatttccgtgccatagttgggtgatttcctacttcctgagttaaaataaaccatagagaatataacagaacctaggattgtgggttcgggtttcccgaattagggttttgatcatgtgatttacccagtttcattatgtgattaggg

SEQ ID NO: 108448 - DNA, 540 bp, Cannabis sativa
tagaaaaaaaaagtacaagccaatcataaaaataaaaattacaaagacattgacaaaaacatcatatctttgtataaattcaatctgattactaaaagttatagaaaattaaaatatggtatttaaaactaggcattgcaaaaataaagcaacttccaccatggacaaaatttttatagtatatcatcttgtcaattctagcttcacatctcccaaataaatcaaataacttttatttttttcaaaatcaaacttttatcacataacaaataacaaataaagaaaaataaaatttattgacatgataaattaattacacattattattgcctaaaacacaatcattgttgctcttaatcaacccatcctctactcttccctcatctttagggacgagcgtcatcttcaaactttcatttctcctacgagttgataacaaaataactaaagattttattttctaaaaaaatagaaagctaacgaattcaacattatatcttatgattttatattttccaatagactaccttctgccttttt

SEQ ID NO: 108449 - DNA, 668 bp, Cannabis sativa
ccaccaaaattttagaattggaggttagttgcaaaaacctaaccacttaaggagattatgccgcaaattactctttttaaaattaacgtcattgtattttttattaaatattatatataaaaattcatttcaaatattgtactagtatagtgataaacaaatatattctaataataaatattataaataatacatatctcaaactaaagtcttaataattcttaaacaacaatagtataacagtatggttcaataaacactaaaaaaaatacaaacagcagtattgtgcaatatcaattacaaagagtgaaataaacaccaataacagaaatacttacacaagtgtaatttctatatatagcaagaaaattacaacattaagtcatgaaattgagtatatgattcatgtgaaatctacaggagattagcaaacatgtaaatatttttacacatttttttttttgaaacatgaaatatcaacttcattgaaataaagcattcaaattacaaattggcatgaaagtctgccagaacatcaacatcatgaatgctacgatcagaatagaaacaaaagcgcctagctacaaagtgggcaactttgtttgctgatcgtctaacaaaacgaaaactaacattaggtagagaggataagagaattttacaatcat

SEQ ID NO: 108450 - DNA, 574 bp, Cannabis sativa
gaatactaagattttattaaaaaatcaaaaatcatgggcaaacctatacaagtcatagttcaaagtaaaagttacaattattagagtttaatagtacaagtttaccaagatttgatcacttttaattatggtttttattgggaagatttattgcaattaatcacaatagtttccttttttgtatgtcaaaaatggaatatttatgcaaccaccacagttaacaatttcaaatatcaactaaagcactacaagcaatagaaaatacacaatcacagcatgaaagggagatactacaatttttacatgaaagcccaatgtaggaaaaaattacggggattgtagtccacttaaatcatccactattaccgaagtttaataatgggattacaaagttctctagtaaaactaaaggctcacaacaacatcaagattaaacattcatcattatcatctcaaaagatggatacacaaagaaaaattttgggtccaccaggtgggtattgtagaaaagagcaccttagagagaacaattgtcaaatcgaagtggtatattggtagagcacctcacaaggat

SEQ ID NO: 108451 - DNA, 3037 bp, Cannabis sativa
ctgctggctggcgattatttgcaaaacatgcttcacttgttgtagactcaaatgattacttggatctccaagaagttggggaaaaaatagttgacaagtgtaagggacttccattagcaataaagtcaattggtgatctcttacgagggaagcaaagaaaggaggaatgggataaaattctacaaaatgatatatgggagttgtatgaaagaaatgaagtcaaaattcttccagctttatggttgagttatttttatctaccttcagaattaaagcaatgttttgcttactgctctctattcccaaaagattataaattccaaaaagaagagatgatcttgttatggaaggccgaaggtcttttatattctaaaattgaaaagagagttgaagaagttggagaagagtatttcgaaagtctaatttcgaagtcatttttccaaccatcatgtgatgacgacaagctaagttttctcatgcacgaccttatacatgatttagcaatatttatctctggtgagttttgcttaatgttgaatagcaataaatcctctcacaaggttcgtcatttttcatacatgccggattgtgaaaaagaatatgactctatggaatttgaggagttattaaaagctaagtgcttgcgcaccatattgtggcatcaagattcaaccgatgatcatctcagtttgttaaagattgagcacttgcataagtcattcccaggcttgagagtactatccataaaggacaagacgatcacaaagtttcctgattcaataggaaatttgaaatatttaagatatttgaagttagattgtggtgagattgaagagatacccaattcaatttgtagtaagttgtataatttggagactctattgttggaggaatgttattcgattactcaactaccaactgatataggaaatttaatcaagctgcgacatcttagagttccccccggtcgattacaagaaatgcctttgcaactgggtaagctacaaaatctgaaaacacttaataaatttcttgtggggaaaaataaagattcaggcattaagctattgaaaaagcttcaaaatctacatgggagtcttcgtattgagggactacaaaatgttagtagccttgaggaaatttcagaagcagatgcaccattaaagagtttcaagtttcttagtcacctacgtttgagttggggttattgctttgaaactgattacttgcataaagagatacttggtggtcttgaacctcatccaaacttgaaggaacttgagattttcgattacaaaggaaccagtttcccaaattggatgggagattgttgctgcttgtctaatttagtaaggctggagattttatgttgctcttattgcaatgtctttccatcgttgggacagctaagttctcttaaagaccttcgttttgaccgtttatatgatatggttagaataggctcagaattttattattctacatcaagtactactactgctgattcttcttcttcatctgttgcaataacaaagccattctttagatctttggagaccttgaaacttgactatttgcctaatctagaagagtggtcatttgtcgaaggtggagtttttcctcgtcttaagtatcttcgtttaaagtggtgcaggaaactcaaagcatcatttttagcagattattttccatcattgacaaagcttgaaatagaggattgtgatcaactaatatcattactcccaagagctcaactcatgcaggctccattgggtttaaagaacattgtgatttacaactgtaaaaacttgatacacttagacgaggaggcctttcagcacctaacatcccttgagaatttgcgaattgaatcttgttggaaccttcaatgcttgccaaaagaacttcccagtttgctttctgatcttcatatcatcaattgtccattgcttgaaccacgagtccagagggagacaggggaggactggccaattattgctcacatccccaatatatatgtcgataacaagaagatctagttccttgtaattttcctcaccttactgttatttctctcatgtttacaatcttttacagctttattccaattattttgactatcaatcacttttttgctctgcctaattcctcatttcatagacaatcattaacatctaaattttatttaatctataaaaacttttcaaatcagacttgagcgctttgtgttacaatccacgctctcacttaataacaaatgcttttctaccatatttcgtaacatttctatcatttttgaaatctatgaaccattttttcattctctgttacattctgcaggatgatgagaaatgaatcatcaacattagttgtgggagggatagacggtatactgcgtgttctgaaccacaacacaggtgaagttgtttctagaactgttttggctggaagtatttcgagctctcgagacaagaatggagtagttgtgagaacaagaggagcgaggcttgcggaagatattcacattgacagtgttctgacaattattcgacctcccatcacttgcttggctgttgggacgaaaagggttgtgaccacacataatacaaagttcatcagattgtggaaatttagctaactttacatagagattattccacaatttaggaatagttgaactatgtatttgtatggtttttgtaaacacatattggataaccaaatatgacaacagatataaacataacaaaattgagataccaaaattcatgcatgtattgttgttgattttactaattaattaattattcttttcactaattccacaatctatgaattgttgaataatggatttttgtgatattcttttcactttttagtgtttactcaaagctagtatatttttgctcgatcaagtaagaaagaaagaaggggttttgggagaagatttttacaaataatttacagaaaagaaaaatatgaatgacaactactatattatgtaccatatccatagctccagttttggatttttttt

SEQ ID NO: 108452 - DNA, 757 bp, Cannabis sativa
aatagacttattatcgaaattttctttcttgtccttgtaatagaaaacgtttggttgctccatgtgaatggttttaaccatagttctctttggctttgatacatagttccttattaggactatccattgcttgtttaaactaacaatgaatttttatcacaagtgttttccaagtcatgacagagtgaattccttaaaacccatccactacgacgaggtaccatgacattctgtctaagaacattattggtattaacatcatcaattgtgtcaatacaacagaggtagtgagaccatcttatatagaataagatgatagaacacttttggagttgaataaaaaatatctcctctactttgctactttattttcatatttagtcatgttcttaaaaaagtagtatctaatgaaacaaacacttgcttatcttaatgaccataggatggtccacccctaatcactttagaatatctatcaaacttgaaaacctcagttaatatttctagcttttcttaagttcatgatcagggcatccttgaatctagtaatggtgtacactaagtatatgaccattccatcattctgagattttcttgggatcaaacttagatgggacgacatagaatgttgttttctatttctaaggcatttccttagaaagactcagacaactactagtaactaatcatagaccttacattttttatcaatatgcgactccaaaattctgggaggtaagtttggatacaatttaaa

SEQ ID NO: 108453 - DNA, 575 bp, Cannabis sativa
cccctcgtggtcctcatatgcccaccctactagccccgctgactagtagtagctcacttagcaccaaggtgccagggggtggtgaagagctaacaccaaggtacccccttaaagagcattctgagcttttagccttctaccagaaacatacatgaatttggctctgtagacatatggccgaaccatataccaaatcacagagtttctctaatccgattgcaccattgtagtcgtagacccaaataaatagcgaatactaaatcccgtcccaatccgaacaatattgaagatatttacaaaaaaatgtcactgtcatacaaactaaacatcagcatgccaccagcatccacctctacatgcatcaccacttgaccaccacttggccaacttgtgggcatcacttagcttgtaacgtgccatcttgacacgcacattacatctagcaatactggacatgatatatttttttttatgtccaactctccttgaatatgaataatatcattctcatgtctctgaatatcattttcaacacaaaatgaacaacaaagacttataatgtccaacttaatgta

SEQ ID NO: 108454 - DNA, 701 bp, Cannabis sativa
cttgccaaaaaaaggttcgagagtgtttgacacatgtttgcattttctttaataagttatgtaggaaggatttagaaacagataaattagatgcattacatgaacatgtagtcaaaatattatccaacctcaaaaaattattctgccatcttttttcgacatcatgatacatctaacgattcatctaatgagagaagcaatgttgtgtgggccagtatgggtgagatgaatgtatccatttgaaagaaatataaagacacttaaaagttatatgcataacaactattcactagaagcatctatggtctagtgctacatatatgaagaggctgtggaattttgttcagattacatggtcagagttgaggcaattggaattagcaaaccaagaattgacccaaatgagcttgatagaggattaaggggaacggaataatggtgaccgtgtcaaagtttaaactagatcaagctcaattagtcgtgatgaacaataatgtaaaggttcagccatatataatgtaagttataggtagcttttcctttgattaacctttaattagtcatgatgaataataacttaattaacattacatgttttgcagtgaccatatggagatattacaatcaatggttccaagaaatcataaaaatatacaaaaataggttacagacgaccatcgtcaaactttcattgggtggtt

SEQ ID NO: 108455 - DNA, 616 bp, Cannabis sativa
gggtttcccaattggccaatcgggacagtccataacccacttaatgtacgctgatgatctagtggtgttccttaaggctgagaataatgtgctagattcttttctggagaccatggagaaatattgcagatggtcgggacaaatgattaatgttcagaagtcgaaagtctacttctccaagaattgctcgaatgtttgcagtgaagatttcctgcacaagctgggttatgaagagatgaaacggggagaaaaattcctgggaaatccttttcttatcaaaggtagaggcgcagtggattttgatttcattactgaaaaaataagtaagaggcttgaaggatggagggctaggcttctttcgcaggcggcgagaacgattctagtaaaaaatgtcttggcgtcaatactgctttactctatgtcgacttttcttctcccgcggaagactactgatgccattgatggcatcctgagaaaattctggtggaaaggaaatgttcaagaggggagattccttgccttaaaggcctgggattcgatgtgcaagcctaaatcttgtggaggtctcgggtttagaagaagtgtggatattaatttcagtttaattgctaaactg

SEQ ID NO: 108456 - DNA, 769 bp, Cannabis sativa
  modified_base (28)..(40): a, c, t, g, unknown or other
taggatgttaatcaaacatacttgttannnnnnnnnnnnnctggtaaaataattccaacatatcactaaaacacatttttctagtagtgtgcacgcacaaagtctacttatccgagtagagtaaaggccaggttatccgagcaaagaatgaggttagttcttcgagttttgtacaaagacttgactacttagaatggtatcgtgaagcccaagcacgaaggcaatctctacaatcatgggattgaatctgaggaatatggcaggctatctcaatcccccatttcatgtattctaattatgcaagaaatgttctttccaattatgcaagcaaaagggaaaccttcgttcatgcattaagcccttataaatagtgatcaagcttcactgtaaaaacgatcaaaagaatttctttaaagagagatctaagagaaacactcagagatttcattgtgagagctttgagagagaaaacactatattctttgttctcaagttaatacaatctaaggggagtaggctattatcgaactaaaggggtcgaaccaatttaaaacctagttttctttattgcttaatggtttttgctctgtttttattatatttctaatcgcttcataattgactcattctcgttgactaaaagcgaggtcaacattttggtgctttcattgagagaaaaaaatccaagtgtgttcttcgtcttatgtttcaacaggcacacagaatggtgttgcaaactcgcagaggcttggttgatcaaagtgaccca

SEQ ID NO: 108457 - DNA, 794 bp, Cannabis sativa
gactattctattttaaaatggaaggaaataccaatctaatgcatgatgaaaaaaagtaataattttttcattaatttttttctgtttttgaaatttagttccatttcatttctatacttattgccactctcattactatttttatattttcattcctctagccaaatgccaccttaataaaatacttaaaatttatcatatatatttattatttatttatttatttttattttgaattaaagggagagggtgccatgagggtaacatattaatcaataatatctactagtgacttgcgtgtatatatatatcttcatattattttatttttgtataatgtaaaggtgagcatacacgtatatttagaaatgtttaggggggccagggcctcctctactcctacggtgcctccgcccctgcataagaggcatcctgttcggactatattctctgagcagatactcggagtcgattccacgtgtcaccatcatgcgatgccacgtcagagtgtaaaaattgggataacatttgccccccaagtctgtacgggacttccaaagttgcgtgtagacttcatccgagctgtttctgcttttggatggggacacgtgccaagcgcgaccgtccgagactcgatgtgaggctgactgggtgtcctttcagttttaacctaataaaagctctgacaattaaaatttcaaaatccgattttctctctccacggctgacggctgcacttgattattttttatttcccacattcgcttttaaggtgggaaactgaggcgtctgag

SEQ ID NO: 108458 - DNA, 568 bp, Cannabis sativa
gatggcgatagatgctccaaattccatttcctctcggcagcaataagaggaaggagaaatgccattgaaagtatattgaacaagaataatgtctggcttattgacagagacgctattggccttgaatttactgactattttaagggtatctttgagggctccgcgcttgaccagagcctggattgtagggatttgtttcaagagaggatttcccaagaagggcaggagggcacccttctctacccatcccgggatgaaataaaaagtactttgtttgctatgaatagtcataaggctcctggaccggatggcatgtcagtccttttttacaaacattattgggaatccgtgggagaggatttctgtgatgcagtttctgatttcttccggaatggccatatgcacaaaggaataaatactacgaatgtagttcttatccctaaggtctagaacccgaaaagaccgagtcaattcagacccatatcactctgtaatgttatttacaaggttatatcttaaataattgcaaatagaatcaaaccggttctgccttctataatatgcccta

SEQ ID NO: 108459 - DNA, 636 bp, Cannabis sativa
  modified_base (75)..(86): a, c, t, g, unknown or other
  modified_base (317)..(317): a, c, t, g, unknown or other
  modified_base (477)..(479): a, c, t, g, unknown or other
aatctaagtgtcacataggtcatgaaaatactctcgtttcacatagaacttcgattatccaattttagcattctnnnnnnnnnnnnttcagattttgaattgagatcatcgaacatgtagaaggtgatcaaccttacacatggaattaagcacaaatatagataatttcacaaatcaagatggaggaatgacaattattcagtaactaggcaaaactttaaacaacattcatcatcctccctaaataggagtttagttcataacatccataattaaaatttaaatagaaaatagcatagaaaaattaaagagaaganaaagaactagttgaagcaattgatgtgggtcgccacaagccgctcttctagccttctcctttgtttctagggctcgaaatatgaatgaatctcaattttcacgaactccctctatttaaaccaagtctcatctttaaaattcgtgaaattacgaaaatgnnnaaaaatcccgtcattggagcttcgtcgcggcgaaggatttgcacgtcgcgacgaaggcttttcaagaatttttcaaaactctctgccaatccccgtcgcgacgaaggcttttccccgtcgcgacgggattagacagcaaaatgtcttgtttgttttt

SEQ ID NO: 108460 - DNA, 688 bp, Cannabis sativa
actttacttgtatctttagccttagtgttctcatcagctcgtatattggaggctctgagtaggtgctcttgctgagggtacctgcgattgcccggcctaggttcgacatctgctcggtgaatggcttcttcaagcttgataaacccatctacccagtcaagaagtctgccatagatcccacagggccacttttcttaatgtcctttcatagttctccaagtacttcaatgccccccagtattgcagccagtctcctctgttcagttaatcttgctactttcatagcttctgccatgaaccttcttatgtaggctctaaggggctctcttggtctttgtttcacttctaccagttcttctaaatgtaatgggagttggtgagaagaggagaattgtgcatggaactctgaggaaaaagctttccatgaattaaatcttctcggtggtagcttgaaatactatttttgtgcggcttctgaaagtgtggcagggaataccctacaccgcacatcacctcgtaccccttacaaatctatttgcatttcaaaatatttaagatgtgataagggatcctccttccctgtgtacatcttccaggtcagctttttgaacataaggggtagctccaagatgttgatctcactacaagaaaagggctttttgccggcgcatttcgtgacatgcgtcgg

SEQ ID NO: 108461 - DNA, 608 bp, Cannabis sativa
  modified_base (572)..(572): a, c, t, g, unknown or other
tttattatatataatatatatagtgtatatatattgtatacggaagaggtttcaatggttacatcaaatatgtaaccatcatggatacagttatttttagtcataagatcattattagatggttgtaattaatttagaaattaaaataaataaataaataaataacttgtaactagggatgcacacaggacagggaattagcggggactgctctccccgtccccatccccattaaggaattaatccctatccccgtcgcatccccgcttacttctcatcggggatggggtgggaaatcacctaatggggtggggaatcctctattgtaaaaataaaatttatttaaaaaaattaaatatataaaattattaaattacataaagattaaatattacatattatttactattaaatatagtaattattatacaaaaacacaacttcaaaaattataaaaatgatattaatatactaaataaatacaaatgcatttataaaatataaatattaataaaaaataataaataaattaaacaggtccctgtcatggcggggagtgtcatccccttccncgccccgtttaacattcggggacaaaatttgatccc

SEQ ID NO: 108462 - DNA, 673 bp, Cannabis sativa
ttttagattagttattttaaactatatgtttatttttagtttatattatgttgattaagatatactcttatgttatgtttttttttttttgtaacaatatatttaagttaccttctatactatttaaaaaactaatgtgttacaataagatatactaatgtgttactataatttacatgtatacactgtaataatcaattaattatttaggttatgctaatacatttgagtaacttttaagtttattttcgaaaaataataagttaccatcttgcaagctattattttagtacactgtattttaaaaaaatatatatcataaataattaagtcacccatattttcttaaatataaattaatacatgcattttaattagttaaataaagaatgaaattacagtaacttttaaatcattactaataagacacaatttttggactaattaattaattatgatttcgataagatatcaattagttacttttgataaaatcatcaattttaaaataaaaagatgatgatcaaaccaaaaatcctataatcatttatgtatatactcatagatgtcaaataaacagattagtttattttggcatattaaaacaaatttttattctttgtttacatttttcgtatagtctaccattatatatgctaataaatctattggt

SEQ ID NO: 108463 - DNA, 614 bp, Cannabis sativa
ttcagtaattcttttattagcgagtcgttgagtccagccaatttataaactccaacttcaactactgcttcgataacatatggaatctctcaattcgtgttgaacactcctgtagatgcatctctcgtatttgcaaatactcgtcttagcaccaagtctccaacattgaatagtcttttcttgacttttttgttgaagtatcttgttactcggtgttggtatgctgcgtgggtggtttgcgactcagttcgttttttctcaagtatatctaaggaaaatttcaaaagctcttggttttcttcttgattataaaactctcttctgtgagtcgatatgttcacttcaataggcagcattgcttccgagccaaatcttagcgagaaaggagtgtgtcccgtcgttgtcttctcgaaagttctgtgggccagagtacctgaggtagcttgtcaacccatttgcctttggcgacatctagcttcttcttgatagtatcctttaaggttttattaacaacttccacttgtccattgcctgaggcctagatactcatgagaagcttttgataattttgttcctctcgcagaatttaatgaacaagttgccatcaaattggg

SEQ ID NO: 108464 - DNA, 608 bp, Cannabis sativa
ttttcttttgcagtatatatatgcctataatattcatagcataatttatataattgtacctgcattttattttgatcgctgttgacagggatgatcagagttggcttgatttgttgattgaattttgtgtggatttatgataaatatggcataattgattatggacactttatatggtttttttaaagtttggccatagtttatgggattttaaagcccatacggctggaatatatttgtcaaaagcccatattgtgtgtattgtagtttatttaggttattttagtaattttaggtgtttaaattttttggttcagttttcttttttgaacataaccgtttttttttttttttgtagagttttgcatgtaatcatcacgatttgatggttgcttctacattttgatttacttttgcagttttcaattcaaacctattttctctaaaccgcctataccattatctctctccctctcttttttcatttcactatttcttcatctccctctttcttattttcctctttgtatttattcatattggattatatgagtattttgttttatgggttttgttttatgctttaatatttggtttttttttttttt

SEQ ID NO: 108465 - DNA, 860 bp, Cannabis sativa
  modified_base (106)..(109): a, c, t, g, unknown or other
aaaaagttgtcggagtagctgccactgctagaaaatttgtcggagtttttgtcggcgccgaaaaattcgtcagaattagcattgtcgctagaaaaatcaccaagannnnggtttcttgatgaagaaaccagattcttgataatttttccggtgattataccggcgactatgccaatttcgacgactattccagagtttgctgtcggtgccaaaaaagtcgtcggagtagctaccagtgttggaaaagtcaccggagttactgccgacgtcaaaaaagttgtcagaattggcattgtcgccagccaaatcactgaaaaaatcaccaagaaagtggtttcttcatcaagaaaccggtttcttcatcaaggaactagtttcgtcacacaacaataataaatattatgaaaacaaaacaaaaatgatatacaatgaaaataattgaaaccagtttcatcaatcaaccaaatggagaaaaaacacacaaaaaaaaaaaatactcataaatataaacaaaacaacacacaatgcacaacaataatctaaaacaaaatataagtgtaaaaaccagtttcaaacctaggaacaaaataataaaaagaaacttaaaataaaaaatatacagtaacatcataaaatagagcaacctcattacaaaactcttaaaacctgtaaaaccagttttgaacttatgaaccctgtgaaactaaattcgacactgaaaaattataacgatatataaatgctaaacaataaagttaactgaaataagtcatcgaaattggcatagtcgctggagttgctgccggtatcgaaaaagttaccagagttgttgtcagcgtcgaaaaagtcatcgaaattgg

SEQ ID NO: 108466 - DNA, 523 bp, Cannabis sativa
  modified_base (216)..(230): a, c, t, g, unknown or other
  modified_base (477)..(498): a, c, t, g, unknown or other
gcctccatctctctatctctccattcggcgaacatacgcctttgttcgtcgaacgcgagatttactgcagcacgtagttcgtcttgatcatatgtaaggtattattatgactctgcatgagtctaagcgcgtcacggagattttgtaattcagtggcatctccgatagtcgtctaggcattcgttccaggaaaaacagttgtgttatgaatgcccnnnnnnnnnnnnnnnctgttattcccagtctcttgcacatcaggcgcaatttcatctgtaggaactgtttcaccattccccacgttcaccagctgtccaggattaacagcaggcggaaccctcatgtttcctaggttttgcgatgcaggatccagcgtctgtgaattttctagattagtcaggcatctacgagtttgcaccatcgtattagtggttggatgttgaataaagagcgattcgtgatccttctctcaatgaaagnnnnnnnnnnnnnnnnnnnnnnttagccaacgacaacgagtctattt

SEQ ID NO: 108467 - DNA, 624 bp, Cannabis sativa
ttgatgatggatcctgggctcagccctcggttcaatcttgagctggttctgctttggaggcacaaattggggtggttcatatgtgtaacagcctaactagtttaggcatgttaacatgatttttaacttactgtgcagctcattgctaatcaacgaggttattgaaaattgtgattaattaaaattttcttatttatttaaaacataaaatatcatacatataaacattcgagatcccattttcaaaagtatttacaaaagtttaactgtatataacaaaaatttttcgcctagggactatacaaaataagcccttatgtcccaaagatcgtacgctccaggcctaaccacccccgacatgtacaatcttcacttgctcactgtcacggctcctcagctttagccttgcccttacctacacatagaaatagcactgtgagtcgacagactcagtaagagaaacataacataaaacataataatatctcatattataattaggcgcccatacacccaaccataaccctaatttggtcaggaacgttttaacaaagtgtgattaactgtgaatccaacctatactcagtactctagtcgtactgatgtggtagcagatcactcata

SEQ ID NO: 108468 - DNA, 703 bp, Cannabis sativa
ggacgccgcttctgctggactggtggcatgtccgggttgacgttcaagacatgggtaattacatgcggacttatgccagtcatctctttggcaccacgcaaaaacgtccgtggctgcccttagcgctttaataattttatctttctcctctggttctaggttctttcctagtcgggggatcttggtagggtcgaggtcgcatacttgcacttcctcgacgtcttccataggttctacaatcttttcggatcccacacggggatccaactcatcttcttctgccaatcctggctcaatattctcatggaccattaacaccggtaaatgggccgcgacattataacactgcctggtctctccctgattgcccctcacggtccccaccccggcttcctgggtagggaatttcagacataagtgccgaatggacgtaattgcaccaaaatccaccaaggccggtcgaccaaggattgtgttgtatgcagttgggtaatctaccaccacaaaggtacagtacttgaaagtactctggggtgtatcttggcacaaagtgactggcaacctcacttttcccatcgggataagcgtggttccaccaacccgtgagttgggaaccgcttggtgataaatcctggtccgtgaggcctattgctgtgaaagcttctttaaataacaagttcacggaacttccattgtcgatcaa

SEQ ID NO: 108469 - DNA, 528 bp, Cannabis sativa
  modified_base (238)..(239): a, c, t, g, unknown or other
gacttgggggccaaatgttatcccaaattttttactctgacgtggcatcacgggaatggtgacacgtggagtccaattggaacacctactccggaagataggccgaggaggatacctcactagcatgtctagagtaagatattcagtgatctgtgcagaagcaatcaacacttagcgaattcatctttcgcatcatgactcatcagctcaatccctataactcagggatcaatatacnnggatacggcatacacacgatcccactatcagtgtattcagtctcaatcccacgatccttgcattcagcattgatcccagatctttcagttcatgcgcattttaacgagagaggaaactcttccttctcaagtttcccagccctataaatagtgatgcatattcactgggcagaggatcattcgaaaagcagctaagctaagactatattattatctaagaattatatatttagagatactgttgtaagagctataagaaaacaaatcttcttccttgatcttaagtcaa

SEQ ID NO: 108470 - DNA, 692 bp, Cannabis sativa
atatatatgtataggggaattctagtatggggctgcttgttttgtccgtattgtatagggaaataaattgacccaatctcaaacttaagaaaatagagtgtagataaattttatgaaatgagaataggagattatttcattatttaattgatattttactgtttattgatttatttaatttttttctactaattatttatttagatgttttataattaatacgtccaaatattcttctccttataattgatcaacaaagacacacatatataggaattgtttattgtgcggccgactgttttttccctatagtacaagaaattttttctcaccaattatcaagtacgattttgagtttcactctaatacaatgcattttattgtaggaaattattttatttattttattattttaataaatttttgttgctattcttttgaagttcttttttaataaataaattgttagactagagaagatgaaaaaaaaattttcttaaatgtgtgcttgcttgtataatattttctttttttatattttatttttaaatttaaacatttgaatctaaaaaaaaaaacatgttattttttttttgaaattaaaaaagggattattttataaacacccaaaaataacaaaaaatctatatttttatagatttacaattatttttacattttacaaattttaa

SEQ ID NO: 108471 - DNA, 507 bp, Cannabis sativa
  modified_base (449)..(473): a, c, t, g, unknown or other
ttgtttgaatttaaagaaaaacacctcctaccatatttaatttaagcacatttaaattatttgtcttaatacacctcttttgcatatcttataaaaacttgtcatagtaatttagtctggtgatcactttgattttggaggacaaaagatgagttatgggagctctgattttgtaacacttgtccttgtaaattgtaataaaactgaagaagagaaattaaaaattcattattttaaataatgtttgcaggcttgccaggattcaaacacatgcaatatttacaaaagagaccatgctttagtaacacataaaagtcaagttttcaaccttaccagagtagtatgtttagctccattttactgttagttaaaagaactagtattttcctcttttggtccattataataataatcagcaatgcttcctcagggtaaatacattagtagcnnnnnnnnnnnnnnnnnnnnnnnnnatttcatactttgcaaagatgcaaaggttcgtcg

SEQ ID NO: 108472 - DNA, 738 bp, Cannabis sativa
atgcttcaacatcttactaaagtaagttgcttacactagagtaagtaaattaccaggtataccacaagcaataagtttcgattatctcaaacttatgatactaggatcgggaaatattgttaagtccattgaatagacttattatcgcaatttcccttcttgtccttgtaacagaaaacttttggttgctccgtatgaatagttttaaccatagttctcttggctttgcttcttaattccttattctgactatctattgcttgtttaaactaacaataaattcttatcacaaatgtctccaagtcatgacagggtgagtttcacagggtgagtttcttagggtgagtttcttgaggtgagtttcttgaagtgagtttcttgaaaccctcccactacgacgaggtaccatcacattcaatctaggaacattagtgatattatcctcatcggctgtgtcaatacaatagaggcagtgagaccatcttatatagaataagatgatagaatactttggaattgaataaaaaagtatattctctactttgctactttgtttttcagatttagtcacgttcttagaaaagtagtatttttcatgtttatggtttaatatataatttctattaaattcagtacatattataactcataattatagtgatgtcaatatagtgaaaagtaattgtaattatatgcttcaaaagtttatgtctcgtgattcattagtgcactagattt

SEQ ID NO: 108473 - DNA, 588 bp, Cannabis sativa
tttttttaataaatatataaatatgatatattataaatatatatatatatatatttttttatacatttttatatagtgtaaaaaaatatactttttgatttttttaattaattaccaaaattaagtataaaatttcaaaattttcttttactatttgttattggatcaaaatttaatgatttaatattttttaaaattaattatagttaaattatttagtaatcattataatatctattaaaaatattccatatatctatatacaaggccgactatgatggagtgcaaagtgggctactgcacagggccaaaaaaaaaaataaagggcccaatatattttttctttaatgcccaataattttttttaatgaacctaacttttgaaagagctaacaatttgtcattagtcactactatcccaatacccaaaccccattttcaattctattaatgcttttaagtaaaaaaaaaaaaatctattactgcaatttgttatttttttcaaatcttttatattatttttttcttatattttttttttgttctattggaatcaataacaatttttataaatagttggagtttttt

SEQ ID NO: 108474 - DNA, 620 bp, Cannabis sativa
tacccttgacagagttgttgaagaggggtgttatatggacgtggtttgagaagtgtgaagaagcttttcgaagtctaaaagaggccatgattgaagatcctgttttagccttgccatatgtatgcaaatcctttgaagtacaaacggatgcgtcagattatgctttgggaggggtactcatgcaggagggccaccccgtggcatttgagagccccaagctttccgaagcataaaggcggtatactggacaggagaaaggactattggtggttattcattatttacggacgtagaggcattacttgttggggtcgaagtttgtggtgaagacggacaatactgctgttagtcatttcctcacgcaaccaaaactgactcccaagcaggcccgatggcaggaattcttggcagaattcgacttctactttgagcacaaggtcggacgtctcaatcaggcagttgatgcccttaatagtaaagtagagttggcagcactaaaggtgttagtgagcatgtcagctagccaagtgggtacaccaatcaaggagcgcatcaaggagaacctggagaaggacccagttgcaaagaacatcatggctctcgcaagaaaaggaaagaca

SEQ ID NO: 108475 - DNA, 568 bp, Cannabis sativa
  modified_base (141)..(143): a, c, t, g, unknown or other
tggcagcggaataataatgacttcttctatttagatctctagcccttgattcctttttgtagcagagaattatcacgatatgaatctggatcatctcttcttcaggtgttggattcttcacaatcttccacactatgattnnntacttgacttgatatgagtgggcatgtactcttcattagggattcgaaatttatgagaaagaagaagattttttttgaaatagaagaagaagagaggctctcttttgttttctaattttgtctgacaaaagagtctctgaagtcaattgagaaaactagagccatcttattctatttataggattccttctagggttagatttataatttaaatagaattaaaaaagataaaataatggctttattggacttaagtggctaaccatattatgggcatcactagtttcgatttttccatttattaaactcatctttcctttcacaaatgccatattttaattctaactctataaatgttaattttgtctatttaataattataataattatcaaataaattttccatttaacttatttattaatta

SEQ ID NO: 108476 - DNA, 1512 bp, Cannabis sativa
  modified_base (31)..(37): a, c, t, g, unknown or other
  modified_base (160)..(166): a, c, t, g, unknown or other
  modified_base (219)..(228): a, c, t, g, unknown or other
  modified_base (1405)..(1410): a, c, t, g, unknown or other
aacctagtccattttaattacaaaaattaannnnnnnccctatatgcatctaggcccaaaggaaacatataggcaaagacacacactgatttggatagatcctatcattatactaggtttatacacagttgaaagaaaattacaaaatttacctgttacnnnnnnnttatttgacctattgacaattgaatcattaattaaaatcagatcattagatcnnnnnnnnnnttaaccatggaaatttagatcaaacaataatgggttttatataaaaaaaaaaaaaaagttttaataataaacaacatataaaacacagacatgcaacaaactggatagttagatataggttaatttaaattaattaaataattaaattaattttgaaaaacctaaatattaaaatattatttttcaaaaattaattaaattaaattaaattaaataattaatttaaaattaaaccaataaatttaaaaaattaggtttttatcaaacctaaatatctattcaaaaatgccaactaacttttcaaaatttatgttatttttaaaagaaaataaaattaaatgtctaataaaataaaatgataaataaacatgatttatctaatttgtaatttaatttaaataaaataaaaaaaatttgaaagttgacaaaatatctggttagatttttaaaattttctagaataaaatatatcttattttaaatttcaaataacgtcattttataaaattaattaaataacgtaaaatataaatatctgaccttaaatttaaaaattaaataaaataatcaaattttaaaaaataaggtaaacaattaagcaaaaaattagattttatccattttcaggttcaaaatctattaatatctattttattctaataattagatttgaaatttgaaaaataaaatctaaatataaaattacacaacaaaaaaattaattctatgaaaaacatgaaaaaacgaaaaaaaaaaaagaattggaaaaaatttcattttgtgcagatggtatgcaatcgcgcgtgctgtggggaggttggtcgagatttcacgcacaggaggctgttagcagcattcccgcacgtgcatggccccatttttcaaacaaaaattgtccccctgacctaaaaaactcagacatgttgcatgtccaaaccgcgtgaacccaagaaaccaacggtatccgcacgcctaaggaggtatcaaacctcctgattttttctgatttttcaaaaattcataactaattcaaataaaattgaaattaagctctacaaaaaaagtgaattgcttaattttttccatactatccaagaaaaataattccaaaacaaaactctaattattttacgtaaaaaaatttgcaagcaccaatcaatcatcaataaacacatannnnnncatgaatcacatccaaatcacacatacatcgttttaaatccatatttattgaaagtaaatcaattatcatggctctgaggccaattgttggaatatatttta

SEQ ID NO: 108477 - DNA, 622 bp, Cannabis sativa
  modified_base (249)..(250): a, c, t, g, unknown or other
atcggacccctcgaaccaccccattggaccctatatcagacccatcgaacccctcattagacctacctctcctaccttgcaaattcacagtttcattcgaccctatcggactccatcggacctacatcggatcccatcggactttgcgcaaaataacagatctaagattctaaaacctagatctatccctcaatctaacaaaatctacctttagcactaaaataacaaacaaaatcaataaaaaaaaanngtggtggtgcgccgtgggtcggtggggtagcgccatgggctggtgggtctcctccgtgcttgtgtggtcgacgtttgggatgatttggggtttcggctggggttgggacggctgggttgggatgaacagagagaatagagggaaggagagagaatgagtgtgggattttgagaggggtagttttgggatttaggtaaagtggggttattctaacaattacctgtagtttaagtttttctaatcaattaacctttaaatcatgcatacaaaatcaagtttcccattccaataacaaaaatataagaatacaacaaaatacaaataatattgataatgtatataggattaaaaaaaaaaagtattgaaaaaaaa

SEQ ID NO: 108478 - DNA, 548 bp, Cannabis sativa
caaaatgaccacaaccgaataacccacccacggcagcaccggtcgaagcttgacaaaacagcaacaatggcagcaccttcgaagcttgaagatgaagaacaagaaaaatatgaaggagaagaataaaccttaagctgaaactaaggggaaacgaagagaagctgagagagagtaaaagtgagagaaaacctcttgctcagaatatgaaatgacaatgggattgattgaactgtaagaaacaatgagtacaaagctaagctattccatgcaaatgctataagcttaaattttttttttttaaaaaaaaaagaataaaatatgggaattgggccaaatataacaaatatatggctttcataaaacccataaaaaggaacacaaaacaaaaagcccatatgacaaaagttttatttaaaaatggcataaaaaaataaacagtaaaataaattctatattttgggtaatttttaccataaaaaatgggaaacttacaaaaatactagaatttgggttaacttttacaaaaatactgtcacacggaaattttt

SEQ ID NO: 108479 - DNA, 690 bp, Cannabis sativa
  modified_base (252)..(252): a, c, t, g, unknown or other
  modified_base (370)..(378): a, c, t, g, unknown or other
atatttgatgtatgtcgtttgctgtatcaaattcactaattttttccaacactttcaattatttcagtataaaaataagtacgggtcaaacccacgagaattatgtttattcaattattcaacaattaatgataagagttaagaaaaggggttctaagattaagattaaaatagcagaaataaaaataaaacaagcaaattaatactgagattatgatatgagaaactagttaaaggttattcgccactctnaacaatcattcctaattcctattaaagaatgtaattttcagtttctaatcaaactattaatcttgcaaatgacgctgaagcactcaattatccaatctctctattgtatgtaatcaannnnnnnnncttaataattaactcttttacctaagcaataaatccacgaaacatgcaatttatttaacttagataaagttttgagatttatggagataaactaatctaggcaacaaatcaatgaagcatataattcatttaacctaggttcttcttcatcacaaataaaaattataatttgtcacaaacacttagaatcctagactattaggtgaatagtaatcctaagatgacaatagattatagtataaaacctaagttagcagcagtctaaacaagattaaaataataaccatgacattaaacatagaagaatagaag

SEQ ID NO: 108480 - DNA, 544 bp, Cannabis sativa
aggatgttaatgaaacatacatggtagtaaatctagatcctagtaaaatatatccaacataaagttagtaccccatcaacaaaaggtggctcggtacttcaataagcaagtaaaagcacgtaaattctttgtgggagatatggtcctaaggagagtatttctaaacacaaaagacaacacgactggtgtgctcggaccaaactgggaaggaccatattaggtggtcaatgttctaaaattaggagcatacaaacttgggcggtatgatgaaaacatggaactcgttctagtgcaaaggtattggaatggggaacatttaagaaagtactatcagtaaaagtaccaggtcagatgaccactttaagtacaaaatcaaagaacatttatttttaagtaaatggccttttggatggatcccgcccaagggttcaaatgaaatgactaagtactcaggtcggatgatcacctttgaaagtacaatttccttttaagtgcagtttgttttgtttaaatttagctaaaagatcgaattagatcatataat

SEQ ID NO: 108481 - DNA, 796 bp, Cannabis sativa
tgacacaaataatataacattaaaattcattatattttgagtatacaagttcttgaaaataaaagaaataatttactcttatgtagaacttagaaatgacattatacatcaagcagtaatataataaaagattaaacataaaattaaacatcaatattatgttaactaaatagtaacacataaaaagagcatgactaatcctatatatttttagtaaaaataatgacaaagagatagagatggagatggtagtgatagtgaaggaaatgaacattaatattacttttattaatttttagacacatagggagaacataactaaacatgtatatcatttaacaaaaagtaaataaaaataaacataaaagatagaaatgagcaatattatccttactataatcactaaataaaaatatataaaaagagcatgattaagtctatatatttagtatacatggatgaagaatataaaaataaaagtagaatataagaacttgcattactcaaataaatatcacaataagtgaatcaaagatacaaaataatctcactttgcatatagagtcatctctaaccttccaaggaagattagaccattatgctcatcattcttataaaaactttagaaagaaatatgagaagaaaagtgaagaaaaatttccttataattttttttacactaaaaattatacttcttacaaactaaaaatgagatcctattttccttcaaaaaaaaaaaaaatgagatcctatttataaaattacaaaaaaaactaaaatacaaaataaaaataat

SEQ ID NO: 108482 - DNA, 989 bp, Cannabis sativa
  modified_base (569)..(569): a, c, t, g, unknown or other
tgacggacaacagcttgctcttcttcaagcagggatccgtacagggactccgttctggaacgagttatagcaagaaggagcctccaaccttcaagatttcgagaaaagaggccagaaacacatcaacttagaagaggcccaaatagtggcctatgggggatactacccgaccggaatagcagggtatatacccggagcgcagctcctgagaaccttaccaacagctaatccaccgatgagcggcatacaatttttcgctaccccaggatataatcagaatcaggcattggcccctgcatcttctcattatgagaattcttctgggataagtggacaagtcctgtctcactccgctcctactacaagcttagcaggtccttctcaaggctctcggagcaagaggtcctgaaagggcagcaaccggacggaggacaagcggcagaaaaggatacactccccaatacacccagtatacggagctgacggactcccaggaacgtgtttattttgctaccaggcaaaatacgcactaccagagaccacctcctctgtacaaagatagctcccgnaaggatcccaacaaaagatgcgagtatcataacgacatcggacacagcaccaatgaatgcaaaaacctcaaagatgagatcgaaaacttgatacgattggcccatctttacgaatggatcaagaaccggttacctcatctcaacccggttcaagcaacaggacctttgccccaaggaacaccagggggtgcgcccggagcattagcaccaggcgcccctccaggggaaccccaacaaattcttggcctgccaccaagacccaacggaagagtagctatgatctctggaggaccccatatcagaggagctactcgaaaggaattgaagcattacgccgaagccttgaaacacagtgaggtttgggaagttactcaactcccagctcaaaggccccgactaatggatcaacccattacgttc

SEQ ID NO: 108483 - DNA, 1080 bp, Cannabis sativa
gggtctgagctggtcagaagtgaaactgaacaggtgcgggcacctactccacctttgctggtgcttttagaggcaaagaagggcaaggagatgctggtccattacatgaatcgactggttcctgaggtcagtgagcaactggctggtgctgacaatgactcttctttggagttgctagtgggcggagtcttgaaggagttcaccagggtaagtctttctggacacttccctttaatcttctatacttagctcaaatgctaaagttttttctttgtgcagaccggtctgaagttggactacacttactcccgggctaagtctgccgcttccaggaacatggctctgtccgacaccatgagggcagaggtggacttggccagggcggatctcagagctgttcggttggagttgggtgaggccaacaagaagctgtttgccacccagaagaagataactgagctaactaaggatctcgaggtttctgaccgtcttgaggagaccatcgagaccttatctgctgaagtgaacagtcttcaggatgagagtacttctcttcgagcagttcttcatcgggtgaaggaggagaaggaagctaaggaggaggagctttcggctgaggtggcgaggttgaaagagaaggttaatgctctagagacagtcggtcttgagcttttcttcgacgtttggaaggctaatcctcaggctaactttgactacttgggtgatgctaaggacatgtaccttgagttctgcgcgtcccaagtggcctatggcgaaactgaggcagctgcttcaacgtccggtcagactaatgatgtatctcctattcaaacaatagatcctccagctccaattggcccagaagaaccgaaccaagagcctgggactccagctgtttaaacacttctccttttatctatttattttttatatatcttattcgcgcacaaggcctttttctaagacatgattaccggccaagcggtctttaaacttggaattatttttcagtttttggacaacaggctgaccgggcagcttttaattccggtattgcatgcttttgttatccttaatgaa

SEQ ID NO: 108484 - DNA, 523 bp, Cannabis sativa
  modified_base (454)..(469): a, c, t, g, unknown or other
agccttttattacttgtccacccatatactaagtttatactcaacatgtattgtccaatcacatcgatcgtaaacatcaaagaaaactctctatgtaaaatatgatcatatatacatatgattaaatttataagtatttaaaaccaacattgcttcacactcataaaatcacaagggacaaaatctcatatgaaccactaaatctattgacgctcagccatatacaaggcatcgaacagaagtttttatgttttgctcattggaaaactatattcaatactcattcacttatctctagtcattcccttgctcgaattgtctccaactctatttagctacaattttacgttgaacaagaggaggcaccaacatattgaagataaacagtacacttgtcttgaaaattactgatgtaacaagccatcatcaaaacaaaattacttatagatatatnnnnnnnnnnnnnnnnaacttatgtcggcccaatcattctagatccaaaatcacgctacaggcactctga

SEQ ID NO: 108485 - DNA, 577 bp, Cannabis sativa
gtgctatttgtttgttggtcataggttattcttctgtgagaccgtggcactaactatacatgcaacattgcctcgtagccataagctagcaaatgtagtttgcctagtggccattttcttagttatcctatgcgaccttaggaactctgggagcagttcagtccatttgccttttacttcctcaaggcgcttctttagggtatccttgaggattttgttgacagcttctacatgcccatttgcttgaggatgggccacgacaaagaagctcttgatgatgccatgtttgttgcagaaattagtgaacatgtcactgtcaaactatttgtcgttgtccgacacaattttctggggaaggacgaatcgacatatgatgttcttgacaacaaagtcaaggaccttcttcgaggtgattgtcgccaggggttcagcttctgtccatttggtgaagtagtctattgcaacgatagcaaactgtacccctctttttcgctttagtagttgaccaattaggtccatcccccacactgtgaagggccaaggagcctacatcatcgtaagctcattgggtggagct

SEQ ID NO: 108486 - DNA, 757 bp, Cannabis sativa
  modified_base (32)..(33): a, c, t, g, unknown or other
tcttatattaaagttcttaaaattaatttaannatagtattttttagcttgaaatatcaataatatatttttattttttataatttaattatttgaatgctagaaactaacaataataattataaaaaaaaatggaacggtttggacgggttaacccgaccaaaccgacaaaatcattagatgggttgaactttttctaatttttaaatatttgcaacccgatatatattggattagtaaaaatatgccataaccctagcaaaccgaccgacgtacacccctaagtggtagcgttaattttctacatcagcttattagagttaagaaaatagataacttcattcgaaacatccttcccagttatatcccaagtatctttaaagaagaaactactaaaaccatcaagaccaagagctttttcatctgggatagagaaaagagcatgcttaacatcagcttttgtataatcttcgatcaatttccttagccacttgaaagtcttaaataacaacccattctctcacaatcttcttgttcaccttagttctactagcattccttgtaccaagtagagtttggtagaaatcaagaaaggcatgtattactttatcttgctcctctacccaattgcctctcatatctttgattgagtagatggtgttttgaactcttcttttccaagtactatcatgaaaaagtttagtgttgtcatcaccattatttatctaaggtaacttcgctttttgacttaagaaga

SEQ ID NO: 108487 - DNA, 592 bp, Cannabis sativa
agacctaccaatcacctacacttttgctacgtgttgccatttctctcaacacctatagtttactaaagatcaattaaattaggacatttaggaattttacttgtctttcttagaccatctccaatagatggtgtatatttcgagttaaatttagcccaaaatataccacaaaactatatttggcccaatttttgtatttgtgctccaatgcacaaggtacaaattagctataaaagttaataataccattaatattattgaaaatatacaaacaattaactttatattattttaataacttataaatataaaaaaaaaaaattattaatgaatagtattaatgagtggcaaataggtaattaaaaaatgtggcatttattgtgggctaaactttggcacatgctatcttttgcgccaaatttagcacaatttttagcttgagccaaatttaacacacattttacatcaccattggagttaaattttagcaaaatattctaaaaaataaaaatacaccacatttataaactctccattagagatgctcttagagcactctaatcaaatgacaggactttcttgcctaatttca

SEQ ID NO: 108488 - DNA, 563 bp, Cannabis sativa
  modified_base (456)..(459): a, c, t, g, unknown or other
tgcattaccttacctaccatatcaacataggctgcgttgtcctcggtagtgatcattaagtcatgtcttatctttgagttcaaccgatctaggtacttctctttcttgctgaaattggttggcacgattctcgaggcaaatcttgcttatttaattaaaaatataacgtaacatacatataaaattctgggatcccgtttacaaaaaaaaaaaacatttacaaaagtttaattatacatgtacaaaagtctgttgcctagcgactatacagtaaaagccatgatgtcccaaagatcgtacgttccaggcctaaccgtcccgacatgtacaacctccatctgctcgctctcacggctgctcagccttagccttacccttacctacacatggaaatagcaactgtgagtcaaaagactcagtaagaaaagtataacataaaccataataatatcccgnnnnataatcaggcacccatacacctaaccataaccctatcctcgtgtcccacacctgagtctttaaggttcatatgaaaatactatcgaccataatgtcagcctata

SEQ ID NO: 108489 - DNA, 643 bp, Cannabis sativa
atcagccatgagtatgggagctgaacgaagaatgtacatgttcaggccacactagagcaagcgggttggggtctaccggtgatgtgtttttgagactcggttttaccggttaggttggctgaaagaaaaggacttgtaataatgttttgtaaatatttttgggatccttgcttttgtaacttttggattataaagtttcaagtcttacaagtttatttttattcaattgttattaaagtttaaatttcgcacccttttgttagtaatcccgtttaggggattagggtttcttaagtatattgggtagcgtgcctaattatttagagcattgcaattttgtatcagagcgccaaggttttttaaacttcatgtagatcagccaaacatgtacattcatcgtcagagacaagctcgtctcatggtgcaataagtattgagagtaaatactttactgtttatctgatcatctgtttaccgctttccattttaggcagtatgcaagcatctagagtatatatgggttatgtgatgccatgctttaaatgctatatgattaactgtttatttataaggaataaatagttgagttagggtttaaggcaataagtgcataagtttggtattggtgcttaactcgctgggg

SEQ ID NO: 108490 - DNA, 591 bp, Cannabis sativa
acgcaatatctggacgcgtacatacttgaagatacattagacttcctacaactggtgcatagggaatctttttcatttcctaaatttcaaggcttcttgtagggcattgactaagactaaatttatctcctttagcaacaggggtatcacctagtttacaatctttcatgccaaatcttttgagtactttatcgatatagctcttttatgataatctaagaataccccaagaacgatctcgacgtatttgaattcctaaaacaaaagaggcgtcaccaagatctttcatctcaaattacttagataaaaatctctttgtttcgtgcaataagcctatatcattagtggcaagaaatgttgggttttataccctaaataaaactccagttcaatgtaatctgtattattcaatatcataaagaaacagaagtatttttcattcatttgtgtaatttttggttcacattaccaattacttgttaatttgttttataaattcatccaaacccttttcacatttatattcttgtttatcgtgtcgtcatcacagtagaaagtaatcaagattgtgtgaataaagattcctagatt

SEQ ID NO: 108491 - DNA, 525 bp, Cannabis sativa
atgacttgatatagcattaaaatagcttcaaaatataagtttaattgcataaatcgaatcaatattgagtgatttatggttgttttactaaagattgttcatgaaccagtgctctagttgacatcctagcacccaggttgacatctgacgtcaacctagacgttgggtaagtgaaaaaaatgtccaaagaatgtactttatgatgtttaagtgatatttttcatcacttactctatttctatgttctgacgaagctggtcaccaattctcagagatgatgttgttctatgaaaatgagagacttgaaactcttcatttctgagtgagtttcacatgttgcaaatgagaaatgtgaagttgtgaatttgacttctctaacttcataaatcttagttattgtgacaaactagacggacggtcaaaacaaaatcaaaatcggataagcaaaactcaattcatcaggacatttgtcaacttaggcactgggtactcattttgcaacttttgagatgtcattttgatact

SEQ ID NO: 108492 - DNA, 654 bp, Cannabis sativa
aaaatttcctacaacacacataaggaaaaatggagcatcaatgaattgatgaccatgtgggctcaaaaggaagccaggctcctacaggaacaaggagaaagtgctcatctgaccactcaacctaagaaacgcaaaccattcaagaagaaaaaaggaaaaaagtccatggctcccagggctgtcataaaaaaagatttcatcaaatgtttcttgtgtaagcaaaagggacatgcataaaaagagtatagccagttcaagaaatggatggacgacaaaggtaatccaatttccttaatatgttatgaatctaatatgggtaatgttaatcttaacacatggtggattgattctgattcaacaattcatataacaaattccttgcaggatattcaaaacctaaggaaactagtggcaagtgaccaaagcatcttatctggaaacaagatgggctcacgaatgaaagctattggaacatgcaatttagttttaagtagtggttttattttaaagttagaaaagactttcaatgtaccaagtttctctagaagcttaattttagtttcaagacttataccttttggtttttcttttacattttcaaagaaatattttaatttatataataaacctgaatgtgttggaaatggtattttg

SEQ ID NO: 108493 - DNA, 1191 bp, Cannabis sativa
  modified_base (759)..(765): a, c, t, g, unknown or other
agttatttgctttttgcagacaacgattcgttttctgtccatttattgatacggcgcattaaatgggtgtcagtcggatactgaaacgttttctaccgccttgatgagtgtttattccaaccgttagatttgtagaatttgaatcgattgtcatcctgaccgtacgatgatatttgttcacaactatctcacacctgttctggcctataaaagccagctttcttactgcatttggttactttcagcattttaccaaactttcttagagttttctcagagagaaaagaggcttcgaacaccatagattacttgctcttattccttcgacgctgccagtttttgttctaccagcgatcaacaccaaccctcagccttcaaacttcatgtaagttcatcgtatgccttatacttgcttactgttcgtttatatggcatgttttatgatttctgggctggatgtcgagcttttaggaatgaattcgcccgagtttactgtatgatgcgttaaattcctcttctttgtgtttagattgctccttgttattacgttttcgtttgaggaatcatccccatcttgcgtaataacgtctttagggcttagagtagatcttgcttttttggattggtccttttttccttttctcttcctttttctttttttttttctgtgcaatgtcactgcctttgggatttttgcagccgattctggccaaggaaagcctcttgggattttcttatttggcaagtgtccggaggggnnnnnnntccagcggttaggggacccccactgccctttttgaacattagggtttggtttggggcttaactgctgggttttctcaattttttcagaaccaacatgtctgcttccgcatccggttctaaatcttccaagaaaggagaagttcgactggccaccctggaggaggtcatgcagggcccagtggcctaggagaaccataagtcccgtgctaacggatgggaggcggacgagccccactccacactgacctatgctcaccagcttgaaaagattgtggtggtggcaggcatcaaaccttcggtctccgggacctaccaccgactgcctctggacgaggagactgttgggttttgtgctctaaataaaacccattaaaatctgattagttatcaatttaagagattagaagtggtttatgttaacatgta

SEQ ID NO: 108494 - DNA, 2472 bp, Cannabis sativa
  modified_base (2235)..(2236): a, c, t, g, unknown or other
ggtctaagctctgataccatttgtctctatattatcatattttttttattattttttttttgtctttaaaattacactgtgcttttatttttttttctattattatttaaaatttgacaatttattaaggatatagcttgtgtgagacaaggcacaaaagttagtttgttaccttatttagggatgattgaataaataaatataataaaaattagattgctaaagattgctttcctttccatttttaattaagagaattttttttttttgaataatttctttttattcaaattgataaaattttattaatgaattttaaatttaattattaaatatgtaaaatttgaaaatataaattagccgataagcattaaatattaatatgtttcatttatatattttaatcttattctaacgtgtatagctaaatatttttaaatgttgctatttggccttttaaattgtatttttgggtttctaagagcatcttgaatagtagaattttttaagagtgtcaaaaatttccacatcacttaaaaatatattattttattttatctctctttcacattattttttacactttttattttaaaataatctaatgataagtatttctgaaaattattaaaattatattacattattatttaatatattaaataaacaaattttcttactttatgataaaataataataaaaaaataagaaagagaagatataatgctatagcatgacattcttttgtggcattctttttcattttaatgataagcattaattaaaaaatactaaaaatgtatctatatcatcaagcatttttcatagcatctctattgaagatgctctaattaatactccaaaattatttaaaaggtagttttaagtatgtttttcaagaaaaaattcttgagaaactaaaaataaaaagcataagctcagcaaggaccttctcttcaaattcaaatccccgactttgaataaaaaaaaaagattatttagaatttttatctcctgaactatgaaatatacattattgtgtgtctcttgaattttttcagtccattataaatggtccctaaactatttagtatttacaatattgtaaactggtcattttgtcaatttttttacacgtgacaaacaaaatgatgacatgactgcttaaccaattgccacattaataccacgcatataattgaacattaaaaaattaaaaattatatattttaaaaaatcattaaagtaaaaattaattgataattagatcaaaaattataaaaactaaaataaaaaaaattaaattattttttcaaattaattacacacgtggcattgatatggcactaatgtgacaactaactaagtagccatgttatcattttgtttaccatgtgtgacaaaacttgacataatgaccaatttacaacaccaaatagttcagggaccatttttaacagactgaaaaattcaaggaacacaataatacatgtcatagttcgtggacaaaaaacctaaatcgtctaaaaaatagtaaaattttatttgcactaccccataaaattataagactaattaacttacattagtttttaaaaatcacttttaatatttttttaaaaattctttttgacattattttcatttaatatcgatggttagcttattttattttttatatatatttattttagatcatgtatactatttttttaaataaaatttcatataatttttttgtcttaatattttttttcttcattttataggtataatttttaaggatataacaataaagaaaaaaaaaattagtacattttaaaaatataaattttatataaaataaaagttattaaaatgggatgtacttataactttatgggagtgcaaataaaactctccaacaaataaaacacaaaagagttttttgcatctaaaccctcctaactcttgtttcacttgtattaattaacctcaaagctcaaattttgatagtaaaatcctccaaactattgaactggtaacaaatttaaggtgttatccggttaagtgccactttagactgctatgtatacactttgtacacatggcacgtttatattagtgtacttaatattattttttttaaaatttattttgaaattaaataaattataaaaataaaaatataaaatatttaaaatataaaaaaatattatgaagtttaaattatttttatattttttaaataatannattaggtgtactaatataaatatgatatatgtacaaaagtgtattcataaacagtctatattgacaataaactataaaaaaaattaatgatacattatatttattaccaatttaatagtagtttagaaaattttactgtcaaaatttaaacttcaacagttaagtgcttaaacaattaagtaattaaatataaatgaaataataattaggaaaatttaactagaaaatacttaaca

SEQ ID NO: 108495 - DNA, 622 bp, Cannabis sativa
  modified_base (48)..(55): a, c, t, g, unknown or other
aggtgcctttcttttctggtcagtggtcgagccactacctctcctacnnnnnnnngatgtaggaggggtaggagccccaccaaaaacctgagtcccttgagactttagggtgcactccactgcaccctcagctcacagtgccttaccaaccatatcagcataggcggtattgtcttcggtagtgatcattaaatcatgtcttatcttcgcattcaacccgtccatgtatttctctttcttggtgaaatctgtttacacgattctcagggcaaatcttgccaagcggtcaaactgggttgtgtattcagtaacactcatgttttccttatgagtcaacttagtaaattcttttctttttgtgcttctgactgcctcattgtagtgcttcgcgttgaacaactcctagaactttttccaggccatcgtcataacatcttgggttagggataccatgtcccaccatactagagcgtcttcttagaacttgaatatggcacaggccactctgtaactgccggtgacgcccataatgttcagaattttggtaataaccattagccactgctcggctttcataacatcgggacctcctagaaatattggaggtgcctacttacgaaac

SEQ ID NO: 108496 - DNA, 501 bp, Cannabis sativa
accatggaagtatatgttgacaatatgctcgtaaaatctcaacacgcgaaggaccatgtcacccacttacaagcaaagttcgaaatattgcgacgatttaaaatgcgactcaaccctcttaaatgtgtctttgaagtcggatcaggaaaattccttaggtttatggtaaatcagcgaggaatcgaagctcaccccaaaagaattaaagctttggtagaaatgcaatctccgaccaaactaaaagaggtccaaagccttacaggtaaagtcgctgctttgaatcgctttatatcacgttcctttgacaagtgcaaagagttttttcaaattttaaaaggcaataagaagtttcagtggactgagaagtgtgaagaagcttttcaggccctcaaattacatttggggcggcccccaattctttccaagccaatgcttggagaaatgttatccatttacctcgcagtgtccgaatacgcgattagttcggtattaatccgcgaa

SEQ ID NO: 108497 - DNA, 640 bp, Cannabis sativa
  modified_base (443)..(471): a, c, t, g, unknown or other
accccaaaagtgactaagtccaaaaattctcgaggagggaactcggacagacctgaacagccgaagggtagatccgagctggtcaggagtggagctgaacaaatcagggcccctgccccacctccagtgctgcatctggagactaagagaggcaaagatatgctcacccactacgtgactcggtcagtctctgaggtgaatgagcagctggccggagctgacaatgagctttccctagagctggtgatgggaggagtcctgaaggagtttacaagggtgagtctttcttcacagtttccctttatccttctttacttagctcaaattctaatgttttttctctgtgcataccggtctgaagatggcttatgcttactattgggctaagtcagtcgcctccaagaatgctgccatgtccaacaccatgagagcagaagtggacnnnnnnnnnnnnnnnnnnnnnnnnnnnnnggttcaacttggagccgtccgaatggaactaggtgaagtcaacaagaaacttcttactgccaagaagaaagtagttgagctgactaaggacctctaggcttctgaccaacttgaagctaccattgcctccttgtcaacagaagtgaaaagtctccaagaagaaagggag

SEQ ID NO: 108498 - DNA, 740 bp, Cannabis sativa
  modified_base (208)..(208): a, c, t, g, unknown or other
caggtctagaaggcatcacttcccttttagtatttgtcattgagaatctctctaacactttatcaatgtaagttgtttgagagagagcaatggatttgttcttacggtttccgattatttgaataccatgaacataagtaacttcacctaaatacttcattttgaattgagtgtcaagccatttcttgatgtcagtcattttcttganattgttgccaataatcaaaatatcatcaacataaaggaccaggaatactaccacttgaatatccttgagttggtaaacacaaggttcatcatcgttttggtgaaagtcgtatgtcttaattatttcatcaaaccttttattccaagagcgagaagcttgcttaagtccataaatagtcctattgagtttgcaaactttctcttcttgccctggaagcacatagccctctggttgctccatataaatggtttcttcaagaattccattaaggaaagctgtcttgacatccatttgccagattttaaaatcaaaagcagcagctatggagagaagaattctgatagatttgagcatgatgaacggactaaaagactctgtattttctaaaatagtacaaataggaccctgagttcaatttttcaacaattttttttagtataactaacttgaagacaatttgtaacacgaaaagatgtagaaaacgtgaccagttttgtcataacacctctatattaggttattattaaatttt

SEQ ID NO: 108499 - DNA, 653 bp, Cannabis sativa
agaatggacgcccagtgaaatacatgaagtcagggaagtatggttgagagcggaggcggtcagggaaatcaaattccccagaatccttatggttgcggtcgtggccgtggtagagcttagggtggtcgtcctataaatccaccacaagcacttcaggattgggagcaaaggtttgcggaaatgcaagatcgaattcgctaacaagatgaagaaattcttaggttaaggtagcagagccatcctgccgtgcctccacaacaagctcaggccgttgctgctagcagaatagcatgttgctggcaaccgaatggagatgttatacaaaaggctccgtaagcaagcaccttcagtgtttctgggaggttcttatgtgatgaaggccgagcaatggcttactgtgattgagtgaatttttaatttcatgggtgtggttggtaatgatcgggtgacctgcgctacatttcagttctaggaagacgccctagtgtggtgggaattggtgtccctcattcgggatgttactgttatgacatgggaagaattttgagagttattcaacgctaagtattataatgaagccatccgtagtgttaagcggaaagagttcactgagttagtgcagactgagggaatgtcagtcactgagtatacta

SEQ ID NO: 108500 - DNA, 825 bp, Cannabis sativa
  modified_base (173)..(173): a, c, t, g, unknown or other
aaaatagggcatgcacaacctacgttgtaggctgtgtaggtgttaggtgagattagccttcatcctttcctgattgatgtgtttcttcatgatgaagccgtcactagctcccttggttgttgtgtaatcgccccaaattaggtttatgacatctaacacgtcttcttatgggngttcccaaacattttctccatgccgcattaaatgcaaagtgactgtttagctccatcctttctagcctagagaaccctatccgcgccttaactcccggaggagaagctggttcttttgctcatgttcgggagctagcatcgtgaactatacttattgtttcttaaggtgttttagttaaatcttcaactcatctctgggtgacgtgcccatgtcagccacatgtcacacacaacagctgccatgtatattgggaataaactggggaaacatttacccccaagtcttatttagtcttaggtaaataagacttgtaagtcgtctttggtatcaataaatgagcctcaggcgcgtgggaaatatttatgattgtcatcattggcctttatttcttgtgcaagtaacgattcgcttcccgcctatagacagacccttccatcaatgccggtgtcagaaaggtactcaagcgtttcaactgccctttctcttcatcatacccgttcatcccattcgttagatcgtggaatctaaaacgttgtgaaccctcactgcacaatggtatttgatcgacactgcctcacaccccaaatggtctataaaaaccaacactttccccaactaggtcatttgtactaccctttagtttctaaattt

SEQ ID NO: 108501 - DNA, 590 bp, Cannabis sativa
gtgccagcgacctcacccccaaagcgacgtcgcttctttcgccgccgttagctcgagatcgcaagtcaaagtttgaaggttcgaactttgaacggattttccggtcacctttggtgtgcgtttgacgagccgtcttcaccactaaactcaggtcgtcgaggagaacaacctacactaaaccattttgcccaactcactactttttctagtgacaattttgtagctctgcccctttctggcggcatcgtgtactattttgacaaacggtcggcatgggtgtgatctactcgtcgaggtggtcgttttgatatacactactcttattttcgacgacatttccagtacaccaatttttaccgccaccgatacttaatgtgcactgcttaggtgaggctttggaaccttaaattttaaatatactcatattatatgttgttggactcgatttttgatgtagaatgcgatgatgataattatttaaccatttaatggcataggtgatagtaatatctaagattggactaaacaattggagctcgggacttgagagcttaagatcgtcttttggacaaagtttaatgacttgggag

SEQ ID NO: 108502 - DNA, 725 bp, Cannabis sativa
  modified_base (673)..(682): a, c, t, g, unknown or other
gtctagaatcagtacagcggaccaatgaggcaattgagaagattaaagctcgaatgcttgcctctcagagtaggcaaaagagttatgcaaatccgaagcatagaaacgttgagttccaagtagggggtcacatgattttacgagtatctctaatgaaggggatcaaacgtttcgggaaaagaggcaagttattccctagatataaaggacctttcgagatgctcgagaaggttggacaagtggcgtatcgattagttttgcctccagctgtttcagcagttcataaagtatttcatgtctctatgttgagaaaatacatttcagaccctgctcatgtacttagctatgaaaatcttgagctgcaaccagatatgtcatatgaagaacagccagtgcaaatccttgacaaaaaggataaagtccttcggaataagaccatagctttgatcaaagtactctagagaaaaagcaaggtggatgaagccacctgagagttagaatcagacatgagagcccaatatccagagttattcaggttagattttgaggacgaaatccttttaaggggggatagttgtaaagactgcttagcttaaatttggaaattagcatataaatagggtttggttatggaatttatttattaattctaaattattaatttatgatgatnnnnnnnnnntcagaatgcattttatatgtcatatatagaaatttcataattt

SEQ ID NO: 108503 - DNA, 520 bp, Cannabis sativa
  modified_base (414)..(433): a, c, t, g, unknown or other
tgtgttgggatagaaaaattaaaaagaggtagtgttttaagtatcaggttcaatatattttaatataataattattattaaagaggcattaagttggatcaaggatcataaatggcataatgttgtgtctcttaattgtctaagctattcgaagtaacatcaccgtagtttcgccttttgggggagcggtgatggactgtcgaaagcttctatctattttaaataatgtttctttgttttttattaaacgatctgctaatatgactacgtacaactttgctaaagtgtcacattctttttcagattgagttttcaataggagagatgttcctactgaattacagtcttgtcttttgactgatttaacaaattaataaaattccaatttgcattcaaaaaaaaaaaaaaaatcannnnnnnnnnnnnnnnnnnnttactgatgcttaatatcaatgctcggagtttggatgatgatgcttcatcaaccctctaatcatgcttttttcttacttcacccttt

SEQ ID NO: 108504 - DNA, 546 bp, Cannabis sativa
atataatgtaatttcctcaaatatctaaatccaacataaaagtagcttatcaaaatgatcctattttatgatcatatatattttaaacaagtttacttacttatttatttggtaactactttggttaaatgttcaaaacttatgtttaaaataagtgatattttaaaagtataacaaaattgtacgattatttttccttccatagccaagcttaaaaaagataaataataagttacttaactaagctttaaacccatagaatttcggtaattggatcataaatattatgtgtgattgaaatctttcaaaataaataaataggtaatattattatttttgtaattgttttagttttgctggtattattgtaattttttttttgtatagagtattgttattgggcacctccaacaccacactgatgtggcgtattgtgatttgttagtgatttttcatattatttattaaattaaaatgtgtggaatctgatattaaattgcaccaataacaatatgccacttcttattgtgcttgataccttaactt

SEQ ID NO: 108505 - DNA, 667 bp, Cannabis sativa
gtctaggccacatttcacaaaggggtaccactataaaaaatgtgagattttcactattttgattaaaatgattgttagttcatgaaaactacttttctctcaacttgtcccatagaaaagtgatgcacaacggtcttggcttcatccttgtgaaatttcgtgatttttgagatgtgtaggatgagattttaacagaacactaacgagtgtaagagtaacgtaaaaacttgttaaaatttaccctaaaaagaagaatattttaaatttttaaattaaggggtcattttaacaaaatttaacgcgaatccaattttcatattcacgtcttagtagtaagaattcattgtgactagtggagaaaaatatttcgagatggggtccggtcatatttcaaaggggtaccactataaaaaatgtgagattttcacaactatttcgattaaaatgaatgctattgcatgaaaactagtatatatctcaaagtttccaatacaaaagtgatgcacaaccgtctttgttttgtccttgtgaaattatatgattttcgagatgtgtacggtgacattttaactgtacactaacgagtgtaagagtaacaaaaaaacttgttaaaatttaccctaaaaagaagaatattttaaatttttaaattaaggggccattttaa

SEQ ID NO: 108506 - DNA, 637 bp, Cannabis sativa
ctttttgaaaaaatgtgtagctttagctttaattaatgtcctcatgtctttgcattacgacaatgagttgaaatgactgaccactgttaaaaaaaaaaatatatttgctgtgaaacatgtttatgttttaattttttatatttatttttttttggcaaaacttttttatatatatttattaattaaatattatcgttaaatattaattagattaatattgtattagttttaaaattttactttcacttaaatagtgtacatagtagtcattatttaagggtgtggcttcaaattttcaaagctataaatgaacaaaaagggattttttcaaaaaaaaaaaatagagaattaagtgtaagaaaaattaaaatataaaagaattttgccgttaattacttaaaaaaaatagtaaaagatactagtagtggtaatagtacagtgtctatcaccctttaagatgttagatcgttattagttaaattaaatattcatttcgcatgatttaatttaatttaatttaataaatattataaaatatcattaattatttacaaaatgttaaacatgttttatagcaatactagaaataacaatggattggagttggaaatggagatgggttttttttttttttttt

SEQ ID NO: 108507 - DNA, 707 bp, Cannabis sativa
tatataattgagtgtaaattaagttttagagtggttaagcaagtatgaagacagtgatgattgcaagggagcaacaatagcatatgaaccagggagtaaaatcttaggagtaatgacaggaaaagaatacgagagtcttagatattgatgaatcagtaccatcaacgagagagtcactataagttggtatggtagttcatacacaaggtttgtcaataagatagggaatctacttgaggtatatatatttctggatgtgtttgaaattattatacctgaacttcaactcaaagaatataataataatgttgtatcattaaatacaattaaataactcgttacaattaaacataagtttgataaaaaaaatataaaaatatgaagtttgtttggactgattggtgcgagaaaagtttttaggagttaaagcagcgcttgattaccgctctagtactaactcttccttcagataaggaaaagtttgttatttattgtgatgcctcgcgacaaggtctgcgctgtgttcttatacaaactagaaaggtaatagcttatgcttctcagtagttaaaagagtacaagcagaggtaccctactcacaatctacaactcacagcagtagtatttgtgctaaaaatttggcggcattacttatatggcaagaaatgtgagatatacactgatcataaaagtctgaaatacttctt

SEQ ID NO: 108508 - DNA, 575 bp, Cannabis sativa
ttaagtgttctaaaaacttcttttacttaattaaaatgtgacaaataattaataaaataaatatatttttaaaactctcattcttattttttctaaaaaaaaaaaaactaagtataaaatgataccacatagtgtatgaacaaattttatgtatttctcaagaactatttaagaagtatatatatatttaaaacaaaaaaagtgaaaactagagctaaataagaaatcaataaataaaataaaataaactttcacaaatcaactaaacaaacagaagaagaactagatattaattctcctctacaatacttagtcgatgttgtactctctgttcttcgagtatctccacttataaaaatacccatcgaccaaaatatggtggctaaaaataaaatacaagttaaaaggacacaagtagttttctaattatgtgtccaatcctgaatatcaccaacaagtggaaaagatataacatctctcaatgtatgtataactaattgagagattttattgtggtggcaaacaatgaagattattataatatgtgacaccctgaacaacaaagagagaaattt

SEQ ID NO: 108509 - DNA, 822 bp, Cannabis sativa
acatcactttgggcctgtcccacgagacccaacacctcctcttcacccacttttctttttttattatcataaagaaccacctcagcattcccttcaatcaatatatttttttccttattctttccatgtatagatatattgacatttccttttttacttctcaatctaacctcctcctgatcattctccatcctcccattaaacatatcatgatcttcattattattcagcaaatatccctcaccctgattagtggccacgccaactggagaatttgttctcatatttggctgacttgaattttttccaggtacattgcgatcagtgcttcccgtcagcttccaccctctgttcctcaaccaccgcgctccaaagtgcttgtacgatctttgtggctaagcaatcataaactccccataaggtttagcaatttgatccaaaggctgttgaaacaatctgctacagaacttgtccgaatgccccataacaccacagatgaagcaaaaagtaggaactctttcgtacttgaaatggacccaaaaccagctaccattctcgtgagttaacttaagtctccttctcagcggctttctaatatccaaagtgacccgaacccgaaggtaatctcgccaaacaccgatgaaattcttaggatcattctcaacaaatttccccatagtatttcctatgccacgaacagttgcttccttcatacaatcgggtttgacatcatggatttgaacccaaatatcaagatgatttaattggattaaattcggatcacctcctaccggcaaacgttgaataattaactgcatccga

SEQ ID NO: 108510 - DNA, 525 bp, Cannabis sativa
agtctatatatataatgtaatattcttaggtgtagtttcatttagctccacaatcaatgaaatttattttagttaattttgtttttttaagataaatataaattttcatatatatatatagacaaccgattttgtgcttatctcagaaaatcacggattgtattcagttgtactttataatgggtcctacgtactttattatattttttaatattttttgtaattttttttatttatttggcaaccgactcatgtaagttttttcaccattttgtcaatttaattttttaacttagaaataaaaaaatacaaaaaagtacaaaaatatttaatcaaatgactgttggtggtagttaatagtacaatagtactgcagaggttgagtccatgttgtcagactgaggttatttttatcttttcagtcattcctattttttatgtatttttgcagtggtagtggagtacgttatatcacgtaccaagtacatttatagtttatgcatgatgtttagtaaaaaaagagta

SEQ ID NO: 108511 - DNA, 578 bp, Cannabis sativa
  modified_base (130)..(131): a, c, t, g, unknown or other
ataaaatacatttcttcttccttctctatggttattttgtggttattttttttttattatttttgttctcctaaaaatatatttgacgagtgcactagaattttttttttgaggtgtgtggttcttttanntttttctaagtgattatatctgcttattgttttacatttgtatttgtgttattttagtagttttttagttctgacctgctatatattgcattgggtattgaggttgtgcataacattttttagtttttttaatcatattttcctttcttttgtttgatttattttagtgttgttttacagttgttttgccacaattatttatttgacgtcaatttcactttctttttctcaatctcaccgaaatttatggttgttttccgatggttatggtgttcatgtggtgattctgttcgtaagtgtggaagatggatgcctcattttttttttttggtgtttacagtataaaagaaaaaaaattatccaagatagtataaaagtaatttctgccgtgtggcagtatttttgtaaagattgggccaagagtcagtatttttgtaagtttttttt

SEQ ID NO: 108512 - DNA, 549 bp, Cannabis sativa
aatttttcatgagtataaaatttacttgtaattaagatttatacatcttaggcgactataaattacttgagtaaacatgctattgcataaattgataaatagaaattaaattatattatgccatattagatagatacaattgaaattaataaccttaattctaatcattgtcaatttttattgtaatttacttattttatgcttttattacttttagttgtaatttctctttaaaattttaattttttagtacttaacgacaattcttgggttcgacctcaatcgtatgagtaattacttacaatcgatatgtacacttgtttgttaaaaatcaacaacaacaaggcattaaatatataaataatttttctgtagtttcatcgaaaggctctttcaggattataatggaacttgttgctcactttgatcttcagttacatcagatggatgttaaaacaatgtttctcaatggtgacattgatgagacaatttatatggagcaatcagaaaactttgtgtctggtaaccaaaagaatatggtttgtaaat

SEQ ID NO: 108513 - DNA, 660 bp, Cannabis sativa
gccgttagcttaggatcgcaagtcaaagtttggggtttcaaactttgaacggattttccggtcatctccggtgtctgtttgacgaattgtcttcaccactaaacttagctcgtcgaggagaacaacttacactaaacaatttttcccggttcgctactttttccggtgacatttttgtagctccgcccctttccggcgacgcttcggtgacatcgtgtaccgttttgacaaacggttggcatgggtgtgatctactcgtcgaggtggtggttttgatatacactacccctattttcggtgacatttccggtacaccgatttttactgccactgattattaatgtgcaccgcttaggtgaggcttcggaactccaaattttaactatagtcatattatatgttgttggactcagttttgaatgtagaatgtgataatgataattatttaaccatttaatggtataggtgagagtaatatgtaagattggactaaaacaattggagctcgagacttaagagcttaagattgtcttttggaaaaagtttaactactccgaagagttaaggactcaacttgattattggacttgatttttatatgtgttgtataacattagacatattccaatttttatgctttacaaaattgtttgaaaaatt

SEQ ID NO: 108514 - DNA, 535 bp, Cannabis sativa
tgtcgtgccaatgtttttaaagggtaggcccggcacggcctgtaggcccagtgtttttgtgtcgtgctcagattcgtatcgtgcttttctcatgtcgtcccgtatttcttaaacaagccaacccgttttcatatccgaacttaacttcgtactttacttttttttatattattttcttacaactatcgattatatgtatattttaaaactttagttatattcatataacttttgaataatatttacaaataattataaaaaattatcaacatcattaaaatttaaatatttaagtattcaaatttttatatcacaccttataaataaattaatatataatgttattttttcatgttttaattatagaattatgatatttagtattatatttaagttttaatataatttaatttatttataattgataaatttatatcttattattattattaaattataaagttttttaatatgttgtgttgtgttttttcatgcttgtagtgtgtcgtgctttttcgggcttgtcgtgtgtcgt

SEQ ID NO: 108515 - DNA, 568 bp, Cannabis sativa
  modified_base (39)..(49): a, c, t, g, unknown or other
  modified_base (307)..(317): a, c, t, g, unknown or other
tgatctttattaataaataaatttgattatattgaaatnnnnnnnnnnnagggcacaaaacccaacactcttccacttggttcagcccaacattatgttagggtttatgctctaaaaagcctgtaaaaatatttatgattattaaataaagagttaaacatttgatatatgtgtgaatgttaaattgttaatatttattattggataatttatattaaatatcgaaaaaatctttattcatatatgaggttgtggcttgtagctgtacagagaactaagatcacttagttatgaataaaacagtcannnnnnnnnnnaagttatggaatctttaatcaatggttgctattacggttcactgatgcccgttcttcgttgtaagtaatctcagtttgaattacggatgtagtgagacatcgaagtgaaggtgttgtatataatagagattatatatgacaaagaccgatatgaataaagttatctttatgatacatgtcgtttactataaagacctaattcatatcaaaacgatgatcaacagtacatcggcctaaattttgagttacca

SEQ ID NO: 108516 - DNA, 559 bp, Cannabis sativa
  modified_base (57)..(58): a, c, t, g, unknown or other
  modified_base (226)..(234): a, c, t, g, unknown or other
gaagacttgcatgattgctgcaagctgcagatagacaatatgtaggggcataggctnngatcaagactgagctagtttgcggcatgttatgggcatattttatgttaatggggacactggtgttgtatgggacactgtaagccgaatggtttagagagcatatgccgatgggagatagtggattgggatgacttcaagtcttaagagtaagactgggtgttatcannnnnnnnnaaagttagcaagtcatcagaggatgcaaggttgattttgggagatagagttgtgaataattttgagagccgacacaagcaggagccagagggcaaattcgtggctttgggtgattgttagatcattgaccgcgtgaaagaagctcagaggatcatgtatgtagtgggtcagtaggaccttttgcatgaagtcgtgggtgtgcggtagggccagagggccaatgttgagaactttgcgaagagattttgtgcaagagtgcacttggtgctgcattgggtgaaattggcttgcgagtctcgttcaggtggaacacactaaattttat

SEQ ID NO: 108517 - DNA, 503 bp, Cannabis sativa
tttattagtttaaaagggagatttttatatatgctgtctcaaaaagtacatgtggaagatttttcatgaacttgttacctaattacacatatagctttgacatttcgtgagcctaatgattaaaccctaatgaggttgaccgaaaagagtctctcataattaattacaaacgaaaatactagtatagcacaaaaacacatcttctacaaatgtgtcctattgtgtaaacaataaagataaagatatagaaggtgtgtttttgtgctataattggaaaaaccttttattggattttttatcattttatagtagttggatagatttgaagatttggagctaagctatatattatgagtttgagcaaacacatcaatatatatatatataaaggaaggttttaaacattccatgtgacagcatacttatgcttattttctaatctttgtcctcttaattttctaacttatttctaattttttgatttatttaaattttattttatt

SEQ ID NO: 108518 - DNA, 972 bp, Cannabis sativa
catgaaaggccgaggtatagttcttttcaagcataatatgtttaggcccaaagtcttagtccatcaggtcactttgggtcactagaaatttgcaaaggaaattacattaaatatatctcttttaatttgatactttttatttttaccatctttttcaaaatctattatgtttatctctttttttcaatcattctactaatttcgcccctattacttcacaatagttttcattcttctctaattaaaattttgttcgaacttttctacaaatctacacatctatctacaaagaacacaaatctattatgtttaaaattatgttttagttatgtgaaagtgtaaggataatttgggtacaatacttataaaaagagatatatttgaattaaattttatttaaaagtaaatttagttaatatatatatatataaaaagaagtattcttcaatttttctcgagctttttcaccaaaaaaggaaaagagaaaagtttatgattcttgttaatatacattttttgttaggataattatataaagctctattttttgttttttgtaaaattttatatttttaagtttaaataatttttttatattgttacaatgttctataaaattaacataacaataacaaaaaaaaaaaaaattacgtaaaagtaaaatggaaaagagcaatcaaacagcaacaaaaaacatacaataataacaaaattaacaagagtacaacataaaaatatatcaaaaaactaaaattataaaaattgtaaaaatatttaaaattccgtacataaatatttttataattttttttttaattttttgaaataatctattataaatatgaagtatatttccccataacatttactactttaaacccatccaacatatgataattcttccaaactcattatatcaaattaccaagtttggaccattggcaaaattattaccaagtttgagtaatatac

SEQ ID NO: 108519 - DNA, 574 bp, Cannabis sativa
accacaattggacctatctacttgggctcgacccacattagacccatccaattgggtgcggcctacatttgcttccaacatacggcgtcgtttggcatccagcaaaattaaactatcaaccccatcttccaactcatccaacttatttaaattaacattattagggcgaacatcgggcgagttgaccgagttttaagttcgtgtatttcaagtttgcaggtttcgggttctaaaaattgtacctgaacccgactcgtgaaatggtttcgggttcgcaggttttgggctcgcgggtttgcgagtttgggttgatcgagttgacctggtcaactcattaatttttttttaaaaaaaaaaacttaaattttatgcggttttttctatacgttgtattagggcgaacatcgggcgagttgaccgagtttcaagttcgtgtatttcaagtttgcaggttttgggttccaaaaattgtacccgaacccaactcgagaaatggtttcgggctcgcgggtctgcgagtttgggttgacctggtcaactcattaattttttttttttaaaaaaaacttaaatt

SEQ ID NO: 108520 - DNA, 598 bp, Cannabis sativa
gacccgaacccggacccaaactcggatcccaagctagacctggactcgggacccaaacccggacccgaacttagacccaaacattgaacaagactggacacagaactgcgggcggggcctagaatcgcaccccaatctctgtcccgaaccagtactcgaacttgggaccctggactagaactagaaccagatcgggacacgtgacaggtatccacatttagaactcaggcaaggactcgaacccagaccaggacccaaaccaagactcgggacccaaaattggaaattgtacaacaacttccaaactaggaccctcgaacaagactaggaccgtgactaggactcggtcccagacctagaactgaactcagacctagccccagacccaaactaagaccgaaactcgggcccagtcacgatcgtgtacccagacccagaccgagacccagactcaaacttggacaaggacctagacctgggacccagtcccagacccaaactcggacctagatagggatctcgatacgaacctggactcgaaacaagaccttaacccagaccgggatcgaaactcaggacctaaattcggactgagacc

SEQ ID NO: 108521 - DNA, 522 bp, Cannabis sativa
aaatatataatacgaaaacaataataaaaaaaaaaactatataaaagtatcagaaaaataacatttaaataatatcaaaacaacaataaaacatcaacatcaaattaataagagtacaacaacaaaaaaaaaatcgtattttctgtaaataaaattgaaaaaatcgtaaaatgtttacaattccgtaaaactgtatttttgtaattcttttattatttttgtatatttgtgaaataatccctataaaaagataattacatatgggataatagtactagaaagcccactccctacttattctcaattcactatgactttgtctaatttttaatggaataaatgaacaaggttaaacctagactattggatggaattatattaataaaatataattaagagctttcatatatacatgttacatgtgattacccactaaaatagtgtggtgatttagttaggttacccaaactttcactaatcacttattggatttttattaatatttacaaaatattagagtaa

SEQ ID NO: 108522 - DNA, 595 bp, Cannabis sativa
gaactcaaacttactcaacctaaaaattaagctttaaaatcagtaaattcaaaattaaaacattaacattaaatagtagaaaactaacaatcaacaccctaattcgtactgcccatgaaatcacaaatcaccaaccaaaactcaacgaaaaacttataaactcatgagataaaggtttctagggtttacctcacttgcaaaaccttgaatccttgctgcaaacaccaaaaaccagcagcaattccttggttcctagctggttcgaagagggaaagagaaggaagagagaatgaacttcctttggttttcttacttttctacttttttatttttttgtttaatgcataaaggattaaggaaaaattaatttccttgctgaattgataagctaggtgtcaccaaaaagggcagccaccaaaccactaacctaagcaaaagactaaaataccctcaatgttaatttctagcttatttccaacataggggcgaaatggtaaaaaaccataaccccggtattttatttcctccaataaatatcccacaaagaaataaggttctagacttatccatatgatcaaactagccatctatcgca

SEQ ID NO: 108523 - DNA, 624 bp, Cannabis sativa
cccgcctctaaagatctttaccggcggatttttcaattattaccggcggacccttccgcctctaattcttatatttgttgtagtgactccactaactcttctctcttttctgatttgtatgtacttgttgtatttgctttaatttcatgtttatatacttgtatagagtcggttgatcacagatctaggagttagttacaataacagttgtaactaactcctatttcttgatctagtagaggcaaagccacctagggttgagtcctttgttttgcaaatatgctgatgtggatatttgtattgtaaagggacttggttataagtggaattcactcaacaatttccacctgaattcctcttataaccagttctgatgtatgttaattttatctctgagagtcttagcatgataggtcctactcttagtctcctgggtcgattcttaataagttcatacaatgtgtgaacttattaagagtcacaattttagtacccatgtctattgggttgtcctctgtaggcaccttctcaatgtctatttcaccttgagtcactttatctcgtataaagtgatacttgatttctatatgctttgttctatcatggaacatagggtttttgcat

SEQ ID NO: 108524 - DNA, 626 bp, Cannabis sativa
gctcctcattgtgaggttgctccgaaactctggaataagctttggaatagtaaaattctagagcgtcacaaggttctgtggtggagcatcctttcgaatgctctccctgttcgagtggttattggaaatagattccacatagaggatactagctgccctttatgcggattgggggaggaatcctttgaacatcttttcctatcctgtgatatagcttttcatctttggcgatcctctccctgaggcattttcccagtgtgtgacactggcatccgtgtttgggattgggtcaagtttatctgggatttaaataaaagagggatcgaagctaatgatgttttcttgtatgcctcgattgtagtggatactatttggagagtgcgaaatgagaaggtccataataactgttctcctgacataataaaatgtattgctaatatttgtacttcttatgcagattatcatgcttctttgctgcctagtcccagtcttgatctaacggaagcttggtcccctcctcctccggattggatcaagttgaattgtgatgtcaaagtgggactcaatagtatgtgcattgctgttgtggcacggaatcatcttggcagagtgattagagttcagac

SEQ ID NO: 108525 - DNA, 708 bp, Cannabis sativa
  modified_base (263)..(282): a, c, t, g, unknown or other
gtttttgggcagattgagttcgaactttggaatttcgtaactttttattccgaactccgatttgggacttctttatatcgttggaaagctcgttccgagctctgtatgaattttaaatgccatcattgaatttatgagtatggaatcaagggttaaccctatttgtgaaaatcccagatttgtgtgactaggattaccggtacctgatcaggagcacccggggatttggaatctctgtctattgtgggacaacaggtaagacnnnnnnnnnnnnnnnnnnnntgcgcagtggcgcttatattgaaattgatatgtttgattatctaataactgggattagggtttaccctaataggaacggtttaatagcctagggttattaccctagtgaaatatgtgtggaaatgtcatgccatgttatatgtaatgagattcaagggttatgcgcttaaggcataatcaggttggactcggtaaccataatcgagatgaaccaattctaaggccttaatgtctttagacgtgtgagagcaacacgtaggtctacgccacgtagatttaaatagatgtgtgagtgcaacacataggtctacactatgtagacataaatgggcatgttactgcgatacgcaggtctgtgtcacacagacatatgtgaatggcattattgtgtaaatagtatgatgagcatattattattattattat

SEQ ID NO: 108526 - DNA, 934 bp, Cannabis sativa
gatctggaacggctttgggaccgaaacccgtagttggtgtctagatctgggaccagcctcagtcccaaacccagacgcgaaccgaaacctagcaccataccaaaccctggacccaaacccgtaccatgtgacctaaaattggaaccgaaactggaagtagaccaggacttggacgtggacctggacctggaaacgtaatcatacctggacctagactcggaaccgtaaccggactaggacccgaactccaacctagacctagacctgaaccgaaacccagacctgtatcccaaccaagacataaacgcgatgccgaacctggacctgaactcagaccgaaacatggaagcagaatcgggacttacaattggggccgggacctagaaccgaaccccaatctcggtccgaaactagatttgggactcagactaggacccaaacccgaccccttacccaaaactagaacctgaacaagaactgcaacagcgggaccctcgaacaagactaggaccgtgagtaggacgtggacccaccctagaaccgaactcgaacatatccccagaccgaaactgtgacctgaagtcaggccctgacacatcgtgtacccagaccaagactgagacctagaccaaaacccggatccagaccaagatcgaaacttggaacctagatctggaacgagaccctgacctaggcccagacctagacccgcacccgggacccaaacttgaacctggacctaaacccagacccagattgggatccggacctggacccagactcagactcagactccgaccaggaatcagacctcagcccagacccagacccaaactcgaacccagacactgaatcgaaattgaaattgggactaggacccaaactggatcataggactcggacctggattggggacctggacctaagccacgga

SEQ ID NO: 108527 - DNA, 617 bp, Cannabis sativa
tctctctctctctctctcaaagtaagaggtcttcaatatatatatgttgttaacaactaactaaccttaactgtcaaaatagttaagttagtttgggaagttactaactgtcaaaactgacagtgaatccaaattcaagaggtcaaacctcaacaattccacttggtttgatcacttgaatacctctgtaaagatttccaatgggaagactggtttctaattccaatgaaggttgtctccatgaggagacatggctttagttgattctgagtaagtttagacaatatctaaacttgtcacttgtagtactctttgtgaagatgtctgcaggattgtcatttgttccaatcttcttgacttgaacttgctttgaactgattatatctcgaatgaaatgtagttttatatcaatgtgctttgacctctcatgaaacatgggatttttcatgagatgcaaggcactttgattatcatagaaaacagtgatgttttcagattctatctccatttcagtcgacattcccctgagccaaatagcttccttgatggcttctgtagcagccatatattcagcttcagtggatgacagagcaaccactttttgcaagttcgatttc

SEQ ID NO: 108528 - DNA, 512 bp, Cannabis sativa
gggagtggtgcgtggcgaccagatactggctcgccattgctatcgcgtagagctgcagaatagaaaatccgatcatcagttgatggtgatcttggtagaagaaactaaacagaaagacgaagatctcaacccccgagttccagatgagagaatcctactaaaactaattaaggaattggaagaggtaattctcgaccaaataaatcccacaaagtatgtatacattaggaagaatttggacgagcagctcaaatagcagctaataagctttttgaaggcaaaccaggatcaattcgcctggagcaatggagatatgatggggatcgaccataatattatctgccatcatttaaatgttgatccaagttaccaagagaagagacaaaaaagagccccttggatatcgagaggaaaagggcactaaaacaggaagtggacaagttgttagtcaacgactctatacttgaggtgttttatccctcacgaatagccaatcctgttctcgtcccgaa

SEQ ID NO: 108529 - DNA, 678 bp, Cannabis sativa
gtcgtattgaacaactgaaaaaacagcaaccagatagactccatttgccatggcatatggatatgaagctatgctgcacatagaactcgagccaccatcccacagaagatcggcgtacaatcaagataccaatcagatactcttggccgaatcacttgatgaaatctaagagaagcgaagtacatcaaacttaaagttggttgcccatcaacaaaaagtagctcagtatttcaacaaacaagtgaaggctaggaaattttttgtgggagatatggtcctaagaagagtatttctaaacaccaaagacagtacgacaggtgtacccggacctaactgggaaggatcatatcaggtagtcgaagttctcgaatcaggagcatataaattgggtaaatatgatgaaaaaatgcaacatgttctagtgccacggtattagaatggagaacatttaagaaagtactaccaataaagtatcaggtcggatgaccatattaagtactgaaagaacatttacttttaagtgaatggcctgctgggcggatcacgcccaaaggttcagataaaatgaaaaagtactcaggtcagatgaccaccattaattaaagtacaatttctaatttctgcaattatgttttatttcatgttaagctaaaagattagattagatcaaatagctct

SEQ ID NO: 108530 - DNA, 645 bp, Cannabis sativa
aaactggcacgggcttcggcatgagacaatacgatgctataaattgacacgacacgagacgaaaaatatatcctttagtatgatacgacacgagaaacacgaaaagaatgacatgtaagtacgaatagactagtctgaaaagtacgaccaggagcggacgtacattatactaggggccatgtcccccccgcgaatatatatgtgcttaatttgttttgctaattattgtatagcactcctttgaaaaaagtcaaattaatttgtaaatgttaacttatttttgtctttttgttgatatgtatttaccatttttttatttatttatttattttatatgaaaaatctatttgtttttttttttctttaaaacatttatttcttcttagtaattgatttttatataccacttcaatttttttttgaagtaccacttcaaattttttaattgtgtatagtgaaaacttttattcttatagtaaaatctacactttgtaataagatgaaaaataaatatttaagtagttatttgctagtattgtatattgaaaaaaaaaaatagtattcacttatcgataatttttgtgatatgcaagaaaaagattttgcattttaattttaattatgaagttttttttgaaagaaatt

SEQ ID NO: 108531 - DNA, 636 bp, Cannabis sativa
agctgttgttattgtttaattgtgtggttgaaaagcttgctcaacaatggcactttttaattctttgtgtaatttttgtgtttgagctgtaaaatatgtttaatatgttatatgatgatgctctggaaattttggtggtgattggggaagatttgagtaggttttggaggcttaaaatttgagatttttcgtgttaattctgcccagacaatcgaaattccggttggttcacagctgttccaaatggaattccggttggattgtatcgtgggaaggtcgaattttgttttggccataacttttgactcgaactctgttttggatgttcttcatatcgttgaaaaacttgtttcgagctctatatgttaatctgtaaatggaattataattatgtgattattgaaagtgaatttcgggattaaccctatttgtgaagtctcgagaatgtgtgactaggactaccgacgcttgctcaggaacacctggagatttgataccagggaagacaatagttaacacgttgagttaagcgcggtggcgctcatgtttaatattataattgtaattaattgagaaccgggattagggttattaccctaaagtgagcggttttgtggcctagggttattaccctag

SEQ ID NO: 108532 - DNA, 689 bp, Cannabis sativa
ctagaggaaggctttgagcacatgcttctcctccagactcattcacatcctcagtctcaccataactcacaatcagttggtggaacatatctgaatctataaagaaaaaaaattattaatatcacaacacacacaacatcataatgttatcatatgggtatgtccaaaaaagtgaataagtatatatataaaaaaaaaaaagaagagagaaaggaaccttcagagtcataatcattgagcactgtagtattctcgggattgttatcaacaccaaaatcactccagtatccctcctcaaagtagtgggtggtggagacatgtggatggaagagtcggctgtagtaaagttcccatgagaaggattcccccggtcaatgggaataacaggagcatcaagtccatcgattgtgcttgcggcagttgagttatgcttaggagggtacaatcccactaacttgagcatctccacaattacaatctttggggcaagtttttcagcttctggcatggctgtcaaggctgtcgtatgttgtatcatctcctcagttgggaccggtctggaatatgtacccgtatggttgaaagcccggtgggtagtgtccatggaagttgtaaaaagtaggacaactgatgcttgtcgctgcggtttgtgctacaaataccagaaacatacggctgaccccgttctc

SEQ ID NO: 108533 - DNA, 635 bp, Cannabis sativa
  modified_base (62)..(64): a, c, t, g, unknown or other
aaaagcaattttgactctgggtaaaaataaaggcctagccaaaggaatagatgataaactgnnnggttcaggccaagcagcatctcgcaagaataacatttttccttctgttatttcttgcaagaagcgcctgtggcgactagcaatatcatcttggtgggtttttactaggtggtccctaatttttgcatcatttatttctagtttggactgaggttttgaaattatgggtttaaacgggatgccaagttcactaaggcactctgtttctaaaacttctagaggataaacttctgaaccagattgggatattgttacaaaaagaaagcaatcccgattcttggatgaaatttaccaaaccagaagcttataaatttgagaaacccaaaagtctacgctctacctaaaccctaaaaattacccaaaaaaattcaacctaaaattgctaaaaccaaataagatgacagaggtgcaaattataaaagtagtgatcaaacccagaaatgtaaaataagagagtaggtaagaaaacatagagagatgaatcacttactgtttgaagtcgggttttggcgcgatgaacgatttcgcagtcgacaatgcagtgaacatcttgataatctctttgaatgatt

SEQ ID NO: 108534 - DNA, 619 bp, Cannabis sativa
aatggagttgcagaaagaagaaattgcacacttttaaaaatggttaggtctatgctgagctattcaactctgtctacgtccttctgaagatatgcaatacagacgaataatgacattttaaatgttgttccatctaaagtagtccctaagatacctttcgaactatggaatggtcgtagacccagtttatgccattataggatttaggggtgccctgctaatgtcttaagaaagaaagaaggcaaactagaatttccaactgaagtttgcttgtttgtcagaagttctaaagagactaagggtgatctattttatagtcacaaggataacaaagtatttgtttctacaaatgctaccttccttgaagatgactatattaaagacttcaagccgaaaagtaaagtagtgttagaagaaatgctttcagatataactccttttaatgttccatcatcttctactcaagtagaagacaatcccactccctcagtataacgacaaaagttattacaattgagaaatctaccaaaaatgttcttgttcagaaggtcacgactcctcgtcgtagtgggagggtttttataaaaccatctcgtttatggcttggatggtgaaatca

SEQ ID NO: 108535 - DNA, 568 bp, Cannabis sativa
atggccgccatcaccaccaccaccgggcttaccgacttgatgaggttgaagtggtactcgaagttgacgtgaagacctgaaaaaattatttaatgcattgtttcccatctgatcgttaaacttagcgcgctcactctctgtttcttttttagtccgtttaagcaacaagtcttagatttgggccttaaaaaataagcttaaattatacaaaatatgactctcaatagatatagagctttctaaatttaagcaatttcttactttttttaataatttttttttaattgtattttaatcaaactactattacttttctgttattttataaaattaatatatatttgataaatttaaattataaaatattattaaaataatcaaatactaattatagtagagagtagaggtattcgtgatgcgagtggtacaagttataacattttttcaaattaaactgcaaatgcggtttttgtaatttctcaaactgtaaccgtaccgcgagatcttaaaatcacaaaaattataccgcaaaaatacaatatggtgcggtgcaatttgagcgactcac

SEQ ID NO: 108536 - DNA, 530 bp, Cannabis sativa
  modified_base (298)..(303): a, c, t, g, unknown or other
ctttcttttattgcttttgttggacatattactatattttcttgtttgttatctttggcccttagataaacaaaaagggggagtaatattttgtttttaattggacctatttttcagggggagttgtgtttggtacttgtgaactactttggattaaaagttagcatgttattttgtttttcgattgtgttactcagggggagtttttatttgttatgtctaactttaatttgcaggtactttgtgttaaaaaatattttgttcatctaaagttccaaagggggagattgtaaagtcnnnnnntggcaagttagttgacaaaatattttttcctttatggtaagattgttttgcatgcatacccgatttcttaccttgtgttttcgggttttagttgctcttttccttgttaggaaagttgctcttttcagctgggctttccattatttggaaacttcttgtaagagaagcaattctcttatggaaagttggtttttaaagaaaactttgattattgccttttccttatt

SEQ ID NO: 108537 - DNA, 695 bp, Cannabis sativa
  modified_base (459)..(460): a, c, t, g, unknown or other
atggaggatattatcccaccgggataacgggatatgtgcccggagcccagccctcgggcactgtgccggcagcagctccaccgatgagcggcatacagtttatagccactcccagatatagccaaggccaggccctggcccccgcatcatcccattttggaaatacctcagggataaatggacaagccccctcgcactccactctgacagccagtctagccgaggagtaaaaggtcctccaaaggcagcactcggacggaggaaaaatgacagaaaagggggtatactccccaatatacccagtacacggagttaacggactcccaagagcgtgtgtactttgctactagacaacatacgcactaccggaggccacctcctttgtacaaagacagctcccagagggatccaaacaagagatgcgagtaccataagacattgggcacagcaccaatgaanncaaaaatctcaaagacgagatcaaaaacttaatccggttgggacacctctacaagtggatcaagaatcggttgcctcacctcaacccgggtcaggcggctggaactttgccacaagtagcaccagggggtgcaacaggggtattggctccacttgttccccctggagatgctcagcatattcccggcctgccacctagacctaacgggagggtggctatgatctcgggaggaccc

SEQ ID NO: 108538 - DNA, 846 bp, Cannabis sativa
actatgttctgatcagattttggataaagtcaaaacataaaagttctagatctctcttttatctttttggaacatctttttggataaaaattttcttctctattttcttcttctattctaaattaatatgtgtgaaattgatacaatgaacatgagtagctaaacaattcattagggtctagatggagattgtttgatattttatttgtggttttaatatgatttaattttccctcaatttttatgtattctatttcattcgtacttaattacttctaattgcctaatcaccaattaaacgtctataattttgatgtgagtgtcgattatgctatagtgaaatagaaccgaatttcgatatatgacgagagtacctatatgatttggatatcttataaggtttttgtgtttgatgcttgttacatgtttaatttatcacgagagtagaaaatttgcatataattgaggtttatatatttgagaagactataaattaccttagtaaacttgctattgcatagaaattggtaataggaatagaatcatgttaaaccataatcaatagatctaattgaaatcgaaagccctaacttttatcaattgttaattcctttattaatttacctgcttcttactttcgttgtttttcttgttaaactaatttaaattttctcttaaaattttatttttatttagccaaatagaagtaagaatttaattttatcgtacttaactacaatcttcgtgggatcgacctcactctttgtgagtattacttattaaaacgatacgtatacttgcgcgttgcaaattagcacaaccctagttcattcttattattagaga

SEQ ID NO: 108539 - DNA, 681 bp, Cannabis sativa
  modified_base (85)..(87): a, c, t, g, unknown or other
aggtatattgtttgtatatcatacgatatattaataaaaaattaattatatggttaaataacatattagacaacaacaacagcannnaaatctaaaagaataaaatatatagtacattttatgtaataaaaatagttgacaaaaattcagtagagagttttgatttattgtttttcataatttctattaaacgaataaaacatataataccttttatataatgaagggtattttaggtattaaaaagtaaaaaaggacatttgctttattattttaaaaaagggacattaactatctatagagttagaaatagggtcatttacttacatttctcattatttaatgaaatgtcaaattcctttcttttgggtcttgtgtgagaattagggggccattagtagtggatacgacatactggaccctaccttccctcacatgaacaacttcaattgtgaaggcctatttgctttatttaaataattgtattaggctaattatactagtttaacctaattaaaatataattagcaacataattaattttgaaataaatgaaattaatttttaattagattattttaaaattaatttagaaaaaaaaaacttagtttaaagaaaagattctagatagtgatttctagtattttctaatatttaagtggaagaatattttaagttgaa

SEQ ID NO: 108540 - DNA, 729 bp, Cannabis sativa
  modified_base (181)..(182): a, c, t, g, unknown or other
agaactttccataggctgaataagtatctttcctgcaactttaacattcagtctcactggaagagttatagattctgaatagatttttatacttctccaaaatcactactccacccccagagtaatcatcatctcatcagcgaactttctagcatcaagcaagtctagaaacctaatttgnngtagtctaagagtattaaaataccactcttatcaactaacacatagttcctcttcttgatcttaagatttatttgattatcttccaatgttcttttcttgaattaatctgatacctactcatttctcccactcaacagcaagtgtctagtctaatgtattgcaaagcatatctgagacctttcactattgatcctaagtaattcctttcatgacttttatcttttctagaatagctgaaattgttccttagataaataaaatctatgtctagaagtcaaaaatcttctatagatttagctattataaaaatgctcgagcatcttactaagtaagttgcttgcactagagtaagtaaattactagacataccataagccataggtttagataaacttaaacctttaatactaggaacatgaagttttgttaagtccatagacttattttgaaaaatttcccttcttgtccttgtaatagaaaaccttttggttactccatgtgaatggttttaaccatagttctcttggttttgcttcttagttcctt

SEQ ID NO: 108541 - DNA, 742 bp, Cannabis sativa
cattattattaataattaattttaatatgaacttcttaaaacatgtaaatatttttcttgtatttgacataatataaatacacgtatatgagattgtcctatacatataaacattattatacgttttaaagagaaacatgtaataataattcttgacaattagagtcgccaatcaatatatttataaaaatattaattaatattaattcatatttttattttcattttactatattttactatctatattatctatattatcattttatatacttattattttatattttgatacgtggtgttttattttaaaaaaaatagtgctaaagggtaaagtaatataattattatgagtttctcttatgtatttttcaacaatttatatacaatttaagtgtttgaagaaattttaaaaagaaaaatatattcctatcaactatattgaccaatacagaattattataagaaaaatcaattgtaaaatatatatagtccaaaataataattggtcaaaacacataaattctttcataaacataaatttaatcatttataatttagacgttttataaaaatattgtaaaaaatatgagtgaataaaaaattacataatgtgaattattcatcaagattatatgtgtatttaaaagattatcattaactaaataaatataaaactaaatatgtattcataatatttttatcattacaaaacgacgaaaagtgaaattatttatatata

SEQ ID NO: 108542 - DNA, 595 bp, Cannabis sativa
acttcacacacctttttcagtgtagagtcaatgtcgaacatcaatgtcttactttttgaggaatcaaatacccatttgaaaccctccacagtccaaatgccataatacagtttaggcacaaatacagatgaatctatcccaaagaaatacaaacagataaacagaaaaaatcagcatactatatcgcacaagctactacgaatgtcgcacaatgtcgcctaatacaacaataatataaaaaagtatcatgtcgcacaataatcgcacaacaaaggaaaaatatcacataaggtcgcacaagaaaatatacaaaatcgcataatgctgcacaaatgtcgcacacaaatcgcctaacatcaaaattgcacactaaattgcacaacaatcgtacaatgtcgccaaaattaatcatgtcatccctaacctcagatttctcattaaagtgcacaaaacatcgcacaatgtcgcataaaatcgcaaaatatgaaaaaatccagaaaaacacagactgttcggaacaaactctacctccatttcaaggacacaaaagccacaaattacaactaacaacgttcagatccatacaatacaacaa

SEQ ID NO: 108543 - DNA, 709 bp, Cannabis sativa
acaacaattctgcttctgagttgacaatgaagaataaagggaagagcattattacccctgggactgataaaacaaatactgataaggggaaaaatattgtttcttctggtaccgaatctacatctattttattagatgtcttcacacctgacataggatctgatttaatgaatgactccagtgccactaatctcaatatctttgcctcgtatcctcccagtcctccttcatttcaacattccattcatccattgagacccgtaacattgcctgctgtttcgaaggctattttcactgctgctcctactgctacaattgtttccaagcttaatgttggtggtcaagaaaatgatcatccgaatagagttttcaaaagacaatttgacacaaactccatgagacaaactttgaagagatgtcgagctaacaattctgaaactgctccttccttgtcagaagttgctggtttaaatcagtccgtttctgcaactgtggattccactgatgtgtttgacaactacgcggtgattgcacagcaatcccgcggttcaccatgaaaatcgtcagttggaatgctcggggtttggggaacccgaatgcattccgaagacttcgtttgcttgttaaagagcaaaatcctcatgtgttgtttcttatggaaacaaaggttacagttaattcactctctcgttttaagcaatctttatgt

SEQ ID NO: 108544 - DNA, 598 bp, Cannabis sativa
  modified_base (540)..(540): a, c, t, g, unknown or other
attttactaaatccaaaatttcctgtgggctaaattttaaatttaataaaattagatgaactttatgatagatttaattaaacaattagtttagaaaaatgaagatttattacgtatctttattaaatttgtgataacatgcactattaaattaaatcttcataactacttgtagggtaaattaaaagaatttaatttaacatattatcctaattaatgatacaaatataataaaatctctgtggagtaaagttattatacctatataattaattacaagttatgtccattaaggtgaaatttaattaatatataattttatacaaataaggatattggggttactccctaattatataaaattatattttcacttagacattaggtattggactctacctaaaagtaagttcgttattaacataatagacaatcattgagattagtgctcctagtgtggtcgtccgaagatcattaaaaatcgttctagacatgagcatttatcccaggtttatattttcttatgtcaaaccacaaaantacttacgttttattcatattttattaattttaggaatattttgtgaataattttatg

SEQ ID NO: 108545 - DNA, 640 bp, Cannabis sativa
tttatcgatgacatccttttgtactctcaatctaaagaggagcatgagctacatctccgaattgttctacaacggcttcgagaacacaagctttatgccaaattcaagaaatttgaattctttttatctcaggtgtcctttctagggcatattgttagcaaagatgggatcaaggtggatccaggaaaaatagaatccgtcagggattggcctagaccaaaaacagtgacagaaattagaagtttcttgggtttggctggttattatcgtcagttcgtagaaggattttccaaaatctcaacacccttaaccgagcataccaaaaagaatcagcgttttatatggtcaaacaaatgtgaggctagttttcaggagctgaagcagaggttgattacaactcaagtgctagctttgccttctgacaaagaaaaattcatgatttattgtgatgcatccagacaaggtctggggtgtgtactgatgcaagctgatcgggttatcgcttatgcctcccgtcagttgaaggattatgagcagcaatatcggacccatgacctagaattggccgcggtagtatttgccttgaaaatttggcggcattatctttatggagaatgatgtgaaatttataccgaccata

SEQ ID NO: 108546 - DNA, 544 bp, Cannabis sativa
taggtccgatttatagaacatagaaaccctagagacagccacaaagtcgaatctacagctgtacaaaaatttcctaagaaaaacttgatttcagcatcagaaccaaattctgtcccagcaaattagaccagaaaatgaaacttaccaaaaatgagttcgatcttgtattgggtcttaatacctgccataaacagtgtgtataatctaatcttatcaaggcacaatcaaacttattaagggaaataataataatcaaaatttcctttaaaaaccaactttccataagagaatttcttctcttacaagaagtttccataaaaaaaaagtccagttgaaaatcattctttcctaagatagaaaagagcaataaaaatcgaataataaaggtgagaaaatcggttatgaatgcaaagaaatctcaccataaaataaaaaatattttagcatctaaattgccaaaaaggactttacacctcaccccaatcaatcgatagtcttgggcaagctttctgaacacaagcctccattgaaacctcaaacaacc

SEQ ID NO: 108547 - DNA, 516 bp, Cannabis sativa
acaatcattattagagacaagctcaactcacggttcaataagcctttacttgtttagtaatttatttgattagatagcatgataggaagcgtgttagtgatgttagttcaagatatatttccaagagcgggtgaattagaaatttaagctaattttgttaaattaaaacttttacaaaactgtgcaattaaatacttaatcaaataaatgcaggtaatgtggcaatcaataatgtataacaaataatcaaacttgtaaagtaaagagtttaagggtaagaaattgcaaactctcaatttttacaaggtttggtggagctaagccacctacatccttggtcttcaaagctatggacctagctttgagttctaatatcgagccaagttaatgagcttgactaaccctaataattgagaaattttcaccaaggtgtttccaaacctcttacaatagttttgcaccgccaatgactattaacctctttctcggattattgtagtgacaatctcactataa

SEQ ID NO: 108548 - DNA, 517 bp, Cannabis sativa
ttttttttttttttatgttaatgacattctacttattggaaataatgtagaaaggttatcagatgtaaataagtggttagccgataaattccaaatgaaggattcgtgagaagaaaactatgttcccgggatcaaaatatatagagatagaaagaagagaacattagcactttctcaagcaacttatatagataaggtgctaaaaagattttcaatagagatttctaagaaaaagcacttaccgtctagacatggaattattctatgcaatgatcaatgtccaaagactcctcaagaggaagaggacatgagaaagtacccttatgcatcaacagttgggagcttgatgtatgcaatgttgtgtacaaggcctgacatatactacgatatagggattgttaatcgttatcaatctaacccatgtttggaacactagattattgtaaagcacattctcaagtatctttggagaacaagagatctcatgcttgtatattccagtggagagttaaatcct

SEQ ID NO: 108549 - DNA, 502 bp, Cannabis sativa
  modified_base (437)..(454): a, c, t, g, unknown or other
tgaggtgaagagatggtcgaaatgagattcaatttctcgaataatgctttcctcatcagagatcatacctccatcttgcgtatggagatggtgaattttgttggttttcttccattgggaagcaaatcggtggaagaacttcatgaagtcttcaatttataggaatataatacttttattagcttttattatttttttatcgttaattagtatttttttgtatctttattttttatttttttttatattttaactaaagaaatatcagttaacaaaatataaatataaatttgtaaatataaaagaagtttgaatttgatttgcttaagtaaatataattttttattaaaaataaaaaataaaatatttttataataaggtaaatattatttttagaccctgtattttgtaaagttaccaattagaccctctatttnnnnnnnnnnnnnnnnnnaccttatattttctaaaatagtaaaaataggacactgaactcaatttt

SEQ ID NO: 108550 - DNA, 767 bp, Cannabis sativa
gtgcttggatttgataatttataatgaatatctattatcaattccacgacttcttgtttctattgttaaattagatttagtgccactaattaactttgctactaaattagttttagggtaaaataggttgctaggcacaatttgcctgaaccactaacaagtagctttaaataaattataaattatttatttataaaaaataaaacctataaaatagattttgtaaatttttattataactatggtaagaaaatttatgaattatttatgcaaaatttatatatttaaaattaaaataataaatttattaaaaaaaattcataaactcataaatttattcatagttccttacattaaataagaatgataaactaaaaaactccaaaagagaataacaaaaacaaccaaagagatttgagaaatcacatataacattaaaacatactaaataaaaatatccaaaactaaaaagtgaccttatctaaccaaacccacaccacttaatttttttttcatgctcgctttatgatctcatcattcttcagtagaatcatcctacaaaaaaagaagaaaattttaatatataaaaaatatatatataaatgaaaccacaataaatataaatcatataaaaaaaaattacaataactgagatacctctatttcattataatcatcaagatttgtatcaagttttctctttttgttatgcttatatggcgttttaatagaaatatcgccccgagaaacctttgatttattaaata

SEQ ID NO: 108551 - DNA, 691 bp, Cannabis sativa
  modified_base (61)..(72): a, c, t, g, unknown or other
  modified_base (630)..(655): a, c, t, g, unknown or other
aaacgatattactttgtagcaatatagacccatatctgttcggaaacttgtatgttcttgnnnnnnnnnnnncattttgatttgattgtaccccgagtaagcagctatgaagcttaagatttcatgccctgttgttgcatccacgatctaatcaattctcgggagtggaaaacagtcattgggggcatgctttgttgagctctatgaaatcaatacacactcgccatttcttgttcggcttgggtactagtacgggattcgcgacccaagttgggtagaaagcttcaattatgaaattgttgttgcgtagcttttctacttcttcttttaaggctaatgctcgctctttgtccaatattcttcatttttgttgaactggtcggaagttgggatcaatatttaggatgtgcgaaatgatagaagggtcaattccgaccatagcctcttgtgactaggcaaaaacgtctaggtttgctctcaaaaaatttatgaatgctgattttacttcgagcaacaaaccttttctgatatttagctttctggcctggatatctggatcgatctcgatctcttttaattcttccacaggtctaacattgtggcttgggaacatggtaatgcaattgagtnnnnnnnnnnnnnnnnnnnnnnnnnntatagcttctatttggcaaatagaagtaaaggatga

SEQ ID NO: 108552 - DNA, 529 bp, Cannabis sativa
gacaaattttctagcctcttttaacaataaagttacataactgaaattgaaggtgaaaatattgttgataatctctaacaattatgttaaaccactattttgtgtggctatagtacagtcatttaattaatcatcacaagtactgtaagggatttctatgtgagactattctaaagaattcttaattttatattttttttttgttaaacatatataacatacaaccatatataacattcaaattcaattgcaaaagaacaaacaggctctagcaaacatgtaatatgatttcatatatgtgtaattttagtagtgcaaaaaagcagttaaacaggttgtctattcatttccattttttctaaaaccgacttcaaaattattattattatttgagtgtccaagccaattttctttctttgcctaactggaagttaggaatcagaatatcattctattattaattttctctttcctattgctaattcaccattccatgagtacacaagagacaaaaatcagtggctaatat

SEQ ID NO: 108553 - DNA, 508 bp, Cannabis sativa
tagttaattgaaagacctttctaatggtataaagatcataaaaattggagttatgcatattttattaaaacagtttctttaaaatcctaaatcataccgatttctgaatacagaccaaaaataaaagtcttaaaaataggtacaccccgatccagacaatactttcttcataaaaaatgtagctattttcttaagctttaaaatgagataaaaatcttttaaaatggatcaaaattgagagatattaaatttttattaaagacactttttctgaaacaaaacttaaaatgagatatcctaacggagtgaagataccgacttttgataggtaagaactccgaattagggaaaggtttcttcaaagaaaatatgtattattgaattatctttccaacggtactagaaccgatgcgaaataatacatatcgagagagatatcgtacttttaccgaggcaatatcagaaagaaatttaaaaaactgtaattcgacagccagcatgaaaacat

SEQ ID NO: 108554 - DNA, 540 bp, Cannabis sativa
aatggactgaagaatgcgaggaggcatttaggaaattgaaagaacacatggccaaaccaccaatactgtctaagccggttcacggagaagacttgttcttatatttagctgtctccgagaacgccgttagtgcgaccctggtctgggaggaagaaaaagttcaacatccagtatactatgttagcaaacacatgatagggaccaaaaatcggtataccttgatcgaaaaattagctttctgtttcctgattgcttcaagaaaactaagaccctacttctatgcccatttcatcaaattacttacgaaccacccattccataaatattcatttatttttccagtttattttatttttattaactatttacttacttcaattttattattaataatcaatcaatatatataaaggaactattaaagagtttatgtggcaatctatttgaagtttcttccctattctttgttttcttaatttttgtcaattatttaattttttttaattatttttcagttaaaattttattatatgatattat

SEQ ID NO: 108555 - DNA, 679 bp, Cannabis sativa
aacacaatctacgttgtattttgtttcttacctcactagttggagcagcgagtagctggttcaataaattcactcatcattccatcacttcttaggaacagctttctcaggactataaaaagcagttccaggctgcaagggacagatgacccgaagcatcctcactcaccaacataaagcaacagcctggcgagacgcttaatgcatacttaagtcactttagcacgactgttgcgagagtaagaaatctggatgagactacccagctcatttcccttcagttggggatcactatggatctctccactgttggagacaaactgtgggatgacctacaaggtcgtccagtgaaaaacatcacccagttcaacgaaagggctaaggtgtttgttcgaaaggaagaagctcgaaaagagatgaacttgttaaaaactggttcggaaagcaaacccaacactgtttcaacaagtactgtctcgactaaagctgataacataggggcctctggctcaaagaggaaagacgactctaaggggtcatccaaagaaaagaagaaacaaaagaagcatgacaagtatgtgccagtttacactgtttataccgagcttaatgagactcgggagaatatctaactcgcgcatcagcacaaggttgcattcagtaaacctgagcccatgag

SEQ ID NO: 108556 - DNA, 579 bp, Cannabis sativa
gattttatttagagtttataaatctgattttctagttatattatgctgagtattaagtatggaaaacctttttttcactcatttcaatgaaaattaaaagaaagacaaaattccatttttttctctcaaagctttcctctccatttcgaacccacctagaggcagctaggttttgtgaacttttctgcatttcaagctagttttaacaaagatttagtgatctcaagttgttggtaagattcttgtagctttctcttaagtttcttgagttttaagaaaaatatgatagtttgcatgcttggtaaatttgatgttgttgctgctgtgtttatgtgatgttttctgtagtttaaatatgtttaattgagtgggttagagcaggttttgatgcatgttagttggatttaaccaagtatggagttttaaactcaaactttggtttttatgagtgttatgttgttcagcttgctgtagctactgtgattggttgttattgtgttctgaagtttagatatgagtttttatgttgttaaatgcatgaattaggggctgttagaagggttagtcaatttttgagtt

SEQ ID NO: 108557 - DNA, 509 bp, Cannabis sativa
taataagtcagacagaaaatcacatgcgttttttaaaataaaggtgttttctggagtcttgacttttgtcatggttgaaaagttttgttaagtctgtttcgtgtgcgtttgcttttttttcacgagtgattacagtggtatttttcggcggtgtcctttccttacgaatcccagtagaagtccaggcaaagagaatgagtgataatgagaacgtgctgtttgaagaggataatgacaggctggtattagatgatgatgatggtgatttatcggagatcgatgatcggtggtgtttggtggggcgcttccttacaaaacgcagtatcgattgtcaagccatgcaacacaaaatggcttccctgtggcaaccgaaccgaggtttgtatgttaaagaacttgatccgaatcattttttatttcaattctatcatgagattgatattacaagagttatcgatggtagtccatggacttttgatcgtgttccattgatttttgagagagtgaaa

SEQ ID NO: 108558 - DNA, 799 bp, Cannabis sativa
  modified_base (310)..(318): a, c, t, g, unknown or other
aactttgctattatctataggatctataggtacctcaatggtgtcttccgcggcttgggctactgcggcatgatcaaggatccttggatccagatctggtccatccatgtgttgtacctctttgattatgaggacctcctggcgaggaggtggtgcctccaataaatagataacatttatcgacttttctccgcgagcttgactgctgcattgtagcattctcgtgagtctgactggactcctcgcacagagcctactctggcgggagtagggaacttcattgtgagatgatagatcgaggttatgatcnnnnnnnnnttcaagattggtcgaccaatcacagcattgtatgccaaatactggtcgattactgcgaaatcagccattgatttggctgttactagggcggttcccaaggtgatcgggagtttgatcatccctttcaatgcgatgacgtcgccggtaaaaccatatatgctcgacgtcacgggttgcaggtccttctcttgcaaccccatttgtttgaaagcttggaaattcaagagattcactgaacttccattgtccacgagtatacggtggacattatctccgccaatatttgcgatgataactaatgcgtcggaatgcgggtgatggacccatctcgcatcactctccatgaaggtgatgtcgtcgcattctttttgaaacaatgtctctagccgctcactgatattgtttacattggtgagcggcttctccttagcttctttggcatagcgctcttgcgacttgcgggagtctcctgcgatatggg

SEQ ID NO: 108559 - DNA, 529 bp, Cannabis sativa
  modified_base (194)..(194): a, c, t, g, unknown or other
  modified_base (345)..(348): a, c, t, g, unknown or other
tttaaagtgtgttgccttaaagtccttaagagcggtgttaagttttgatcgttgtctaacctgcctggcttatggactcgcaggctaagtcctataatatggacgccccgcaaaatacacgaagtcagggtgatatggttgagaccgaaggcggtcagagaaatccccaaaatcctcatggtcgcggccgtggncgtggaagagctcagggtggtcgccctgtaaatccaccacaagctcctccggattgggagcagagatttgcagaaatgcaagatcggatccgtcaacaagaggaagagattcatagattgaggcactagggtcctcctgccgtgcctcctnnnnaagttgctcaggccgttgcagttccagcggtgccagcggaataaaattattgttggcaaccgcatagagtcgttgtacgaaaggtttctaaagcaagcacctccagtgttctgggaggtcccgatgtaatgaaggctgagcagtggctcatagtgatcgaacgcatacttaactatatggg

SEQ ID NO: 108560 - DNA, 999 bp, Cannabis sativa
tactcatgaaagataatatacaagatcaggcatgaaagtattaatttagaacataataatcaataaaatatatattgtctatgttgtctatgtgagacataggacactcaatttctccaaagtgatcagacacaagattaagagtaaatgcaagagaggacccaatgtgtgtagggcaatccctttttaccgttattatttcatcaatgataaaatacccatatactcactacaagaaaatagagtctttaattaaataccaattataagagtagaacgtctctaatatttgtgggtaatagtctttgacaaaaaaaaaagaaaaaaaaactaccttgtagtagtaaaaatagctgctaaaaaaagaataagactgcatgaatgaggaaaaaagaaccttcaaatcaccttgcgcatgaaattttctcggctccatccctttgcgtgcctaatgcctcaaatggcacgaagtagcagagtaatggggccctttttgttgtggtgaaatttctgtctagaaaaatccccaatggtacatttttgggaaaagaattaggcacaaaaatttttttctataataaactaaaaaggaaaccaatttacatttataacctaaaaaagagaataaacataaataaaaaccaaaagtttctatttacaaaaatatcggccaacccataaaaaatggagagacctccttcttcgtgacccagccgagaaaccccaagcaacctaatctccaccattttctttcaaaaatcggggaaatcagatctgataaagatgtagatctcaaggaaaaaccaatcaaatcccgaaaaatccaaatacaaaaagggaaataaaaaaaagtattcaacctccattgttgtacgaaaacacaaaaacaacacacaattaaaaacccaacgcgttcagaggagaggaatcgaagagaagaacatctggaattatttgaaactcacccataatcgaatcagagaaagaattgaaggtaat

SEQ ID NO: 108561 - DNA, 572 bp, Cannabis sativa
  modified_base (31)..(70): a, c, t, g, unknown or other
atgcaacataaaatattatttctgatctttnnnnnnnnnnnnnnnnnnnnnnnnnnnnnnnnnnnnnnnntaaggcacaaaacccaacaataacgtggtctgaatcttcttcgctgaaagatgtgactggttctctaatgcgtagctgcttaggctttctttcttctacagctagaacttcatctttctgttcatattgtaatgcctgagcatatttttctcaagctttctctgactctccagcaaggtgggggcctccaatgacaacttgaagataatcgtccaatggtggaggtatcaactgattgtccacgttagctttctctagctctttgttcctagtcggttttacatattcttgcaagtgtgggttgttttttctattgacaaattgtatttatcacttcaaattattgcattcattagtgatgagactgtagtccacatgaaagcgacagaacttggtggtatcccttttgctcatgtctttattcatgggaggaggttttttatatggcaccacggactgggtagttgtgaaaatggtgtctatatcctctgttaggatggta

SEQ ID NO: 108562 - DNA, 1077 bp, Cannabis sativa
  modified_base (612)..(615): a, c, t, g, unknown or other
caaaaacatgtgaaggagtattgcaattgcttcttcttttcctccggtttccaggccatggaccacacggagcttctcacgaagtgggttaggatccctccttacatgcagaccgcgcctacccaagtattcctgtagcgggccaagactttctccacgtatgataggaaggccctcaacgttggggacttagttacgacggagaactgtcggaaggccaagctgattttcgagaatcagtcggtggatgacttcaatctttccaaggtcatctgcccaaacgtgaggactccggcagcggaaagggcactcccggtagacattatcgcctccggggaggaccggtaccagaagtacctctttaagagggtacaggagctggcttacatcaaggcccatgcggctgctgcgaggacccttcgtttggaagctcctccgaaacagaggcctcttagacccaagcctgtggtcccagtttcgaactctggtgctctcgacgccaacacttcaggttctgggtaagtctcctttaataattaagtatgttcctcatgtccgagagtatacccaacgtaggcctattgggttcgatgagcgcctttataggtttannnngccttccactcggtgggggaatcacgccaaggaatatcatttttcccacttgggtcatttcttgtgtcggtcccggatgggctctggacctccggcgcctattcccctggaccattcagcccatttttcttccagctggttcctcccctcggacagctttcttggggatgatgaagctagccttgtagtcaaggacttcgctagggctgaattagggagtcagggtaggactagttttattactttcttattgggcgcacgccttttttcatgattattttaacacttagctcatttctttgttgcagcagccaggcctatggaagatctcctagccactcttgccaaggcatacagccccgacgcctctctgcctccggctccatcccagttggtgactcctggaaggtcctcatccagtgcccctttaggcacgatcgtcttgatagacgaggaggggga

SEQ ID NO: 108563 - DNA, 547 bp, Cannabis sativa
gctgatgaggagaggcaacaacttcgaattgccaaacataattatgctatggatgagtacagcaggggaaatgctgaggtggaagccttgaagaaggtcttgcgggaggctcaacaaaattttttacgcgaggaggccttcaaaaatgcctaggacctaaacatggaccccctgacgtactggttcaaccacttcgtcggccctgctcttgctccctttgcctctgaattgacgagcaaatttgtttcccatctgacccaactcccggccaaaagatacgcagccttcacctccacaaacgctatttatcaggttcaggatattagcgctcactacaaaataatagacctatcttggcaggcccggccccccgttattgctctatctcggcggtccgtgcgtgtcgagattgaataaggggctatctcgacagtcctggcccgtcattattgttatgcaatctcgacgggccttttaaggcccgtcaagataggtacaattctaatacatttctacacctttacataccaatatcggcaggcttagc

SEQ ID NO: 108564 - DNA, 549 bp, Cannabis sativa
ttaaatttaacgactaactctcccccgttaactctcaaatatatacatataaataaattattataatcgtaaactaggggtgtttatccaatctaatccgcattattttgctcatagtgcatcagatccgcactaaatgtgaattttatttttttgatccaatccaatctgcacaatagctcaaatccaatccgcaaaagtgcggattggatcggttattttagattgattactttttaatattaaattatttaatatttaaaaaaaaatcacacaactaacaacaaaataaaataaattatagttattttatatcttcaacaacacattaaaataaacaaaatagtaaataacaaaaggaagaaaaaaaaattgtacgtagaaaaaaattatatataagaacaaaatatacatttgatttgttaagttttgaaatataattgtattatctgtgttagacttttaaattattattttctttacataaaaatgttattattgtatacataattttttaatttttttctataaatatgtgtggattggatt

SEQ ID NO: 108565 - DNA, 585 bp, Cannabis sativa
catattaaatcataaagagacatgtagatagagttatacgtacgtggaaacagtgttatgatttttaatgtttcacaacagttgtaatacagttgcattacaaatgtataaatattttactaacagttattttgtctgattgaaaccttcgtttgatgcaacattcggccaaccacccattaactacccagaaactctcgtctgattgaaattttcgtctgatgcaaccttcggccaactacccagcaactatcgtctgacataaccatcctgcaaccatcgtctgttggtgtaagtaataatgtaagtggtattttgataattaaaattacataaaatgtataaatattgtctacaccttatgaaagtatttttgtaaataaagtgtcaatttatattttttatgtaataattccttaatttttattacttaaaaatattacttttttactaaaattttgaataatattactattaatgttgagtatattacacgattattattttattttatatgtgtaaaataaattatttgaacattattttttatattataaattatttcgtatttctcgtacttttata

SEQ ID NO: 108566 - DNA, 634 bp, Cannabis sativa
gggtccgaacatctttatatttatgcttaaatacatactttgctttaatttcattaaacttttggcctgttttacatttgcccatgtggtatgccttattacccacctgagtggcatgaaaaattatttttaaggcacttagctttacaaatataaatttggaagttgcatatacttgtttggtacaaatttactttacagagcataagtttatatttcttgactattggtaatactttcggaggtgatcggcgttccaggccctaggcaccatggtcccgtccatccttttaagcttgtaggtcacggagccgatttcgtcctcaattgcatatggtccttcccaattaggcccaagtacccccactctagattcttgagtggctgggaagactcgtcttaggaccagatcaccaatagcgaattttctacttttaacttttgagttaaagtgtttagccacgttctcttgataagctgccattcgtatttgagactcatcccggagttcttcaatctgatccagtgcgtcttgtaataaagccttgtttgttgttggatcataagttgttctcctttgggatgggaatagcatttccaccgggaccattgcctcacaaccgtatgccattga

SEQ ID NO: 108567 - DNA, 520 bp, Cannabis sativa
tatgttgtgacccacatgtgtgggtttgtatatgtccactttgtcgtggagtgcttattagttaggactaacaagtcttttcgcatcttaggaattttttaagcgtatataacttagtttattttgtatcttggcaatttttgaattttaagttgaatatattttctggtgcttattttattctgatgcttattatctttataacacggagttttaaagataacattaattgtctccaatggtggcttgcattttgcttgcctgagcaagttgtcggcatgggccttaactctttgggtactcaattttagcacgcgacccacttgtcaaagtctcaaatgtaggtcattcaagatgtctttgttaagcagaattttttgagttatggctccttggagcgccctcacttgtcttttatctcgcctgtataccgactttgccccctgtccgaggtgaaattttgaaaaaatatttatggcaaaaatttttgaaatcccacgcacttaaagtggtgtatcag

SEQ ID NO: 108568 - DNA, 575 bp, Cannabis sativa
tcaaactgagttcctagaatgggataaaatagggggtgagcttataaagcctagtaggaaaacaactaatatcaaaggaccattggtttaataaaattcctgcatggttagctttgtaacaataaaatacctcatcaccggtatcaaaatgtataaacaaagtaaatagaccatagctgtcaataccaatcatagaaaacgatatccaataccgtgtagtcgcatctgatatccaccatagtaccaggactcagatttaattcactccctgtacatattctaggtctttcacctacaggtgagtgcacacctaatctacctatgatgacacagagactaggtcgtgaaacaacaatatgcatcgaacatgatcaacatggctctcatcagtataaccaaggcaggaaaataataagcataacaaaagaacatattcctttttattttctagaaaattcagcagcataacaactatatttggaataaacccaaaaatcataacctgcataagtatttgcacacaaaaatatatttgacactcagtgccccataacagtccagaaaaatatgcagat

SEQ ID NO: 108569 - DNA, 724 bp, Cannabis sativa
  modified_base (694)..(698): a, c, t, g, unknown or other
cctgattaggtgatgcaatttttttggcgacatactgggcgtaagtactggcgtcaataatatataatgaaaactgtaggtacgggctcacctgattaggtggtgcgattactcctggcaacgtgtagatacatcgtcaatgatatgaaaaattgccaagttatggcatagaataaaactgttgtagggttttctcctggaaacgtgtagatacgggcatcgaagacatatgataagtaccgggcgtaggtacgagttcgtctaattaggcgattacttctggctacgtgtagatatggcgtcaatgatatgaaaattgccaggttatggcataaaatgaaattgttgtagggtttcctcttggcgacgtgtagatacgaacgtcagtgacatataataagtatcgggtgtaggtacataataagtaccgggtgtaggtacaggctcgtctgattatgagatgcgatatattggtgccaagttatggcatgggctcacctgattaggtgatgcaattatatgatacatgggtgcaggtttttggcataggctcacttgattaggtgatgcagttaggcgatatatgggtgccaggctatggcacgggcttgcctgattaggcaatgcaataccggattgtcctatttaagcatcgacttgccagattaggcaacgtgatgttatgaagatggtnnnnntatgaggtaacatatatataatttat

SEQ ID NO: 108570 - DNA, 1585 bp, Cannabis sativa
ggttatttcgaagattattgcaaatagattaaaacctattcttccatctctaatttgcctactcaagctgcgtttgttcccagaaggaatacccaagataacaatgttatggtgaaagaaattattcattccttcaataggaagaaagggaaagaaagattctttgcgatcaagattgaccttgttaaagcttatgataggttgagttggaaatttatcgatcatgttcttgggaatttcgaattcccccaacaattctgtagttgggtttcccaatgtatttctacctcttctctcaatatatgcctcaacggtggtcctgttggtaagattcttccttcttgcgaccttcgatagggggacccgttatcaccttatcttttcatctgtgcagcggaagtcctgtctagacttttggaggaagatataggaaaatgaattattcatggtattaaattaagtagagggggcccgatgctttcccatgttttctttgctgatgacctaattttggttggtcgtgccaacttaaatgaggctaaaggcttttggaattgtcttgaaaagttttgtgagtggtccgggcagaagatcaataaactcaagacttctatattctttagcaaaaatacccctgatggtatgaggagaggaattaaggaagctctgggtatagcttctcctgaaggggttacaaagtatctggggttacccctgttcagatctagacaaaaagatgctgactttaacttcattcttgacaatcccacgtccaagttgcaaggctggaaggccaaacattatcaaaagctggtcgggctatacttattaagtcggtgggcttgtctatgcctatttatgctatgcagacaaccaaactgtcaaatcgccttgtgaatcagattgatggcctaactcgtgatttctggtggggctttgagaaaggaaaccatggtcttcaccttagagcctgggacaaactttgccttcccaaatcgttgggaggcctgggttttcggaaaactaaggaaatgaatctttctttcttggctaagtggggttggaacttattaacgggcaagcagtcgttatgctcaaagatcctgaagactaagtaccttagaggaagagagtttctcaactgcaattataaagattctgactcctggttttggaaaaatgtagttaaagcaagctcaatccttcggaaaggggcatgtaaaagggtggcagatggaagagatactagtatctggtgggatccttggatcccccacttgaaaggtttcgtcccgaaaccaaaagaaggtgtggtaaaggataacaagtgtgttgctgatctcttaacacccacgggtgggtgggatatgggaaagctccatagtctctttgaccatgagaccatttcggctattctcaaggatggaattcctcatggtagtggcaaggatagttggttatggactttggaaagtgttaagcgaaaatttcacattaggaatattaaaaataaatgcaaaacacaatttcacctatgctgaatttatagaataagagtttattaatttaagttcgacccatccaa

SEQ ID NO: 108571 - DNA, 1420 bp, Cannabis sativa
gagaagtttttgctttagcaacctgtctcattaataggctccctgcccctgttcttgaccatgtctcactttttgagaatcaaccaccaaattacaatatgctaaaagtgtttggatgctcttgttttccattgcttaggccatataaacaacataaagtttgcctttagatcatccaaatgtgtctcatgataagaaagagtacaaaagaaatatcattattcatgaatgttcaatctcaaaagttgtttaaaaatcaaattttaggtataataaagttagtagaatacttgatttaaaatataattaaattgataatagcattcaaaatttaaaaaattatttatgtatattatcgttttttttattacacgtatttaaaatttataaagataattttaattacaggtatagtaactaatatgtacgtattttttttggagagaatatgtatgtactttttacatatatatttaagggcatagattcagtaaacacaagttttgtcacaatttgttaacacaaattttagagtaccttaagatgaaacttaatccaaccatctatattaaaatacatataagtactaaattaaatataaaaggccttccatttatttatttatttatttttctttttaattctaatcctaccatcaaattgaatatgatgattcaaaatgtacatcgtaagaattattgaactatttttctctccccttgaactcattgtccatgaaaactagaatcatattggacggttttaccactaaaggtgatattgatatactatgctagacaatacaatgccactcccaattgcattctataataataattttaattcaaaaattttatattaggattaagttttatctaaaagtttaactttaactataaaatgattaatacttgttgggtagccatttggattctttgatttctttctataaaactgaaagagagagacaaataatgagcaataatgtgtattgtgtatttaatttaatcctacgcgtttagaattaaaaaagaaattaaataaaaaataaaatattttttttcttaatttagtacttatatgagttttaacatggatggtttgattaatttcatctaaagatccaaaatttgtgttgagaaattgtgtcaaacattgtgttcatataaatcattccataattaagtaattgatttattatgatactattttgtttaaacttttggtgtcactatagacggtggatgtggttattgatgaaacaatagcttcggatccaatttcctacaaattgtcaacctttctccaaaacacaaatgttgaagatcattcttgtttcgctttcctcaccggcaaaagcttatggagatatgataaaagaattgttaactcaaacattcttggtaattgtactatattc

SEQ ID NO: 108572 - DNA, 535 bp, Cannabis sativa
aacaaccttcagacatttgaaaaatttgattggaggaccgcagaaaggaggatctaaaacttctagttctagcaatgctaatggggcggctaaggcaaaggcaaacattgcctctacttccaaacccaacaacaagaagaagtggaagaatagcaagaagcctgttcaagctgtgaaaacagtttaaaagaaaaaggctgctactcctggagataagccaaaaggaaaatgcttccatttcaatgaaaagggccactagaaaccccaatgccctaagtttctagcaaagaaacaaggtatttctttatatgctataaactcatgtgttttagagaattattattcccttgggttattaattccggacctactaaccatgtttgtttttctttttatttcaactccagctgcttgaacttggattgctatcctagcgagttgagtcggatggttggacaaatgcgtagagatagtccaagattgaaggtgaagctcggaatcttctattgtgttataatttttgaattaattgttt

SEQ ID NO: 108573 - DNA, 643 bp, Cannabis sativa
taagcagttttgaacaagatattgaagaggctccattatctatcatggttctagccaccattttattagctatctgaacttccacgaccagtgggtcgatgtgcggaaatttaattttgatagcgtcttcatcgttgaaggttatggtcggttctcctgctcgtggaattttgggccttctatcttccacggctaggataactttttcttgctcgtgttgtgctgttcgggcatacctctcccaacctttgcccgaatttccagcaatgtgcgggcctccaacaataacttgcagatgcccatctaccggtggaggtagtaaatcctggttattgtcattcctctcaccctgatcggtcttgacataattctgcaggtgtgggttgtttttccttatcaggaattcaatttcctgcttcaagttgttacattcattagtgttgtggtcgtagtctccgtggaatcgacaaaactttgtcatgtccctcttgcttgcatctttcttcatgggcccaggcttcttatatggggccagcgactgagttgccatgtaaacactttctatatcttcagtgagaatagtgaatgcactgtacttggcatgattctcccggggagcttgttcggatttgccggtgaactt

SEQ ID NO: 108574 - DNA, 510 bp, Cannabis sativa
aactagccaactggctaactcatttgaagagatgactacgaacgatctcccggtggatgactcacatctctcttgagttaactatatgtaaggtgttatatgtttttaaggttgtaatatgaacttttgtctggttgggtgacttgcatgggtgtggtaccccattttccccttagtctaaatgtaggtcagccaaattggtgtcaagaacaaagagagagagacaaaagttcaattgggagcaccagtggggtgtcagccaaagggactccgatgctcaagtcagtacgattatagtaaaaaataataataacggaaaataaatgtaatataaatggtagccggacggatgagtggacaagcggacagacggactaaaggagcaactatggtggtgaggcttaagagaaaagcttagaaagggtgattgtctgctttggtcagagagtagtgtgagtatctaatgtgttctgtccagcgtctatcgtatggctccttttatcgtgtgtt

SEQ ID NO: 108575 - DNA, 620 bp, Cannabis sativa
atccatttcatggaatttgaagttacctacaattggcattgatatagcagccacaacgtgtccattagaatctctaataacagcccccacaccaattgtattcattgaggaattgacagtcgcatctacattcagtttaaggccgcctggagctggaggagaccacagttgagacagagcaggatttgcacggtgctggtgcagaagtagaaacaacctgtaaatgttgctgatgtgccactgctggtgcagaagtagccgaagcaggaggctgatgttgagcagctcaaaaattctagatgaaaacagaggcaaaagtggctaaattctgagttgttcgtgcttttgaaccatgaaacactttgtttcgttctgtccaaatggcccacaatgtacaaaaaatttgttccatctccaattttgtgtatgttgttgaaagatgtaacaagtaatctccactacacatcgatgtacatgcgttccaattgaacataaagttttgatctctccaaacaaccttggcatatttacaactaaaaagagcatgtcccgttgattcccaagcttgtctacagatggagcaagtccaatcggtaatgatcttccttcgaacaagtgaa

SEQ ID NO: 108576 - DNA, 664 bp, Cannabis sativa
  modified_base (367)..(368): a, c, t, g, unknown or other
tagatatgccatcaccaaccaaacaaacggaagtttaggccttaacaggaagaatggcagcacttaacagattcatttcgaagtcaactgataagtgtctaccatttttcaatgtattgcgaggcaacaagaaatttgaatggacagaagattacaaggaggcctttaagagcataaaaaggcatttgtcgacacctctagttttggcaaaaccagtaactggagagacatttctcctctacttggttgtctcagaaaatgcgattagtgctgcaatagtgcgagaagagggaaagcaccagcaacctctttactatgttagtaagaggttactgagggcaaaatcgaggtatccccctcttgaaanncttgccttatgcctaatccacgcatctcaaaagttacgaccttacttccaagcacatttgattaaggtgttaactgatcaatccctgagacaagttttataaaaaccagatgcttctagaagattgataaaatggtcaatctaactggggcagttgacataacttatcacccacgaacatccattaagggccaagccctggcagatttcctggtagaaggaataactccagaggaaaatctgcttgttcagcgagacgtggatacttggaaattatacatggatggtgcatccaat

SEQ ID NO: 108577 - DNA, 659 bp, Cannabis sativa
aggtagtctggaggtatgggatgaaacttaatcccaaaaaatgcacttttggcatcaaatcaagaaaatttttaggattcatagtgagtcaactcgggatagatgcaaaccccaaaaagatacaagcctgattgagcatgccctccccaaaaagacataaggatgtgtagagtctaattgggaaattttttgccctgagtcccttcatctctcgctcaactgacaagtgcatcacgttcttcaatatcttgaagaagtgccaaaagtttgaatggactgaagaatgcaaagaggcattcagaaagttgaaataacacatggctaagtcaccaatactatcaaaactggttcacagagaagacttatatttatatttagccgttttcgagaacgcaatcagtgcagctctggtccgggaggagggaaaacttcaacacacggtatattatgtcagcaagagcatgatatgagctaaaattcggtaacccttgatcgaaaaattagctttctatctcttaatttcctaaagaaagcttagaccctacttcccggctcactccatcaaggtgttcacaaatcacccgctttgggaaggtttacaaaagcttaaagcctcaggaaggctccttaagtgggccatgtaattaaaccagttcgac

SEQ ID NO: 108578 - DNA, 522 bp, Cannabis sativa
  modified_base (172)..(172): a, c, t, g, unknown or other
aatgggacttgaaaaagctaaattaaaaccttgcatggtaaatctatgtggatttacaggcgacagtattgcgagtcaaggaataatcgagcttccattaacattaggcaaagcacctttatccaccactatagtgcaagactttttggttgtcgacctgccatcagcctanaacatactgttgggtcgaccagcattaattggactaggggcagttagttcaattaagcacttatccctaaagttttagacaccaatgtgtgtgggagtagtgcgaggtgaacaaatgttggctcgcgaatgctatcgcatagagctacaaaacagaaaggccggccaccagctaatagcagtcttgactgaagaaggagagaagaaggatgaggatcttgatccttggattcaagatgaaagaaatttaataaaaccaattgaggagttggaagaggctgttctagagctaagaaatcccacaaagtgtgtatacattgggaataacctagatgaacaattgaaatagca

SEQ ID NO: 108579 - DNA, 565 bp, Cannabis sativa
  modified_base (27)..(33): a, c, t, g, unknown or other
tagcccatcacgaaagaactccacggnnnnnnntgcttgacctggggtaatttcaggatgggtgacctcatgagaagttttcccaagagctgtgcaagtgaggacaaagcacgctggaaacactcgtgttagtctgtagggtcagtcgtcaatccaagaaacagccagagtaccgtactcgtgtataagagccattatttcgtgggtctaagggcccaatggaggcttgaagcgaggacgttataaatagtatcagagccttcacccagctggaagtggggtcgacgaggatatccaaccccataaggggggtgattgtgacagtcattaatcccgtgatccgtaaggggaaataccgggtaagctgtgcaatcccacactacctggggaaggtcaagtgggatgattctaagactgtgcaggtatgggactacacaattaaagagggcttaaatagattaattagtactacctatattaataaagtgcatcttatttttcagtagcccatcacgaaagaactccacggttaagcgtgcttggcctgaggtaatttcaggatggg

SEQ ID NO: 108580 - DNA, 746 bp, Cannabis sativa
  modified_base (599)..(600): a, c, t, g, unknown or other
tctaaatcaataataataataaaacaattatgtataatgtagagagagatacataccagacgaatacaaagagggatagatctaaagcacttgcaccaaatcggagaagatgactgaaattccggccaaattggctggagaagatgactggaaccagtgagacaatcggtatgtgatacgtgtcgtttaacacacggtatgtcgcatatgtgggttaatgagtaatgatattttgataccgtggaccatcttaaataaatatttatttaatataattcgttaaaattatttattagataagtatttatgttaagtttctgtgtaaattgtgatgtatatatcattacttttaagattagttatctttacttttatctacttcattgttatctcattttttgtactaacctatatcggtaacacatttatgttattttctatatttagctggagagatattccaaacagagctcagtcatacatctatacagataaagtctgcctgaccgagctaggtgtcacaagctaaccttttcaggtagtcgtaacacccgagcgacaccttgacttctctaagccaaggtcagctttccaaccanncgagtaacaatgggctcattttttgcgtgactgtgcgcttcgtgcagactttcgtctctcgaacaactccctcagagtcatgctcgcaagcatccatgagtgcatccatgcatcgaggctctctagccaagatactcgcactgtcc

SEQ ID NO: 108581 - DNA, 517 bp, Cannabis sativa
attataacatcaaagaaatataatgcatcctccacacaattaaccacactataaacttattttttggaaggctatacatgttccatattccctcatgtcacttctccttgtgcttagtaaaaagtaatttagagctcacatattttatattgtaagacatgtgaatcaaatctgttcagctatgatgattcatgagaattttgttttgtttgtggacagtgatttacaagatttatgcatatacactcaagaaactaattaaatatatgtcatgtaaatcaatataattaattgtagttggtaatggtgattaggcaagattgaggttgactttttgttggttattatgttgttcatatatatgtttgtcttattggttttactgctattttttttgggtcggtacaacacttaattttatattattttatgttcttttaattaattaaacacttacttttgaatatatgtctcaatatcaatagaagaaattaaattccttagctctcacataaac

SEQ ID NO: 108582 - DNA, 543 bp, Cannabis sativa
ggtttgcctagaaccacgagacagtacggctctgtgtgggtcataatggacagatttacaaagtcagcgcactttttgcctgcttgaacgaacttctccattgattagaatgttgagttatataatagagaaatttttcatcttcatggtgtcccgaagtccattatctcagatagagattcgaataacttcaagactctgggagagtctgcattgagctatgggtactcagttaaagtttagcactatatttattcctcagacggatggtcaatccgagaggactattcaaatcttagaagacatgctacgggcatgtgtgcttaactttgaaggatcatgggtaaagtaccttcccctgatcgagttctgttacaataactgatattaggcaacaatcgggatggccccttatgaacttttatatggaagaaaattcaaatcacctatgcactgggatgaagtgagtgaaacaaaattcttgggccccaaagctattcagagaacaagtgaggaagttaataaaattagagcacgaatgct

SEQ ID NO: 108583 - DNA, 708 bp, Cannabis sativa
caattaactctataaatataacatataaaatatcatgcacgtgcgaagcacgggccatccgcctagtaataaatataagcactcttaaaacaatcaaaacgtcatgagttcaatcttttaaaaataatatttttttctttatatatatttaatttaagatttcaattaatttaataattttaaattttatcatattatattaattaacagaagaagcggttgttgtctccggttggacttttgatttcggattgtgttgctctcatgcaatcctctcttttatttcctatttcaattaattttgttaaacggtccgggaaccaggcgactaactttttagctcgtttggttctattcttggctgtgttttccgtgggggttttgtccctgctggtttgaaagctatcttggttgctgatttgatttaataaagtttaattttttggctcaaaaaaaaaattaggtataaaattaattatttactttaattacattatttatataatcatgtatgttatcccaatttttgcacactgacatggcatcatacaatagtgacacatggaatcaactttgtgtacctgatcgcaagagatatgtcgaacagagcaccacatatattcgctcggacgaagccttcttaaccgggcagtgagcagtccgaacagcacgccaacacttagtaatttcagctttcgcatcgtgagt

SEQ ID NO: 108584 - DNA, 584 bp, Cannabis sativa
ttaataaaagattagaaatcattttatgttgcatggttcacatgatttctttcatgattttatgtttaatatataaattctatcaaaaccagaatatatagttattcatgattatagtatttgtcgacatagtggaatataataatgattatatattttagaatttaagtctcatgatttatcaatatactagatttagactgacatgataatcaacgagagagcttacttacaccttggataagtgttatgtcttttttagggtattggaaaaatttgctaggatcgatgtatggagtatacatcagactggaccgatattaaacttggataaaatatcataaacttaccgttatatctatctaagtcaatatcagttagccgatcttagatcaatagatcttaatcctgatatggttaggttcgatatcaattgtattatttatgttcttagagttatttgttaaagctcgatcaacctaatacttacatcttgggaacatgatagtataattgagtgggagcattgatcatagatatagaatctatagcttctatagattttagaagtgaaatgatgattt

SEQ ID NO: 108585 - DNA, 696 bp, Cannabis sativa
ccttcttgtcactggacttcgtgtataaaatggtggcttaagcttgccatattccacacacttctggttttttggtgagatccattttgatattggatcgttattctctcatcaagatgcctcatctgagttctaaaatttgttcctctagatttataacaccaaaatttgccaactacctctcttttctatacgttcccaggaacttcgaatctcaatttgaattagaaacaaaagattccaaggctaaggagcttccgatcaatccaaaccgagggaaccccattgattgttatgggcaatcctcaaaagtgattgtcgagagtaagtattagcccttgtaaatggaagtctgaactggactctttatttttgctccactgatcccttgtttttttacagatttggacacagatcttgcgagtgatcctagaggtcctcctcaggcttacaaggaatcaaaggagaaagttggtttggtttcaggtgaatcaaggaggactgttggcgtggtttctatcaaagaatccaaccaacccaagacccaaacttgcaccagaagacctttgtgccaacctctctctagtatcgagaaatttgcagaggctgggaatgaggtctcgactgcaggaaatgggatctttagatgtggagaatgaggtttatgcagaggtcgagaccttttacatgtagacg

SEQ ID NO: 108586 - DNA, 551 bp, Cannabis sativa
  modified_base (27)..(29): a, c, t, g, unknown or other
actaatcagattgtaaagagttttatnnngggcataaaacccaacagtgggaacacaaaattgagtgtccacgtcatcaggagcatgttggttacttaaaatcagaccagctggatgctttgtaaagggaggactaaatctagtgggccaaagttcaaaatggattgggcttctaattttagggtgtgatttttgtaccctagggacccaacaacaaaaagaggaaaaatccaagaacaccatcatctttccatcaatgagagcagctgcaactttttggaaggggcagtaaatgaagaaaaaagtacaacaaaggaggaagaaagggtgaccaagctttagtgtttgatttttcttttatcctctcttaatagttttctttctctttctcttttcttgttgtttgtacttagttattaaaagttgtgttaaattgtaaaaccgggcagcagccattgaagatagctttttagcttggattttagtttttcatttgaatatgagctagacttttgaggcttgaatgactatgaacttttatgttgggtatg

SEQ ID NO: 108587 - DNA, 596 bp, Cannabis sativa
  modified_base (503)..(504): a, c, t, g, unknown or other
attataaaatttgaataaattcatttgtttagtagatgaatgagcccaacaaaagacagaatcacaccatcatgattcaatgtgagacaagtctttctccaatagattcccataagtctatttaattggtaaagacacatctcatctcatatactattattaagtgtcgattatttaagcatatagccgtaaatatttatatttaactcttaattaaataagtatttaattttaatttttgatagtaattatacttaaattatatttctgaaacttaattaataaatgaatattaaatgtcaagttaatgatcacgtgacagttcctaattgatcaatgtcattaaacttttattttttatttaaaaattaatttaaatatactaataaaaatgacatgtagataataacttgacatttaacgaccaaatactatagaagttccagatataacttaagtatgcctttaaaaattaaacttaaatatttatgtacaactaaaanntaaatttaaatatttataccgtaaattactatatatatataaaaaaaaaattaagaagaagcaaaaatgttaagttattttggtttttattt

SEQ ID NO: 108588 - DNA, 648 bp, Cannabis sativa
aaggccccgactgatggatcaaccaattactttcacggaagaagatgcaaagatagtgcgttttccacaccatgaccccctggtcatagagactcctatcgccaacaagatcgtggctatgaaactgattgacaatgggagttccgtgaatttattgtttaaagacgccttcacggcgatagtcctcacggaccgagatctgtcaccaagcggttcccagctcatgggattcaacggaaccacacttatcccaatgggaaaagtgaggttgccagttatcctgtgtccggacacaccccagagcacttttaagtactgcacattcgtggtggtagactgcccaatggcttacaacgcaatccttggccgaccagtcctagtagactttggcgcagttacgtctatccggcacttgtgtcttaaattccccacccaggaggctggagtagggaccgtgaggggcaatcaaggtgaggccaggcaaagttacaatgtcgcgacccacttaccagtaatgatggtacgtgaaggtatcgagccaaatttggcagaagaagatgagttggatccccgtgtgcgatccgaaaaaactgtagaacctatggaggacgtcgaggaagtgctagtatgcgacctcgaccccaccaa

SEQ ID NO: 108589 - DNA, 691 bp, Cannabis sativa
  modified_base (439)..(439): a, c, t, g, unknown or other
tcccagcctatcgaacacagaagagcctggttgccttagcgattgattcgcttggttgacaggcggaatgactccattattctgattggatccgtcaggtaagtgtcctcctgatgaattcccggacaaggtctgcccgcctacctcttgccccacgagtggatctcgtgactggggattggacggctgaccattggttgtctgggaggcattcatcgtcaggtcatcctctgtttctcccaggggaatgacgttcggcgtttgctggcctacagtctggtaggctcttcgtatcaacacggtagcttgtcgactacgatctttgatctctgtagggtgagcccttaatgcctccatctctttgtctctccattcagcgaacatacgcctctattcgtcaaatgcgagatttactacggcacgcagttcatcctgatcntgatgcagagtgttgctatgaccctgcatgagtctgagcgcagcacggagattttgcaattcggctgcatctctgatggtcgtttgggcgttggttcctggtggaatagtcgtgttataaatgccctagctgtgtgcagaactgttattcccagtctcttgcacaccatcctgatcaccattcaccacgcttcctgtcggtccaggattgatagcaaggggaacccttaaactccctgggtccagcaatgtc

SEQ ID NO: 108590 - DNA, 631 bp, Cannabis sativa
ttaagtctataggtgtggaaccctattagctaccgataatagtgtgtatagattctccaataataatactcatttcaaaactatatattcacacatcatttatttaaaaaatatatcatgatttctttacttaataccattttttaaattattttttattaataaaaattaacaattatagtttataataatttaagttgtactttgtattacataattattatttggtgattgaaataaaaagtagaatataatgttttttatttatttattttatctaacatggtttgatcatagcttcaaaatacgtcaaaatataataattaagtaaaagtacttacacgaggttttacacaatttgtgtaatatgtctcttttccaaaaatttagtttatgtaaaaaattcaaaaagaaaaaagaaattaaaatttatggacaagttaaaagtataaagtaattgttatcctagagaggtaactggttacctatctagttatcctaaattatatgttttaccatatttttgtaaatttaccaaaacacaataaaaataaaaaatttccaataattaatgcataaataaggttatatgaacaatattttgtgcatatataaattgttgaatatttct

SEQ ID NO: 108591 - DNA, 602 bp, Cannabis sativa
tgctgatgcatctctcgtatttgcaaagactcgtcttaacaccaaatttccaacattgaacagtcttttcttgactcttttgttgaagtatcttgtgacttgtatttggtatgcaacgttggtgatttgcaactcagttcgtttttcgtcacatagatttaaggacaattttaaaagttcttagttttcttcttgattataacactctttcgtgagtcgatatattcacttcaacaagaagcattgcttccgagccaaatgctagcgagaaaggagtgtgtcccgtggctgttttcttggtagttcctgtgggcctagagtacctgaggtagttcgtcaacccatctgccttgggcagcgtctacttcttcttgatagtattctttaaggttttattaacagcttctacttgtcaatttgcctaaggcctggatactgacgagaagcttttaatatttttattcctctcgcagaattcagtgaacaagtcgccatcaaattgaattccattatcgtatactatctttatgggaattccaaacctacagataatgttcttgacgataaagtcaaggaccttcttgcaagttatggagacgagg

SEQ ID NO: 108592 - DNA, 734 bp, Cannabis sativa
tttctcgacgatattactagggcgaatgctaatttttccatttgaggatagcgggtctcagaatctaacaggcgtttactgacatagtacactgaatactatcgtccttgatcttcgcagatcaaataccgaactaatcacgtattctgacaccgccaggtaaatggataagacttcgccagacataggttttgataggattgggggctgccccaaatgcgtttttaatgcttgaaaagcctcttcgcatttctcggtccattggaactttttattgccttttagaatctgaaaaaactccttgcatttatcagaggatcgcgatataaaacggtttagagcggcgactttacctgtgagactttggacttcttttggcttagtcagtgatcgcatttcgactaatgctttgatctttgcaggatttgcctctattcctcgctgattaaccatgaatctaaggaatttccctgagtcaactccgaagacgcactttagtggatttagccacattttatattgtctcagtatctcaaacatcgcttgtaaatggttgacatggtcttttgcctgttaagattttacgagcatatcttcaacatacacttccatggtatccctaagaaaatctgcgaacatcgtatttaccaatctctgatacgtcgcccctgcgtttatcaaaccataaggcattactttataacaatacagacctcgatctgtaatgaacgagg

SEQ ID NO: 108593 - DNA, 535 bp, Cannabis sativa
ttataccacagctaaaacgacaatcggaacccgaagcctacccacaaaaaaaaaaaaagaggctaaccctaagaaggaaaccacccttacgatctaatcataacagggaaaaggcaagacaaccgccctgaaagggccgtagaaggggaaatgccaaaactaaataggcgaagtagagaaaacgggccagagaactgggatggtatcctagatgccaggaagccctaaatatctcaatggtaagggaagtaagagaataagggggaagaaaggagaagatctcagaagaaaaatagaagggaagatagtggaaaggcggaaatacaaaaatatacacagtaattaaaacaacacatataaaaggggtaaaaatgaatgaaaaagaggcgaggatgataggaagataaagaaaaggaaaggagagaaaaaaaaaaagaagatgaaaagaaataaaacttaagttaaatagagaagcagagtatatatacctgaagacagcaagatctagcacagagaagttgaaacgagcagcaga

SEQ ID NO: 108594 - DNA, 505 bp, Cannabis sativa
tcctggtaagataaatttccaacactcccatcctaaaatatgatatagaacctttagacttgcaagaattctgtaagaaattggattcaacaaaaagggagcaacaccaaggtaattacaaaattctttgaaataatctctcaagtgaagaattgctccagccttgatatgttcaggctccaggcgcccattctcgatgagttactagtactggctccactacactcctcgcgaattaccctttcaggaggaaaatagttgaatttcccaggatcaacagacctaatgcgacacccacgcctttgttcaataccacaggattttgatatgccactaacatatgctccaatggatctgaccttcgattcgataagttcagcttcgaaggtgacattaggatcctgtgggtctttgacttacgaggcttagtagacataatgttaaattcaaggtcacctggtgaaaaagcaacaatgatttagtaaaaatattggtctcgcgagtg

SEQ ID NO: 108595 - DNA, 681 bp, Cannabis sativa
ttttcctattaagtttccttaccacatatatctaaactagttttttttttctatatttatgtaaatacccctttaaataaagcctattttatcttctttttattttattttattttaattctatacctaatcctaaaacaattctataaatagaataagatgctcttattttcaatgctgacaacataatctacttgactttttgtccgacaaaattagcaaataaagtcttttctattttcgaatcccttcttcttcttctcaataattttgaagcctatagtgattgagaatatgcccaccaaagcaatacctagcatagtgatgaagattgtttagttcaaactgtcaactgaaggcgaagatctaggtcagatcttaataatgctctgctgcagacaggaatcaagggctagagatcttaatggaatgagtcgtattattatgctgccatcattgtaaggattccttaatcttttatgtgtttattttattattttaagaaattcatattaggatgttagattatagttttataatcaacatacatgttaataaatcgaaatcctggtaaaacaatatctaacattatttgagatagggatctctttaaaaaaaaaaaatctgatttggaaggttggggatggtagctctatcaaaactttagatgatcattggatc

SEQ ID NO: 108596 - DNA, 539 bp, Cannabis sativa
gcataaaacccaacaattatatcacatcacttatatatgcataagtatataatttagtgttttttgtactacttttttttttcttgtccatcttcttttcttcttaagtaattattataaagataattatacctctatattttagttaaatatttttatatatagtatttttttccctttttatataataattatgagtttttttatattaacataatattattttataatattaaatttaaaaatgttacatataattttttattaaaaagtagagtgttgatataatttgtaatatgtgatttcaaactataattaattcaaaatcaaattatttgagatcggaccaaataaattcgctgtgaatgatttggtcaatccgaactatttaaaattctctcgttccgtcatagtttgaaaaatctctgtagcgattaaaactaaactaattagtataattattttatttatgcttaatatatatttttagacaaaatattgatatttgacaataattttaggtagaatattgatattga

SEQ ID NO: 108597 - DNA, 597 bp, Cannabis sativa
tgttaagtgccgccattcttcctgtcagggcctgtacttccttaggctttgtcggggatggaatgtctattaatgccttgattttttaggatttgcctcaatacacctctccttaactatgaatccaaaaaaatttcccgaggagactctaaaggaacattttttttgggtttagcttcatgctatactttttttaatattttaaaacattccgcgaggtctgaggtataatccttacacttatcaatttcaccaacatatcatcgacgtaaacctccatgtttcaccctatttggattgcgaacatttcgtttactagtcgttgatacgttgccccaacattcttcagtctgaacgtcatgactttaaaacaatagagtcccatgtttgttacgaagcttgtatgttcttgatctgggatgtacatttttatctggttatatccagaatatgcgtccataaatgacataagctcgtgcccagcagttgcatccacttactagttgatcctaggaagtggaaaacagtcttttgggcacgccttattcagattggagaagtcaatacaagttgtccaagttttgttaggtttcggga

SEQ ID NO: 108598 - DNA, 621 bp, Cannabis sativa
tcagaaattctctattttgtttttatctcttagagagatattagtgttgtttttttaaactctcttatttttttaacaatgacttttttatttattatcttttgtctttttctctattttttttagacaagttggtttttgtctttttttttttttttaactaaatgaaataatatctctctcttactttcttataatttttttattatttttattttctaaaaagctatataaataagattatcattttattatgtggggtatattttctcacagaaaaaaaataatcataataaaagatataatttattttctttttttacttaattgccaaattttaaatcaacaaaattagatatcacaatcgattctaaggggttactaaaaagtatttattattaataggtttttttcaaaaaaataataacttaagaaaaaaagatgttaaatgtaactttttaatttcttttgtaattaattagtaggaaaaaaaatttaattcaaacaaaatttattggtaattaaataaaatgctatgttttgtgtgatttattaaaaaaaactcaaataaactttaatatatcaatcaaaattacacaataataaaaaatatgttataaa

SEQ ID NO: 108599 - DNA, 1590 bp, Cannabis sativa
attttaacatacctttgtttttataaatgttttattcattttctaaataaagattcttataattataatcattattattagggttttttacaaaaaaatactggattttaggtaaaaatttataattttactgtcacacggaaatttttataaaaatactgtttttttataaaacaaccgtaaaacactaaacagaataattaaaaacaacagtagaacaactaaaaaataacaatagaacaacaaatgaaacttaacacagtacacagtataaaaaatatatagtatttttgaaaaaattccgccccacagtaaaaaaaaaaacaaaaattcagtatgtggtgtaaaaattcttaagatgaaaattcaaagcccatggatactcgatcctattgaggtggggatttcctccctaaacgggtaatggcatagggacaatgataattttccatctccgaatgtcaaactgaacggagatagagataacacgaacgattccatttgatttatatatttatcttctaatagtttttttagttattgtacaagtttctttatgatttttttatagcattttagttttttttttttaaatatttataaatatttactttattttagaatcatactttaaattattaacaaaatatattattattattattattatttataatctatcattttagcttattaattttttttgtagttttaaaataattgaattccatggtagttatccgcctggactagaattctcctccctgccactaatggagaatttgtagggatgaggccgggacggaattaaaataactaatgggattggaaacacgaggagcaatgaccattctccactcattacctgccctcttttaattcctacacatggtaagcctagtacttattaattttttctttctttctttgcaataatcaaagttcatcaccatggaaaaaaaaagttaaaaaaaaagaaagaaaaaaagaaagaaagagagaaagaaaagtaagggcaatcaaactatcaaagcataagtcacattcacctctcttcgtacaaaacacacacgcgtgcacaaatgcacacgttacatctaaatgtctaccataataataatactaataataaaatcaataaaaatctttttcttctctctttctctaaatttgattaaaaaaaaacagctattcgaaaatagcacattcttgagtggtctttattttgatgtcgcaagagatttggcaaagatacaaaaatagagggcatctagattttgagtttggggacccaatattaagcaccacaaaatagtttcattgggcccattggtccatgggacatagttcactttctcttggtctacatgaccctcttcactcctcaccttcaaatcactaacttactattcccacaataagcataacactgtgttgtgttgttggtcacgtttggtcttcctcattagttttaacggcatgatgatatcctaggatgaggacatacgtaggattattataataaggattaagagatataaaaggtaaggagttgtaacaccctaactattttaggcgtattacgtgatt

SEQ ID NO: 108600 - DNA, 636 bp, Cannabis sativa
tcagtgaatgaaaactaatggttgcgaacatagactttaccgaaaactcatatttttttatcaagcaaatcatcagtcaaattagcataaaattcgttaactatgccatcaacataacaaagccagttaaagtatcctcccaatttcgatattgaatatattttacaatgtcataaactctatgagcatttaaatcaaaattcctttcatttttaaacttagggatagcatataaattccaatcacattgattgtcattataagaaaatacggaatttacaacttgagaagaagagaggttactagtgaaagagctcttcataggttgtttccctttcctgctggtgatgctttgatagaagcagatcgagaagttactgctgtagattttggcaatgatggttcaagatccaaatcaacaaaatattcctcaattttaattgggacttcctcactttcagaagagacaacatcattttttatagaaatttctttattaaatgaaaaagactcagttttggaatcagatttcccagattacacttccatgggatcttcttcttcatcattactcgaggagcttgagggagaattaagcttgagcttttagtagtaggaataggcatgtcatgacac

SEQ ID NO: 108601 - DNA, 555 bp, Cannabis sativa
ttcggatagccaagtacaattatgcccttgacgagtactcctgggggcatgctgaggtggaggccttgaggagggttttgcgagcagaggtgcaaaattcccttaatgaggagaactttcagaacccgtgggatctcaacctggaccccctgacggactggttcaatcatttcatcgggcctaccttggctccttttgccgcggagatgaccggcgagtatgtctcccagctaactcggtgcgcacctaagcggtacgctgcttgtgcatccttgaactccatctttcaagctcatgatctcagccactccttggccgcggtaaatatttagtgatttacttcttttctcattattttgcttaaaggcctttactcattctttcttccttttccagcttgctgcagaggtcggccgcctttccaaaaacataattaatcacggcttcatcttgtccgaatttgtgggcatagacgaagtcgtgaaattctgcaggacctgtctgctgaaaggcgggcgttccaagaggaggttgcgcggcaggaggcccttgcta

SEQ ID NO: 108602 - DNA, 676 bp, Cannabis sativa
caattcatatgtgtcactgaacacatttactgtcactcttcgtgcgtcactatagacgtttagagtcaaactttgtcggaatcaactactctttaggagtgtcactatatctattttttttctaaaaaaataaatattaattttttaaattcagattatatattataaaatttattaaaataatttaattcattatattttaataataatatacttaatcatataattaactaattatatatcaagagttaatgtaaatcaatataacaaaaatacccaaaaaaaaaaaatacatacaaaccaagaaacaaaatatagtaataatgaatcaaaatctataccccatttaagcagtaaaacaaatctctgaataataaaaaaaaagggcatttacatacattcaaaataaaactttaatccctaaatctttaaacaaaaaaatacaaatattttgaaatgcctaatatcgaatctcagtaaaatctcaggcagcagtgaccttcgtttagctcgtcgacaacgatgctgggttgtccgtcgtttgagaagaagaccggagacgaatgagaaaccaccactgccgcttaggttgtaatgagaaacaaaaggggaaaccaccgccatctgggtttccaggtgctgtgagcatcaccacgtggtccatttagaccaccac

SEQ ID NO: 108603 - DNA, 510 bp, Cannabis sativa
acgtggcttggcacgtaacaatcacctagtatatatatatatattagcaaaaaactaaatgcgagaggtacgtatactaaattttgtgctagtttttttttatgttatttgaaagtgatacaactaaaaattaaagaaaaaatattattaattattaggtgagattattattatgtgtatgaagaactcagaaattattaatcttataatcttaactttaatcaaatagggttctagatatatgaacaataaataatcacgtaaaaattaaaaataattatttaaataaagaattcaatatacatagttatagatatgaatctcattaattaaaaataattattcaatgtataaacaataatttatcacgctatatgtttcccaataaagaaatccacctcttcatagtcaaaaataaagaacatgtaatacagatctttgtaataaagtacctaaaagaaacaaaacttcagttatcataatcggaaaaaatttaagtgaactaaataa

SEQ ID NO: 108604 - DNA, 545 bp, Cannabis sativa
ttctgctcgtctactccccttcttgtgttcagatcattccttaggtcatgggtttctcccaacctttcgaacacagaagtgcttggctgccttagtgattgattcgctgggttgaccagacaaggtctacccacctaccgctgggcccacgggtataactcatgaccggggattgggcggctgaccatttgtagtctgggaggtattcatcgtcggatcttcgtttgttccacccaggggaatgacgtttggcgactgttggcctacagtttggtaggcttttcgtatcagcacggtagcctaccgactacggttttcgatctcttcatggtgagcccttaatgcgtccatctctctatccctccattcgtcgaacatgcgccttttcgtcgaatgccagatttactgcagcacgcagttcgtcctagtcatgatgcaaggtgttgctatgattctgcatgagcccaagagcgtcgcggagattttgtaactcagtagcatctccgatggtcgtctgagcattggttccaggcagaacagttgtg

SEQ ID NO: 108605 - DNA, 504 bp, Cannabis sativa
ctatttttatgttttctatgttttaagtaaggggagactttttacggttcggcccctggccttttgttattcatattttagacaacttatataattttatgtttattttgttttcttcatatccggcctatttttgcacgtatattacgccttagtacccccgtaagtgacataaaaagaattttttgggtcacttaacttaaatttgtgtgggacaatgcatatatttgtccgacactggttatcttacagaatataaaaattaaatattgaactcctaactattgatagtacttgtagaggtggtcagcgttccaggcttgaggtactatggatctgtccatcctttttaacttatatgtcccagctatttcatcttctatttcatatgggccttcccaatttggcccaagtacccccactcctggctcttgggtggctgggaccctttgtaggactaggtctccaatgggaaatttcctatctttgactttggaattgaag

SEQ ID NO: 108606 - DNA, 626 bp, Cannabis sativa
  modified_base (366)..(373): a, c, t, g, unknown or other
aatttcttaagaaaaatatcaaatatttaagtggcttaaataaaataaacttaaatattaattttctaatttaattaaatatatctggaaaaataccaaaaagtctagctgaaaaaaaaaaaaaaaccctatctagataattcataaactaattacttattttcaaattaaaacaatatattttagtctacttattttaaatatatcattaatgaaaataatttgattaaagttgatctaaaattaattaaatttttaacttaatctaatttttaaaattaaaaaacttcgaaatatctacatttaaaataaatgcatttcgaattaatgtaggaaatgatcattaaaataaaataaaatatattnnnnnnnntattctaatttaagttgataaaaaattaacaaacttccgacttaaatataattttctattcaattaaattcatcgaaatagaaacaaataattaagtatcttgaataaaattaacttaattattaattctaatttattatctaaaaaaatattctaaattaagttggtccaaaattaattaacaaattaattttcaacttaaatatattttgcttatttaattaaatttcttgaaatataaataaataattaa

SEQ ID NO: 108607 - DNA, 606 bp, Cannabis sativa
aaaattaaaaaatttattacaaaatacctcaagtctgtcccacagtgcattgatttcaactctactaacatcttcccatttaaatttattcatggggatagacatgcgaaccatctatttacatatattgttgaattttttttctgtttttgccgactgtggtgcccgtctctgcatgcaattcaatgtgtaacttggcagatggtgttttggagagctcttcttcaacatttttgcctttgtatttacctctgatccctttttttcgaactgctgccacctggtgtagacatattacatatacaacacatattttttatttaaaataaacaaccatatacaaaacatatgaaacaagaacagttttagtttttattcctattaaaacactattacaattataattcatcatcctcatcatcagttacatatacagcaatatcatcactgtcactctctaattctaaggagttgtcttcttcggtatttagaccttcggtgtcatcatcgacaatgaaatcatctaattgttgaggttattgattcacacgatggatgtttgcaacttcaattgggtccacatcatggcgaacatagtcaacatca

SEQ ID NO: 108608 - DNA, 766 bp, Cannabis sativa
cattccttctacctttaatagccgtcgaaagaaaaaaaaacttagagcatttgtcaccatccttaagccaggacactctagctctttgcttccagtagatcgcttttctttctaacgtctcattaagcgtacggcggatgtcacattcctggttccagtcccgagacccagccgggaggctctgaagagcattgagtttcagttctagatcttttataatcacatccaacttaccgtattgggatctgttccaactgaggagggccaccctggtggcaccaaccttcttgaaaatgcgagccggggcccaaacatggtagaccgatttccaagcatgatctactaccagtttacttcgaatatcacgggtccagccttcttcgaatttaaagcatctcttaaatctgggttccacaccttctgagagaaggcaaagaggcctatggtccgagttgctagtttgggcagaacagagaatagcccttggaaatagattaatccaagctccatttactatgcctttatccagcgcagacttgacatggtacctccccgaccgatgattatcccaagtaaggttgtccccttggataggcatattgataagacctctattctcaatcagattagaaataactgggatgaaaggatcctgaccggaagagcctccacgctcagaatcagaaaggacaaaattggtatcacccaaaataagccagggcccaccaaacctatctccaactttcagaaactcagaccagaactt

SEQ ID NO: 108609 - DNA, 710 bp, Cannabis sativa
  modified_base (197)..(197): a, c, t, g, unknown or other
tgacatgtcttttcatattcgtccatagacgttttctccatgctgcatttaatgcctgtgaatagttcatcttcggaaccctgggcccgaacgagttggactcttcctagctcttggaggtgagaaaaaattttgtcagtttggtcgggttaacccgtccaaatcgtttttttattttttttttataattattattnttagtttctagtatttaaataattagatttaaaaagaattaaaaatatattatttatatttcaagttaaaaaatactatagtttaaattaattttacgacatttaatataagataattataattgagtaaacataattgaataaaataataataaaaaaaataatgatatggtatagattttaaactttaactttaatatccaaatacgataaaaactattaactataaagtttaaattttaagttaaacattaaaatgtccaaactttaaatataaaatagtttaactaataaatgtaatttatgtaatataatatataaatttttattaaaaaatatataaatcggtttaattcggtttattcgggttaatcggacggtttagaataatttgtaaaccactcaatatatttattgggtggtttattgtattatttcgagttgtattttttttcttcagtttattcggtttagtttgagcgatttgtaaattttgttgaatatcccaattaa

SEQ ID NO: 108610 - DNA, 921 bp, Cannabis sativa
aaattgatatctgttcatttggtttgtacaaattattttgtttcaaatttacaattttatgaaagctatttttataattttattttcatttataaaattggtatatactcttttataattttttttttctgcagcaactctgttatagtattttaattatactaggtagaagttacgtaccgatgcacataaatattagttttatttaaagtttagttcttcatttttcttagatttctattaataaaggtatgattatgtaaatgatttgttttcttaaagtaatatttgtgttattatatttggttaatcaaatataattgtgtatatataagtcataacaatatatgaaaataaaatttattatttacttagagaatttagatgaacaatatatgtgttttgtaaaatttaaagcaaatattatgtaatgaaaattaaagaaaatgtgtgatcttaaaatagaaaaagaaattattaaataaagtcttaaaataaaaaatatatttacaataaaatatttatatgattacacgtaatttcataaatcatcatgtgaaagttaacaacatgtatgaaaattgaaccgaaaattaacaacacataatttcaaatgtattttctaatttacacctttctttttatgcaaaatatctagactctgattacttcaaagaaagaatcaggacaaaagaaaggaagaaagaaacagaaagaaaaagatgtagaatgactgatcaattgaaatagtaacttattggcaccatagtaccttattggcactatttttgagtattggttaagaaaatttccctactctcgtggaggattccatgctgataaaagcatatctgactttgcattgggcaagcagtttcagacaacaaaatatttagtagtgaaaagagcaactccaacatc

SEQ ID NO: 108611 - DNA, 623 bp, Cannabis sativa
ttcacataaggtttttgtggtgaattagaatgatgggggacgactagttcttctaatattttcttgctgaaattgaagtgattttgggctagaaatcgagcttggaactttttaaagcttagtccgaacgttaataacgtttttaatctaagggctcgattttaatttctgttacgtaaggatggtaatatttatggtatatatgtgccttgtgaagtttagagtgatttagataagttttggtactatttctgttacgaaaattgagatttttgtgttttataatttttagaaattcctaggagatcaagaattgtatttttgtcataatttttgactcgagtgttcgttttggatgttcaatataccatttcgaagcttgcgacgagctctacaaaatggtttatgttttagagcaaaatataagttttattttagtgtatttaaactgtggggtttggtagaaaatcctaaattatcttatgtgaatattaagcagtgtttcgggataaatatttattagtttaccattgttgtgacatagggacaagatcatcgagaacaggacccattgcctaggttgatgtatggctcagtgagctgggttctacttatctgattca

SEQ ID NO: 108612 - DNA, 538 bp, Cannabis sativa
ctatttttacagaaacgacctactgtttttcaggcagtttcctcgttttatcattttctccatgttttctcgatatttagggtgttgccaagctatttatcgagaaggaaatttttagttttgagtctaagtgtccaaaaaatgatttagcgtatcacttatcagttttgtgtatgttgtgacttaagggactgtaaaccatccagcagtagttccactcaggttgagcgacacacctaaattcagaatcaaggtaagattagtataatagcatcatatgtgattacatgtttagtgtgcatgtttatgaatgcatgttagttaacatagcagtaatggcggcattagtgtacatagagctacacaaaataccgacgaatatatgtttggtataagtactgattgatgttatcacatctgtatgactacagtaccaagtaaagttttggaatctttaatcaatggttgctagaacggttcacagcccattcttcggtgtaagtaatcttggttcggattactaatgtagtgagacatc

SEQ ID NO: 108613 - DNA, 644 bp, Cannabis sativa
atcttccacgttggcattttgaacttgtgaggcagtggcaggagattgatctatggtgagaaaggagttctgtgagcacggtccaactcaagatcattgttacgctgtccggccatgccatgaaacatattcttcaactcgtcaagctgtgcctgtacggctgggctgacttgttcggcattttggtcggtttggattatgtcagcgtctttctgagacgggatttgagtatgggcttcgggctgcaagatcgttgcaatattctgctcgtctgttccccttcttctgtttagatcgtcccttaggtcatcggtcgttcccagcctatccaacacaaaagagcatggttgtcttagcggttgattcgcttggttgacaggcgaaataactccattattttgattggatccgtcaggtatggctcctcctgatgaattctcagacaaggtctgcccgcctacctcttagcccacgagtggaactcgtgaccagggattggacggctgaccattggttttttgggaggcattcatcgtcggttcatcctccgtgtctcccaggggaatgacgttcggcgtttgctgacctacagtctggtaggctcttcgtatcagcacggtagcttgccgaatacgatcttcgat

SEQ ID NO: 108614 - DNA, 790 bp, Cannabis sativa
gtttgaggttactaaagaatttagagtttctcatttatgacgaggtggtgttgaatgtgttactgagcttaataaagaagttagagtttcatataataattgatcatatgatgttgtgcttttggatctttgtatatattttagatatttatatcatcatatatgtatgatgtgtagttctaatttagttacttccttttaaaaattatataaaaaagttacttttattttttatcttgattattattttttatacaaaaaaaaaatatatgtttttatattctaaaatatagtttaaaattgctaaaaaaaaggtaacatcaatgcatcttaaacaataaaataatataatatagcttgaaaattaaaaaaactaatatcataatttcaaagttaactaatcaaaataagtaaccctaaagtgtatgagataaaaaattatctcaaaataattttttctttaataaaaagtaactaattgatatattatttacatcaaaagcaaccaaaatattaatatatttttctcacatattaaacggttattttattatttatatatgtctaaaattttgaaatattttttttactacaaaagtaaccaattgatatcttattcaaatcaaaagcaactaaatggttgcttttttcaaaactcccaaaaagcaaaaatttctagaaactgagatttttccaatttttttctattttcggtaattattttgaatttcggtatgtatgctgacgtggcacatcggtatttgtgcaaataattttcttaaaggtattt

SEQ ID NO: 108615 - DNA, 795 bp, Cannabis sativa
tttttttttttttgaattgttgatatttagggtatggtcttgtctttcatcgataaggttattcctagtttgattttaaagcccccgagaagtgttttagtgtgtctctcaccaaaattacaaatgatatgatttagggccctataaaacgtcgagctgaccggcacacctgagcacgaaaatgaggtaagatagcataaagtatatatatgttaatggatgtatgttatcatttgtttacactactagcactgttaaaagtatgattatatgggtgttagtacattgtaggattttaaagtagttacagttttactaacacgagtaccaggaggtacgtcgtgcatgtggtacaacacttagtaactcctagaagtacaataaaggccctaccaacacgaatatagagttggtactttagtgcatatagtacagtggtcgtactttcgttgagaacattcttaaccacttggtgagctcggttattaagctcgggacggcttaagcataaagccggtgcaacattactgttatatatgttatgtatatcttactgagtttgttgactcatcagtttgctatcttatgtaggtaaaggaaggctaagctggaggagcagtgagttagagcttggcgaggattatacatatcgcggcagtgcaacctggaaggtttcggttttataacattttgagctaccctgtgttttgtaaaaaaaaatatgtgtaataccctggaattaagaaatggattagcaaaaccataattagataattatgaataattgaggaatta

SEQ ID NO: 108616 - DNA, 736 bp, Cannabis sativa
  modified_base (146)..(148): a, c, t, g, unknown or other
gtccaagggttgccaatcccttggacattccatattagagaattcatactcctcggcgaccctgctccgcagagttcgccgcttatgtggtctgctcaggagttgaatcacatggcattgaaacttcccctgttatagcatcaaannngttcccccattctttggtctcggttgcttgattcttggcacgagttcctgcttttggcacaaattttctccttttttccctttgccttttctgttgaatattttttccagcatcataggtgatggggacatcgaataggttgccgctcgaccccgactccccactttctgtttcattgaatcttgccttgcaatatctattcttgtttggactcattgaagcctcattccccaagtctgttcccattctcttcctaatggccatttctgtctgttgctggctgggattcatagtttcttggatgcaatcctcagcccgattttgaaatggaggagtagagtttatagttagaatggcatcctcatttattatactagattgattataattattaattgaatgagtatggatggggttacctttctgtttatttgtttgttgaattgatctctccccctctgtgggatgttgttctatcagccgagatggagatggtctgtctactccttggctattggtttgatttatctgttgggtctcttgtttgctgatggattcggttctccctgtcgtgtctactttaagcca

SEQ ID NO: 108617 - DNA, 685 bp, Cannabis sativa
aaacatatcaataatatgctcatcatataatataaacaataatgccattcaaacctatctgtgtgacacagacctgcatgttgcgctcaaatgtctaattatgtcaacgtggcttagacctacgtgttgctctctcatgtctatttacgtctatgtggcgtacacctacgtgtttctctcacatgtctaaataaaataaggccttagaatggttcatctcggttatagttaccaagtcccacctgattatgccttgaacgcataacccttaatctcaatatctatatatcacataattaatggcgccactacactatttgtctatttgctatagacttgggtgttacgctcacacgcttatatatgtctatgtggcatagacctacgtgttgctcttacacgtctatatatgtctatatggcatagacctacgtgttacgctcacacgtctatttataataaggccttagtaaggtttatctcggtcacaattaccgagtctaacctagttatgccttgctcgcataaccctattcatatatatttatctaatccatacattatgttcttccattggtttatcttagtaatatactaggtctaaccaagttatgtcttatacacataactcttgatatatatatatacattcaatatacattataacatataaaatcttagggta

SEQ ID NO: 108618 - DNA, 502 bp, Cannabis sativa
tagtaaattgaaatataaaaaataagcgaaattggttaggatgtaacacccgaacttatcatttactaaattcaaaggataatcttaatatattataactttattaacatatggatcggtatcccgagtattaaaatatgatttaaaagtattttactaatatatacatatactattttttttatataaacatacgaacaggcaacttcaaaatacagactcaaaatagtaaaagactgaaaccctccaggttacaatgccgcgatatgtacaatcactgccgagctccatctcactgttcccccagctttgcttttcctttacctacacaaggtagcaactgatgagtcaacagactcagtaagatatgcaagatatatatgtaaataatgcgatgtcgactttgtgtttaagctgccctgagctcaataattaagctcactaaatggataagaacgttcttaagggaagtacgaccactgtacgaaatgcactaaagtac

SEQ ID NO: 108619 - DNA, 699 bp, Cannabis sativa
agagagtttgattttatatatatataaaaaaaaaaaaaaaaaaacttgtgtgtttgtctcacattgctcatttgtgaggaatgtgtatttatattaggtttagagcactcccaacaacttatttactttattctttaaaatatctcacaataattttattttttttttattttacctcacacatttacattacaccataaatcactttttcaatattttttttctagcatttaaatattatattttaaatatattttattaattaaagtaaaaaaggacaaaaaagagtagaaaagtaattaaataaaagaatatgagagaaaaataaataatatatagtatttttgtctcaccactacttggagcactcacattaggtgagtaaatttgaactattatagctaattctctaaaatataaagaaaaataaataaaagtagtttttcatcaaataaacaaaaattgaactataatacaatttttttagctcatgaaaaatactttttagtaaagaagcactattcattgagctataaatattatattagttttatttaaacttttttcaatataggtgtgtgatattattatactaatttatttgatttttaaaaaataatataatataataaaaatataatatttaaatgaaataaataaaaaatagagaagctaatgtagtgcaagataaaataaaaa

SEQ ID NO: 108620 - DNA, 1312 bp, Cannabis sativa
aagaaactggtttcttcatcaaataattggtctcttcatcaagaaaatggtttcttcatcaagaaaccactttcttggtaatttttctagcgactatgccaatcccgatgacttttctaaagtttgttgtcgatgcccaaaaagtcgctggagtagctgccagtgtcaaaaaagtcgtcaaaattgacattggcactggaaaaatcaccaagaaagtggtttcttcatcaagaaaccaagaggctgtttggctttatagtttaaaaactgttttttgttttttaaaactgaaaacagtttttaaaaactattaggagtcgtttggcaaacatttttaaaaactgttttttaaaaattgagttttaaaaaactagaaaacagaaaacatcaaaatgctatttttaatttttaaaaacaattttttttgtctaacatattatattttatattttgctcacatactcgaatcctagacccgaaaccatacctgaacctagacccagatgggttaatgtcatggtatgatgccaaaatattgattttttttcctaagaaaaaatctgaaaacagcttttaaaaatttttgcaaaacaccattaaatttttaaaatgataaaaaactgttttttattctcaatttaaaaacacaattttaaaaactgaaaactgaaaacacagccaaacaagctccaagaaaccgatttcttggtattttttcagtgatttttccggcgacaatgccaatttcaacgaattttccggcattgacagcaactccgacgacttttctggtaccggcagccactctggtaatttttccagtactaacagcaaactccgacaatttttccggcatcaatgacaaataaaactacctaaacaaataaaaaacattaaatatgtgatattaaaacctaatttacatatatatagcatatcaaataccattaaaagacctaaaaacaaaaaaaaataccatataaattggtcaaactaaaaatttcatattatgtgtaatttcctctcatttgtttatttattttgagcttaagagttgggtttggaaatttttttgagtctggtagctagattaaaaataaattacagttcgataatcttttgagtttgacaactgggttttgaaatagttttgagttttgggactggttttgaatgaataaatgatgcttataagtataaactgtttaatgatggctcgtttggtacgccgtattgtaatgtattgtattgtgttggattgtgttgtattagggctgttcatccgatccaatccgtacttttttggtcaaac

SEQ ID NO: 108621 - DNA, 511 bp, Cannabis sativa
ttcaataattcgtaacctagaaccaactttttccaataagcaatctaaggttaggattactcttgaagacattgaggacgagattgaattctggaaaccttcaatagtgtgctatggcttggttctaatcccccattgcacattcttgaaggctttgctaacagaatttggaatggtaaaattgacagagttaagctcttatcacatggtatctttatcattcgatttcatagtcttactgttagagatgagatattgaatggagggtacatattcttcaacaaaagaccggtgattatgaaaccttgggaccctaataccaattttagaaaggaggacataagaacaaatcctatttgggtgcacttggaggagttggaactcaaatattggggacaaagaagcttgttcaagatcattgggcaaataggcaaaccggttatgattgatgtcgtgaccaaagaaagagaacgattgaattacccctgaatactcattgaagttagtatga

SEQ ID NO: 108622 - DNA, 610 bp, Cannabis sativa
ttgcttacatggaacaagggctttatgttttaagaccgaaaatacaaatcgcacttaacaacaaacttttcaatgttgctaaacttagaaaccataaaaaagaaagagatcataaacgataatgaaacatatctatgacatttacgattaggtcatatagactatgatagacttcacaggttaaccaaagacggtccattgaaaaatgtcgccttgggtgaattacaagtttatgaatcttgcctagaaggaaaaatgaccaagcgttctttctctacaaagggagagcgtgccaaacaacctcttgggttagtacattctgatgtccgtggacctctaaatgtcaaagccagaggaggttatgagtattttttcactttcattgatgatttctctagatataattttatttacctaatgccaaagaaatctaaaacgtttgaaaagttttaggaatttcatgctttggctcaaaaccaatcaggtaagatattaaagatcttgcaaactgttaggggtggagagtatatggatatgaagttcaaagatcatttaattgaactcggaattgaatcacagtatactgcccctagcactccacaacaaaatg

SEQ ID NO: 108623 - DNA, 580 bp, Cannabis sativa
ctttaaatttaaactacaattagaagatcaaggaaattactaaattgcaacacatctgtgttctggctagcaggcttcactaaacaccatagatgacaaaaagtacacatcaattagaagcatctcaaaatccaaaaccgctaacaaacaaatacaaaaggagataaaagaatcactattttagacacaaaagatgaagaagagagaagagatcttcttgttgtagtcttacctgctacgatgagactggaattttatatttagatcagtgtgggcagattataaaatgcgtaagtggcatgaaccaacatgatctgaaaggagatacctaaaataaaataccaacatgatgcgtaagttaatggatacgtagtaatgtcaaattcaaacagctccttaatatcaataaattccataataagaaaggtatgttacagagcatacctctgctccttccatccaaggcattccttgcggaagatgcaatctccgcatcactgaactgaatcaatgcctgcaaatccaaccaaaatgaggatgccatattgaaaatgcactgcaagaaaacaccaacataact

SEQ ID NO: 108624 - DNA, 610 bp, Cannabis sativa
aagaggcagaaagtgcatgatgaggacgatgaataatgtaagagttaggaagaggaatagtatgatcttttaacttggactgaacattcacaattttcaaaataaatctcgcactcctttcatttatcacagtgaatggttgtcatttcattcataagatgtccagctgcggtgttttcactagtgtcaaataattttttctactactttgaaaaattcattagcatttgtggtgtttggcaaaccactaaatgaatgtccaggaattgaacttttcatagcaatgagactaagatgatttaaatttttccattgtgtatgaagagtattctaggcaacagtgctgatatcagtaagatcaacagatttttcttctcgaaggcataagtccaaatctattatgcctaaagtaattttcacatctcgtttccatgccttaaagttggaagcattcagaattcggatgaaaacattattgttgttctcagaaaggagaccaaaaaaattcaaaaattaataaaacttaatcaagctatatgatccaagcaattagaaaatattgtaaagtcaactagtcattataaattcccctttgggtgagaatataaca

SEQ ID NO: 108625 - DNA, 565 bp, Cannabis sativa
atatacataatcaataaattaattaagcttttatgtcactacctacatcactcaacatcactcaaacaatttaccctatacactataattaatatttatttttataattaatatagtgataattaattgagtaactattatttcaaattttgtatttttataaaatgttaaattttattttaattttttattaaaataaagcttaacaactctatttgaaaatgttattacaagactgaatacatttcttacaactgttttgtattgaaaactttcttcaaattgattatattaaaaaaataattattaaaaattgaattaagagtttcattttgtaatattttaaaaaatataatgtctaatttatcatttaataaattaaaagttgggaaaatagtattaattctaatcaattaaccaatcgattatgctttcttacctaataataatgtggatatctctatattgttcggtaatatttacatatatacttacttaactcttacgttatctatatttttttaattaataatttcatctctaacgtagttgtacaactaattaa

SEQ ID NO: 108626 - DNA, 626 bp, Cannabis sativa
  modified_base (27)..(40): a, c, t, g, unknown or other
  modified_base (99)..(103): a, c, t, g, unknown or other
  modified_base (184)..(198): a, c, t, g, unknown or other
  modified_base (410)..(429): a, c, t, g, unknown or other
tttgatttttacttttcatatttcaannnnnnnnnnnnnnaataaattaatttgatttttttaaagattaattttaaatattagtgtaatttgaatttnnnnntaggtaaaaatctatttttttttgttaatgttttttatcttattttttaaatttgattatttaatcttatttttaaatttnnnnnnnnnnnnnnntttttttaaaaaaaattattattctaatttaagtaatttgaccttatttaagtttaaaataagattactataattatgatatttttaactagaagtaagatatttttgctaacttttaaattttattattttttatttaaattaaattataaaatcagaataggatacttatttatttattttttattttactgaatatttaatttataaannnnnnnnnnnnnnnnnnnntggttagcaattttttttttgaaatgatgtatttaggttagttaaaacctaatttttcaaaattataggtttaatttgaatttttttttaaaatctgaaaaataaattttttaattattttcgaaatttaattaattatttaaaattaaataaatcttacatccaactatcgaattcaacttgttgcaggagtttgt

SEQ ID NO: 108627 - DNA, 614 bp, Cannabis sativa
gtggttagggcttggagtgggtgatcgtgggaagaagaggttgaagacgataggaaatagaagcagagaaaaaaaaatccaaaaaaaaaggaaaaaggcagttatgaaagaggtggcgtgtaccttggtgtaaagcatgacatatgcatgctaaaaggtaaaaatgtacttatgaaacttttaaaaactaaaattgaaaaatttaaaaggtaaaaatgtttaaaaaaccgagtaatgccagaaaagtaaaaaagtgttgaaaaggggcatcaggtgtaaaaatctcttaaattttctatgttattttcctctaaaaaatctatattagtcttccttaaaaataaaaaaaaaattaatgttagttatcataatatttttttaatattaaaattacaaattcattcttaattatttaaagtttattttgtttttaatctccatttaatttcaatcattggttatactaaataatgctttgtaaatttactatatatttatttttcaaaatgatagagaaaaaatattaatatatttacaaggtatactaatttaaaagagtatatgtgtaatagaaaaaaaaatacaaaaataaaacccaaaatattatcatttgc

SEQ ID NO: 108628 - DNA, 505 bp, Cannabis sativa
  modified_base (318)..(318): a, c, t, g, unknown or other
tgagtaatttgcggcataacctccgtaagtgtctagtttattacaagtaacccctaattctaaaattttggtggtaaaaccccctaaactcatgttctgttagcacttagccctttccattcatttttggcagttaacttccatgtgggcatgttcatgtgtacacaaagtatttttcacatgaacacaatgcacacatggcattatattattagcccacctaaaaaatattttttaaaaaataaattaattaatttaaaataataaatcaatctaattccatgaaaaataaaaataatttaatttaaaataataaanaaattaatttaaaaataaattaatctaaaataaataataaatcataaaattaaagaataataaaaaaggaaaaaaaaactctaattctctaaaatttctctcttcttctcgtgctctcttctctcactgccctaaatctagctgtccaccaccattctgacccgcaagaaacttcggtggctccccc

SEQ ID NO: 108629 - DNA, 1152 bp, Cannabis sativa
  modified_base (1111)..(1113): a, c, t, g, unknown or other
ggaaaaatggtttaagtatattttacatgatgtaaaatatgctagcatatttttagtgtaccatttatttttaagcatatattgtcaaatttcccaattaaaaactttctgattattaagtaaaacaaaaacatataattgagaaattgtttgtccaacaactttttatttacagtttggaacatactacaatttagtgaagagccgacatggagacttttatattgattcatggagactttttaattgattcctacaaatataatcaaaaacaattattaaatgaggtattcaatttcagggtaacttctctagtctcacttcttttataaagcataatagaatttcccattaacattgtttatgtcatggtgtttttagtcacattagattttgactaaaacatttttcatttttttttaagtatggtatcggtttgaacttacaatttggatgaatagcaatagataaatgtatttgaaatggtccatttcttattctacaagtaagaatagctatcaaattcaaagctctatctaatatatactctgtgtttagctgtttccaagtaaatatatatattaatccatccaagttatcaattacagatgaaccaaagacggtggttatattatattaagtacttaaaacattttttttcttaatggatttcaactttgatgatgactattatttgtgttgcgatattttgcacacgtacgtattgtactaaactcacgaggagtgaggtcgatctcacaggaagtgtagttaagtacgttaaaattaaacttttacttttatttagtttaataaaaataaagaaagaattaaaaataagaaactaataagaaacaattattcaagaaaattgatagttaataaaaattagggcttcgatttcaattgtttctattgaatatggcctaatatgattattttcctaatattaatctctatgcaatagcaggtttactaagataatttatagtcttctcatatatataaatctcaattacatgtaaactttctactctcgtgataaatttaacatgcaggcattaagcgtaaaaaccctataagctatctaaaccatataggtactctcgtnnnatatcgaaattcagttctattttactatagcatatttga

SEQ ID NO: 108630 - DNA, 611 bp, Cannabis sativa
ttggggcattaatgagccttagtcaacgagtcttttgtatttatgagagtatttattacagagaatgttcttggtagtttttctctctttggttcttatgaaacccagaagtctcgacccctctcttaatgtgtttggggggtatttatagtgtttttgtggggagatctctagaaccgaactacatgtctttctgtatcttttgagtaggggcacaaattcccaacagatataaaatgggaaatgcatggtctataccctaggtatcttaggggttaggtggatataatcctttatcccttcttgactgatgtgatccctcataaagtagccgtcactaggtttattaatcatagcgtaatagctgcaaaaggggggttacaccgtcagacttaatacttatggcaattccaatgcgccttctcccatgcggcattaaatgcgaggtgactattcacttggggtctggtgcctcccgcaggtgctttgctagagctctgccctcccagagtacgtggacccctcataccttctccgggaggtgttttcttgctgatactcttgatttaaaaagacttaatcaaattatctcaaaaccatattcctcaaat

SEQ ID NO: 108631 - DNA, 878 bp, Cannabis sativa
acttttcccatattctgagttacgaagcattagaacttcagcctgacttgtcatatgaggaataaccggtgcagatactcgatagaagagaaaaaatcttgcgaagcaagacagtggcactggtgaaagtattgtggaggaatagtaaagtggaagaggcaacctgcgaacttgagacggatatgcagtagaaatatccggagttgttcaggtaaatttcgggataaaatttctataaggagggggtaattgtaataccctagaataagaaatggattagcacacctaattagatatgtatgaataatagaggaattatattattatatagttcaatatatgagaatttatttgattaattatatgtgaagaccccgttggtgagtcaggggcattttagtaattatgacctgagaagggtaaatgatgaaattaatttaattacgtgctcaatggaactatattattatatagtatgcctgtgttgtcttttcaggtgtgttatgcgcggtatagtcataactgggtatttcgagccgaaccgggttcgggcccgaaatacaatttgaattgaattaattggcattctgtttgataatgagaaatctgaattttatttggaaataaatgagtgtgaaatgacaattatgcccttttatgtatgaatatgtgagaattggccctaggggcatttttatcttttgaccttatttgatatactttgataaaaatggaattttaagggaaatgaaattagaatgtctggcttttgtatccctaacacccaacccctctctctctctcaaaccctttcttttagaaatcttgattttgagaagaaaagcttgaatcttggtttgctttgaagctttgttgtt

SEQ ID NO: 108632 - DNA, 853 bp, Cannabis sativa
aggtcctatctccactaccttcctttttctccagtctcgaccgactaactaaatcccaaatcccaaatcgcaccacagaattaatggattctatcactcgcctctgcatctgtcgctcctcacgactgctaccgaccaccactggcttctacgacttcgatcattgaagccccaatggtacagagtctctcgtcactgaatctcaactcaatgttgtccttgccgtggctcggttcctgttgaaatgtcaagattgcactgatctctgtcctaaagcagtggttttggagttctttcgttctattcagacttcattcgataaatctttttggctgcaagcatttggtactaatgtgattgcttcattcttggctgagtttttgagatatatatgcaaagcggcggaatcgtcgctggattttgcaactgagatagatcacgagttgataggcgaggttgtgaatatttttttttccatctttagtgtatatttttatttatcgattctctattgtattcttatggtttatggttgtttacagtctgggcctgagaggagtatccctggcaacactcttgttgtccaagatgatatgcctttcagtggccttacaacattcagaattactttcttatcaaaatttgagtgttctcaaatgctacatcctgtaagttatcattttatagttacagtgatcttaattgatttaactatgtatctaaatattattattttgcatctaaagttgttagaacacattacatttgtggatactcctggagttttatcagggggaaccaatgaacacaacgagcatacgactttactggttatgtcatggtttgctttcta

SEQ ID NO: 108633 - DNA, 518 bp, Cannabis sativa
gtttatcctatatattttctaactcaatctaatgttcgggttgctaaaatttaagtgcaacccacccaatttaaaaaaaaaaattgcaaactgaccaacggtttgggcgatttggtcgggttaactagcccaaaccggccaaatttttttttttttggtttcaaagtcaataaaaataaaaaaaagataaattaaaatatcaaattccaccaaagtacaacacaatatatatgactttgaaactaacaatcaagtatataactttatatcattatatatttaatcatttatgttatatataataaaaactaaaaagtaaaaaaaaatccaataaagtcaggttggtccggttattcaatttaattgggcaggttggacctatttttaacccgcccaattgacaaattgggcgtttgtaattttttcaggttatttcggtttgtaatttttatcgattttttcagtttggtttgggcggtttacaaatttttttgtacagtcctatattaaactagtgt

SEQ ID NO: 108634 - DNA, 619 bp, Cannabis sativa
  modified_base (147)..(154): a, c, t, g, unknown or other
atttgttatatttacaatatcatccctgtaaatttttaaaaattccgaatagtttacagtagcaaaaaaagagttcatgatattccagtttaccacgcgcggtaaaaaaacttcaaacgtactttcggcactgtaaactattcgaannnnnnnnaaaatttacagggatgatattgtaagcataacaaatacccccgtgaaaaaaaatggaaaaaaaatgttccgacatgtatttttgggcgtagaaattaactaagaggttgtaacagaaggttgatgttagcactcctcttaataataaagctcaatttcttgcaaacaactaaattttgtattacataaagcactatataatattaatattatagtttaattttgggtaaaacaataaacaaatattaaatgaataaaaaaatataaaattacataaaattataagggatatttgcagcaaaagtcctttaaaaatttactttgatggagattaatccccaatcacaaaaaatattggcaatagtcctcaaagtcgtactttttgtaagtccgttagtccaaactttaacagatatgttcacttattcaaaattgacacatgtccaattattattggtctaaatta

SEQ ID NO: 108635 - DNA, 702 bp, Cannabis sativa
ctctttagtagagataagaaaggacgaccctgaccaaatactagtagaaatactagaaaacatgatgacaaggatagtcatcatgggagctcccaaaaaagggggagctcacaatacagataaacggggtggttaatcaaagaataacgataaatttgatgaaaaatgctacaactgtggcaagtatggccacatggctaaaagttgctagttcaagaagaaaactgcagaaggcaatgcagccacatcaaatgcagaaaggacaagcgatgaagaatgggacgcagaagcatcatttgcacgaaggaagaagaattagctttgacagcttctgttctaggaaagattgactacaataatgattggatagtcgactctggctgctcaaatcatatgacaggagatgaagagaagctgtaagacatgaccgaatataaatgtggtcgcatagtggtgacaattaacaactcaagattatcgatcgcgcacatcggtaaaacaataatcacattgagattcaacccaaaataagtttcactccaggatgtctaccatgtacctgagatgaagaaaaatttactattagtggcacatcttacagcgacaggccaccatgctgtattcgaccttcgagatgtcaagatctaccaagatcttgaaatctctggaacaccgatgatgagaggacgacgcttagagtct

SEQ ID NO: 108636 - DNA, 560 bp, Cannabis sativa
aaaatatattttaaattctaaatctaaaatctattcatcaaattattatgtacattttgaaaaaattattgtaacaaaatatttatttcacgtaacaagatgaataatttttaagcaaaatttgatttttttagtaaaattgacccaagaattaaaaataaagcttaaaagagattcatatttttataaactaaaattaaactcaatcaagggtattatcataggaaaagcggatatcaccaaaggctttttttttaatgcataaaatatacatagaaaataaatatattttttggtttttttactagaaaaacaataataaatatatttgttttttttttgtaagaatatataatataactactttagcatccaaacaacaaatattgttttttaactgaaaaaatactctaccattttcaatcaaatgaaggaaataaccataatttaaccaaaaaaaaaagaaggaaataaccataagaactcaccaccccaaacttaatttatgcattgtcctcaatgtatcaaaatacaaatataaattgaaagtaaaagagttg

SEQ ID NO: 108637 - DNA, 644 bp, Cannabis sativa
cgttgccgcaagaatgcgacatttggcaagcagaggtacctgatccacttccataatagtattgaatttctctaaataatcaatgggattagagatacctttatactttagtgattcagataaccggaatcccttagggagttgagcttgtcgcacttccgtagtgaaaggagaggtcccatgtagcttgtatatgggctttctctgctgctcgagcattttcaaagcctgcaagagcatgctttgatcaatacctccagctaagggagtcgggattgttgcggctgcaggagctgtggctactgtggcgaggtttgctgggacattaaccccggtagtcgctgctggtgcattaggcagatttgtgcgagcgtttatgccttgatcgctcatttggggatcacggggcgcttcctcgtcacgaggggcgtgggagtgtgctctgaaaacaacattaaggtgatcacgcagatcaccctgtgaacctgatattgtcctccctgctgcgtctccacagaaccggacctcgtgtacctgctaggtgtgcgaccatgcgaggacgaggaggcggattctacgtcgttgtctcgcaaaggtctattacgagggttacgtggtttggggtcttcgtcaatctgtgtctc

SEQ ID NO: 108638 - DNA, 542 bp, Cannabis sativa
taaccattagaacctcctccataaattaattatttattgtaaacggtttggtccggtttaaccgttaactatttattacgaaccgcaactgaaccattataccataaacgattcggattgaccaaactaccacaacagtttcttcgattacagtttaaagtggtttgaattgtcgtggtttgaatttaaaccgttgttttttagtttatatgaacagccctacttaaagttattatattaaaaaataaatttttgaaagttgagcttagaatcttattttttatcattttgaaaaatataaagtatattttatcatttaacaaaacagagagtccaattaatagtttttacaaaatatagggtcaaaaataatttttatttttatttaattatttttgtataaaaatcataagatctattaattaataaattcgttcaaaacaatagaacacacttagtcctccaattgaagcacacaacctgtagagaaataagagtctcttgccaagcaatgagccaacttatttgcagatcgttttaca

SEQ ID NO: 108639 - DNA, 629 bp, Cannabis sativa
  modified_base (224)..(226): a, c, t, g, unknown or other
  modified_base (335)..(347): a, c, t, g, unknown or other
gtcccaagttccaatcccgatctgagtctggattcagttctgggtttacgttctttgttctgatccttgtttgggttccagtttgggtccggatccgggtctagctttgggtctgattttaggtgtgaatgttttagttcgggtctgagtctaagtccgggtttgtatccaggtctggaccccgatcttggtctaggttagggtacaggtccaagttcgggtcnnnagtgcgggtccaagtttgggtctcagtatggatctcggtcgagatgtaggtccagcatttcaatcccagtcttggtctttgtcctagtcaaggttcgtatccggatccnnnnnnnnnnnnnagtctgtgtttgggattaggtcccagatttaggtccaggttcgggtctcaattccggtcagggtacaggaccgtgttcgggcccgagttccagtctcagtttgggtttgaggctaggtctgtgttcggttctaggtctgggtccgagtcctagtcacggtcctagtttttttctaggcaacctggttccgagattctttttcaggttctaattttaggtcccaggtctaggtctaggttcgagtttggttcttcgtcttggttcttgtcctagtctgagtcc

SEQ ID NO: 108640 - DNA, 504 bp, Cannabis sativa
cctaggtccacctatgcaaagggtcgggcttgacttggtctgctgttatgttatgtttaacatcactgctgccatcaatgtcaaatactacaagatgtcacatattaattaattaaaacagtttaaagtttaacatcactgctatgtttggcattattgcatagttcacatatgacattattttttggagagtatttattttttaaattattatttttatttaattaattaaaatagtttttaaacgtgtttaattaattagaaaactgagacgttttctcgtcctgatttttagcatcaattttatgatcccacgttctaacgttcccatgatcagaaacgtctttcatcctgttactactttctgtgcatttcctatataatgcatccgaactaataggagaaatacatatttttctcacaaaaaaaattatatacaattatatatgattatattacaatatgtattcttaaagcaatagtgttttgttgggtgtggtattt

SEQ ID NO: 108641 - DNA, 686 bp, Cannabis sativa
agaggagcatgagcaacatctctgaatggttctgcaacggcttcgagaacataagttgtacgccgaattcaagaagtgtgaattttggctatctcaagtgttcttccttgggcaaattattagcaaggatgggatcaaggtggatccaggaaagatagaatccgtgagggattggccaagaccaaaaacagtgacagaagttagaagcttcttgggtctggctggatattatcgtcggtttgtggaagggttttgtaaaatttcaacacccttaactgagcttactaaaaagaatcagcattttgtgtggacagacaagtctgaggctagcttccaagagctgaagtagagattaatcacagctccagtgttagccctaccttctaataaggaaaaattcatagtgtattgtgatgcatccagacagggtctggggtgcgtactgatgcaagtcgattgggttgttgcctatgcctctcgtcaattgaaagattatgagcagcggtacccgactcatgacctggaacttgccaaagtagtattttctttgaaaatatggctacattatctccatggagagagatgtgaaatttatactgaccataaaagcctcaaatatttcttcactcagaaagatttgagtatcagacagaggcgttggttggagttggttaaggattacgact

SEQ ID NO: 108642 - DNA, 593 bp, Cannabis sativa
cattcgttggtgtcatggccataaactccatgaaaacagaaaaactgggtcatgtgtctctacttatgtcctttttcatgggagcgggcttcttatacggagctaatgactgagtagtcatctagatagtctctaaatcttctgtcagaacagagaaagcaataaacttggtaggattttccctagggctctgttcggttttgccagcaaactttccctttttcccattgccttgactattgttgttgttggaccgtttaccacccgagcttgaactgcttgggtactgagggagctggacggatgttccagcatagggagcttttggctggccaggtttatgcttgacttctacttgttgaatggcttcttcaagcttaatgaagccatctacatgatcaaggaagtcactgatagaatctactggtccgtttcttctgatatccttccaaagttctccaagaacttcgatgcccccagtattgcggacaatttcctatttttgatcaactgtgcaaccttagttgccaccctcacgaatctgctgatgtaagctcagagaggtcctcttggtctttgcttcacttcgacca

SEQ ID NO: 108643 - DNA, 523 bp, Cannabis sativa
gactctcgcctaaatgggacactatatcagtttgttgaaaaccttggaaaataaaatatgttagaattttggtattttcataaacatatgtgattaattgttattttctgaacttgtgtatgaatttattgaaccaaaagcttacttctgtttattgatatttgtagtgccgatataaataacccacaccctgacccacttctagtcaatgtcttagcaaatgaactctattgtgtgaaaatgcaccctggtagttgcataaacgcgcacctattgatgatgaatctgaagttccaaaaagcaaatctacttggaattgaattatcaaaacaacaatgggttcaattcatactttatagtcttcctccagagtataatggatttgttgtatcttacatgatcaacaattttaactcttccgacatggataagctcgaagcagaataacgagctcaagaacagaatctgattgcaatgccacctcctggttttgcaaactttaatcaggggaaaaggattaagc

SEQ ID NO: 108644 - DNA, 982 bp, Cannabis sativa
  modified_base (125)..(127): a, c, t, g, unknown or other
  modified_base (406)..(411): a, c, t, g, unknown or other
ttttagaattgatttagaattgatcccatttttttttaaaaaaaaaattataattagttctacgaggtattatgtgttatgatgtattttgttgtagaactagttttatttttaatttatgtttnnntgttttaggaactgattttctctttgtttattaattgtaatcagtttgagttattgcgtgttacttgtttgtattcattatgttatataaccggtcatgttttagttataacccgtttgagttattttatgttatttattcattataacattattatagaaccggttctattttaattataactagtttaagttattttgtgctatttgtttttattcattatgttacaaaacatgatatattttaattataactttgagttatttatttttattcatnnnnnnatagaaccagttctatttttagttatatctgagacatctatttctaatgacttttttggcgacggtgactttttcagtgactggcgacggtgacttttctgacgacactaactttttcggcaccggtgacttttctggcgaaacttattattacaagttttattaaatttatttattatttttttctcatattttaaactttaattattttttaatcccatatttttttacattatttatttatactatataaaagtaaactctcctacattttcccatatatatgaaaaaaacctatttaaaaattgatttggataagtcttatcatgttactaagtttatcacagatgaaagaaattacaaaatttacctattacaaattatttatttaatctattgacaattagactatgattaaaattagatcgttgaatctatcaacaagttaatcatagcaatttaaataataggtttgttgaaaaaaaaaattgaataaacaaaaaatatatgtagcaggatttgaaaagttggttaaaatatttttattttaaaataaaatatttaaaaaata

SEQ ID NO: 108645 - DNA, 516 bp, Cannabis sativa
aggtaaatgtattacttttaatgtaattaaaaaaaatcagatgatgaagaagatgatgagatggatgttttaactaaaaactttcagaaatacatgaaaaatataagtgaaaaaagaatgttttaaaatcatccaaaggtaatactttttcaaaaccatcaataactaacaatcaaaagagaattcaatgcaggaaatgtgaaggttttgaacatattcaatctgaatgtgcaaatacactaaaaaagaataagaaaagtttcaatgtcacatggagtgacgatgaaactaatagtgatgaagatatttctgacaatgttgcactaacctcagtttcttctaagtttgtttgtgactcataggtgaaagaaagattggtgcgcttgaataatttcattaaggaggaatctgattcagatgaatttgaaatctgtgaggagtccctagctgagtcttacaagattatgtataaaaagtggatacaggttactcctaaaaatagatcattgtcaaaaa

SEQ ID NO: 108646 - DNA, 668 bp, Cannabis sativa
acacagctgcacaccatggctatccaaccctaactcttgattgtcgcagttcagcttcaaccaatcctgagggggaggacgccaaacatcggacgggcacaacttggggcaagggagtaagtaagcttggtgatctggaaaagaaaagcgaataatgtcaatgcatttaaaaatatcaacaaagctattgttgtgtaccttatcattccgtgtttgccaaatcttatcaattattattgaggcatagaggaaagcctcctcagcattaatgcctttgctttttaggtcccataagaacttgacccaatcccacattctaataccagtatcacagatagggtagataccccaaggggttgacctccataaacgagaggcaaagtcacaagacaggaaaagatgctccatggtttcgattgttgctccacacaaggggcatctgtcatcctcaataggaaattttcttgctatgatctcacggacagggagagccttagagaggatacaccaccaaagaaccttgagccgctcagggattttactattccacagtttgttccataaggctggggcaacctcacaagaactcgcgcgatctgcagcttgggccctataggctgatttgctagaaaaatagccattagattctaaggtccagcaccaattgt

SEQ ID NO: 108647 - DNA, 576 bp, Cannabis sativa
  modified_base (302)..(306): a, c, t, g, unknown or other
tttttttttttacatttatagtcctctttcaactccctaagagaacttatattttttcttaaggggagatatttaaggcccgtccccaggcccttaatatttttttagagcttttcgctgggtttgaacactttatatttatgcttaaatacatactttgccttttaactttgttaaacttttggcctgttttatatttgtccgcgtggtatgccttactacccccctgattgacatgaaaattgtttttaaggcacttagttttacaaacattaatttagaggttgcacatacttgtccgnnnnnaatttactttacagagcataaacttatatttttcgactattggtaatactttcggaggtgatcagcattccaggccctaggcaccatggttccgtccattcttttgagcttgtaagtcccgaagccaatttcgtcctcgattttgtatggtccttccgaattaggtccaagtaccaccactctgggttcctaagtggctgggaagacccgtcttaggaccagatcaccaatagtaaattttctatttttaaccttcgagttgaagtgttt

SEQ ID NO: 108648 - DNA, 955 bp, Cannabis sativa
cccatctccaccgccccgactcccacgcgctggcgcgtgggggcgcgtggcactgttccaggacaccgattttcttctcggttttctcctcgacctcccctgtcgtttcgttgtccatttcagttaaatatgtgttatatgcttcgccaatttgtgcatgtgaagtttggtggaacgaacatatttgtaatggcttctggtagaccagttcttgtttctgcagatgaatatgccaaattcttacagtatcaagagtctcttaagtattcatcttcttctatcactactattgctgattcaggtaaacaaaattcgtgtctcctttcctcgtcttccaaatggatcattgattttggtgctacagaccatatgacaagtaattctagcttcttttctaatcttcaaccccacgcttccacttctactattacgttagccgatgggtcaccatctcgtgtttttgggtctggtaaaattactcctactccaatgcttcctttgtcgttcgtcttacatttacctaatctttttttttaatttgatctctattagtcaacttactcgtgatcttaactgttgtatttctttttattctgatcattgcgtatttcaggatcttatgacgaagcaaattattggtaaaggacatgaatctggaggactctacattcttgatacaccaatacctaaatcagttgcttgttctggtgtacaatcccccttcgaggcacattgtaggttgggccacccatctcttcctctgcttaaaaagttttgtccacaatatagtaagttgtcttgttagattgtgaatcatgtcaatttgctaaacatcaccgccttagttcaagtcctagaattcataaacgtgctagtgttccttttgaattagtccattctgatgtttggggtccttctcccatcttgtctaaacctggttttcgttattttgtta

SEQ ID NO: 108649 - DNA, 826 bp, Cannabis sativa
  modified_base (157)..(172): a, c, t, g, unknown or other
  modified_base (424)..(426): a, c, t, g, unknown or other
aaaatattgattgagaaaaaaaatgttaaaaaaatttaaaagtgatttttttttaaattttttaaaattttgattcttaattaaaaaataaaaagtaaaaataatcttattcatgaacttgattttggaaaatatttttacttttctaattttaaannnnnnnnnnnnnnnnaaaaagtgttaccaaacacacccttaaaattctaacatatttataagggtaaattgcggcataaatacctaatgttttagattttatacgcttaaatagcttatctttacttttagagacaattcaattcgataatcatgttccatatactgcactggtactcagctatggtattgcatctctattatttttttttttgaaacaagtatcatttagtttttgatattcagaatattaaattttaaaataaannnaataaatgtaatgcatctaggccctccacgtgtccatatttatgagttaacagaagtggtagtaaaagtgtaagagaattgtaacattgggtatttttgcctctaaaaataaagataaggtatttaagtgtataaaatctgaaacattaggtattaattatgccgtaatttaccctatttataaatacaaaataacaataaaaagtattaatactaataaaacaaaaataaaatgatactacgttataaaactaaaaacaacaatattaagtaaaataataatttaatagtcaaattaatcacttgtggatcttagccttgaaaaatatcaaaatattagctaaataaactttaagtattttgagaatcttgatatgcttgatattaatagtgaagtttt

SEQ ID NO: 108650 - DNA, 868 bp, Cannabis sativa
  modified_base (44)..(44): a, c, t, g, unknown or other
  modified_base (127)..(129): a, c, t, g, unknown or other
  modified_base (261)..(274): a, c, t, g, unknown or other
aaagttcttgtacacataatcacagtaccttatttgagtggganaattttaaaattctaagcccatcttcttttgtatgacacttgtgataagaactttaaaatacaactgagaaagtaaatctaannnttcatatggatagaaataacttgttagaactttgagaataaaatagtagaatttttgcatagtctattcgaatgacttaggcaataattcctaatcctgatgaaatgtttttatggtatctctaatgattannnnnnnnnnnnnnagtattttacattaatgttaatactagatttctatgttgatgacttaatctataagacatcatgtcacagcaagatatccctggaaacaatggtaaaggttaaatgtacttctatgtatgaatttaaccagactcttactattgagtgggagttatctaagatgtaatcaaacaaggaacattaaaagatagtcaagaaagattactgaaagtgacctatatgttagatgataggggtgtatatattacaagtcctaatatctacaccaactcataaaggatccgagatggtggttactctgggggcggaggaattattctagaagattgtaaaaacccatctataataattcaagtaccatcagtgaagatatataactttgtaaattcaaaattaccaaaaagttattcaactgaagaaaattctacactgtgttatctctattccactttggatagaattagagatacgccttatgtttattcagatgcactttattagcagtgaagaatttagtatccctaaatgagtaatgcatatagcaaataatgttgcataatgttttatggacacaaaggaagtaatggtggaaa

SEQ ID NO: 108651 - DNA, 829 bp, Cannabis sativa
  modified_base (200)..(206): a, c, t, g, unknown or other
  modified_base (612)..(635): a, c, t, g, unknown or other
aactaagcggtctttacaactaatataaaacaaaatgtgcatttcaaataatcttaacacattgatatccagatcaactgtattatgtagtatactctctgtaataggatctgactagttgtaatcaatacaaacttttctccaccattacatttccttaatcagaaaatccttaatattgtgaaattcctctctatatnnnnnnncctctagggatactggattctttactttttggaaactacttctgtgttagttaggaagtaacaagcagttaataaattattagtacaatgccaaaaactgtatagaactttccataagctgaataaatatcttttctacaactttaacattcagtctcactagtatagttagagactccagatcggtttttacacttctccaaaaccactgctccaccccaaaaataatcaccatctcattagtagactttctagcatcaaggcaagtctagaaagttgatttggtgtagtctaagagtattaaataccaccctcatcaactaacatatagttcatcttcttgattttaagattcatttgattgtcttcaaatgttcctttcgtggattaatctgatacctactcnnnnnnnnnnnnnnnnnnnnnnnntctggtctaatgcatacaaaagcaaatctgagacctctcactgttgatcctaaggaattcttttcttggcctttatcttacctggaatagttgaaacttttcttagataaataaaatctaagtctagaagtcaaaacgcttctatagatttagccattagaaaaaaaataccccagcatcttactaaagtaagt

SEQ ID NO: 108652 - DNA, 766 bp, Cannabis sativa
attgaagacataactattgatacagtggtgtcaactggtacaaatgacatgggtgaagaagaagaaccttagtgattattgtaatttttttttactttatcttaataattattgacaaatttcaactttttaattcaaaaaaattgagtatgatcctatgctattactcatttacttagttttttctacctcaaataaaataggttatatcatatataacatttaaaattttattataaatgtttgaaataaataccaattttatgtaatttttaaaataattataaactaaaaaacaatttatttaaaaaaaatatttaaaatcgtgttgtgttatagtaatacttttaaaatgccactaaatttattattttgtatcatttctacaaatgttattattaaaatattctagtgacatttttaaaatgatactatacataaatatttattatgttttaaaaaaaaaaaatatttacaaaataatgatattttttgtcaaataccactaaatatacttatagtcacattttttaaaaaatgtcacaaattaaaatgttatttattcttactaaactgaattttttaaccaaatgtcattaaattactattattgaaatatttattaaaaatgttactaaatgtcattaaaattaagttatactcacatttatttaaaatgttaataaaatttatttctagtaacattttaaaaacgttattaaaaattaagtttagaaattagaatacatttatttacatatttttt

SEQ ID NO: 108653 - DNA, 989 bp, Cannabis sativa
tttcttgatgaagctttagcatgaaaaaaattagtattttgatcaccacattgtaaccaatccactcttgatcgttgatgccaatattcctcttcatgggccaaaagttcatcaagaatcgcttcagattgctggagttgtgtcacaccagcttgtgttcgatcagcaatattattcaattgtgcaacagttttctgcagcttggagatgtcctttttcatctgcccgaatttgtgttggtgccatcgttgaagtgcatcagtacaagaagtgagattgagtgatatcacttgaagcaacaacaggccaattctcacggatcagtacaacagtttcctcctccttaagccacatcttctcaaaccgaaatcttgtttaccttactggtttttcctggtgtacattgagaggcagaatttccacaacaatagctctatgatccgaagaatagaagtccacatgagatgttgataatggttggaatttagtaatccagagatcattggtaaaacaccaatccaaacgctccttaatactttccacttgatgacgacctttaatccaagtaaaaggatctccattaaaaggaagctcatttaagttacagaattccaacacattacgaaactcctccatttgattttctcttctcaaacttcctccttgtttgttgctattgtacagaatttcgttaaagtcaccaataaccatccatggaagcattggagccacatctttaagtcttttaagaagcgtccatgagtgaattcagttatgagttgcaggagctccatagaaagcagtgaagtgacatattggtccattcgagaaacccatatagcaatcaaaaacatttatattgaaattgttcaaagtgacaacaacatcatcattcctgtaacgccctaaataattaggcacgctacttaagatacttacgaaatcctaatcccctaattgggattactaataagattagcgcataaatt

SEQ ID NO: 108654 - DNA, 674 bp, Cannabis sativa
  modified_base (489)..(490): a, c, t, g, unknown or other
  modified_base (626)..(634): a, c, t, g, unknown or other
cccgtactcgtgcccaagccaaacaagaaatggcgagtctgtattgatttcatagacctcaacaaagcatgccctaaatactgttttccactaccacgaatcgatcagctcgtagacgcaacagtagggcacaaaattttaagcttcatggacacttattcaggctacaatcaaatcaaaatgcatctgccagaccaagaacatacaagtttccaaatagatatgggtctctattgttacaaagtcatgccgtttggtctaaaaaacgctagagctacgtaccaaagattggtgaacaagatgtttaaagaccagatcgggcgaaatatggaagtgtacgtggatgacatgctcatcaaatccaaaaaggctggggggcacatagacgacctggatgaatgcttcaaagtcctcggaaagtacaaaatgaaactaaatccattaaaattctcctttggagtcagttcgggaaagtttctaggcttcatnntcaatgcccgaggaattgaagccaacccaaaaaaaattcaagccctcctagatatgaactcgccaacaaaaaccaaagaagtgccaagtttaactcaacggatcgcagcactcagcagattcgtgtcaaaatcaannnnnnnnngtgttccattcttcaacatcctgccaggaaacaaaaagtt

SEQ ID NO: 108655 - DNA, 525 bp, Cannabis sativa
aacacagacttggacctagatacggatctgaataggaagctggactcggaccaagacccacactgggatcgaaatggtggacctagatctggacccacacccacacttgtacccgcactcgggaccccaacttggacctgtacccgaacctagaccaagatcagggtccagaccaggacacagactcggacccgaagtcaaacccacaactagaattagacccaaagctagacccggacatcgatccaaaactcgaacccagaacaggatcagaaccaaggacttagacaaagaacttaatccagactcagatcgagattggaacttgggactcgaacccaacctagaacaagagcctggacgcgaacccacaccgggagcctgatctggacctagactgaaatccggacacaaacccaaacacagaccagaactccaactccgacccgaactcaaacccaaactcgaacacagaatcacaaatggaactagaaccgaactaggactaggatcaggaccaggacc

SEQ ID NO: 108656 - DNA, 594 bp, Cannabis sativa
aaatgaataaagatagtatttcaaaattcaattgagtccaaaaaatcagtatgttataatttaccatacaatgcgtacaaaaggtttggtcaaacccaaaacaccaaatagataagcaatatatttgtaaaagacaagtgaccaagagtcatatgtttgctcagtcacttggggggcacctatacctgcacaaagcatttggtaaaaataaaacaagcacaattacttgacaattataaacagagaatgaaattcataaaggatgacaaaagcacgtaataccgggattaaaagctgctcggtcagccgtttgtccaaaaaatgaaaaataattccaagtttaaagaccccttggccggtcatgatgtcttagaaaaggccctgaggccgaataagatatatatatatataaaaaggagataaaaagagaagtgcttaaacagctagagtcccaggctcttggttcggttcttctgggccaactagagcaggagaatctgttgtttgagcgggaagagcatcaacagtctgaccggaggttgaagcagccgcctcagttccaccataagccacttgggccgcgcagtactcaag

SEQ ID NO: 108657 - DNA, 505 bp, Cannabis sativa
gtttgaccgtcttgccaagcttgctgtgggaatcgtgccaactgaatttagtaagaaagaaacgtatttggccggtttaaatgtgaagattaggcatgatctcgtgatcaccaccaatgaagcaaccacatatgctgaaatggttgagaaagccctacgggctgagggtgttgtgaaattcctttaggagcctcgagtgactccgagtgttggtggaacccccacttttcctactcctatttatggtagggatggtggtgactccaccactgataagaagaggaaagttaccccatcacatggtggttcggggcaaagcaagcggttccgtgggaaccaaggcagaggtggccaataaggctactcttaccctgagtgcccttgttgcaagaaacatcatccccgagagtgcaaccggaagatatgctttctgtgtggcatggtggggcatttcaagaaagattgccctcaggaaaagaaagaagaaccgaaagcagaggcaaaa

SEQ ID NO: 108658 - DNA, 791 bp, Cannabis sativa
  modified_base (138)..(140): a, c, t, g, unknown or other
  modified_base (352)..(363): a, c, t, g, unknown or other
  modified_base (477)..(479): a, c, t, g, unknown or other
  modified_base (512)..(512): a, c, t, g, unknown or other
atatatatagaaaaatatcacttttaaacttataatttataaataattaaatatgtaacaaaataacaaattttgaatttaaaaatattatggtaagtatacaaataaaatatccaaaacatacacaaatgaatgaannntacttctatttctttattgatgtttaataaaatggattacattgaattggagttttattcaggacataaatcccgacactagatttactaacaagtatgtttgattaaaaccctaatatgaattctaaaacaatgaaaataaatacatataaagtttagaaaaccttacagtgggtgcagcggaataatgtgactccttccattcagatctnnnnnnnnnnnntcctttctgtagcagagaataatcaagatctgaatctggatcttcttttgtccttctttgatgcagattttccatagtcttacatactatcattgaggtaccacttgatgtgtnnnggcactactcattcactcaaaggaattcgaaanttagagagaagaaaagagagaggggcgtgtggcattttctgaaagaaactaaatgatcaaagttgtgtgtaagttgttcttttcctgaagccaacactttctatttatagaataccctctaggtttaggttagaattgtatggcattaaaataatagaaactataactcaaaaaaataaaataatagaaactacaaatggtaaagtcttgcaatgtggccggccatacaaaggaattgggcctcactttgcaactttcctattttgttattttccattc

SEQ ID NO: 108659 - DNA, 682 bp, Cannabis sativa
tactttttgtgctaaatataacacaatttttacatttcccattagagatggtcttatgtggcaaaaaataaaatgagaatatctactattatttggatcatttgctataatttctccttattttatataaaataaaagagaatatatgattttttttttttgaagaataatggtaaactttattagaatgaactttcaactattacaatagataaaagatcagcatgagcattactctcactgaaatacgatctgaatacaaacaagaggtacgagcaagacagtgtgcagctttgtttacagaacgtttaacaaaattaatcatgactaaaggtaaggaagccaacaatgtacgacaagcagacacatgttggccaaaaggagatggaatgatgaccgaacctcggattgcttgaacaacaaccaaagaatctgtctcaacttcaacccgaccccattggtgtctctttatccaactcagagcctccttaacccccaaaacttcagctatggccgggtccacggacccctcgaagaggatcgtgaaggcttcaatgaaccgaccatcatggtctcgagccacagcagccgctccaaactttctgtcatttgcaaagattgcgccatcaacatttaccttaatctttcccataaccggtttcacccaatgctccaagtctat

SEQ ID NO: 108660 - DNA, 634 bp, Cannabis sativa
gatgggcaatcagagagaactattaagatcactagaggatttactgcgatcctgtgtcatggactttgagggttcatagaacaagtgcttgcctttaattgaattctcctacaacaacaactacctaagtacgatagggatggcttcttatgagatgttgtatggtagaaaatgttttccccaattcatagggacaaaactggagaaaggaagtacttgggtccagaattagttcagaaaacaaatgaagctatagataagatcaaggctcggatgcttgcttctcaaagtaggcagaaaagttatgctgatccgaagcacagagatgttacatttcaggcgggggaacatgtgtttctatgagtttctctagtcaagggtattagacacttcaggaagagaggaaatttaagccctaggttcattgggccatttcaaatactcgaaaaggtcaggcaggtagcgtatcggctagccttaccaccagcattatcggctatccataatgtatttcatatttcaatgttgaggaaatatatttcacatctgactcatgtcttgagttacgaagcccttgaactacagtcagacttgtcctacaaagaacaggcagttcagattcttgatagaaagg

SEQ ID NO: 108661 - DNA, 706 bp, Cannabis sativa
atatgaggttggatggttttttgcaagtaaattgatagttggaggggttatgccacaaattactcttcaaaaaaataaacatgtaaattaataaattatcaatgatataatagggatttttggagatagaaaaaaaaatacaaagaataagaagaataaacgtatatatagggccaatttggcatgttgaaaaaagtagttgtagtatgttgtgagtaaaaacagttgtaacagaactgttaaaaaaaacagctaagttaagtatttggtaaattataaattctaaagtgttatgagttgttaagattctattataataaagataatattgtaatctagttcattataatcacaaatatataaaaattatgttaaataaaattttattttttatatatttttaattatttttttcctatagtataaatttatatgcatttgatataaataatttaaaatattattaaattatttttttatcacttttttttttgaaaaaaaaatatagtttataaaatcattctaggttgatgtggttttttaataataaaaatataaatataaaatatttcttaaaacaaagtaaaaaataagaaattttaatattattgttatactcaaaatttgactgcactttagaagtcgacacgtgtcctgcagtggaatatgaaccacctgatataataaagttatatcattaaatgca

SEQ ID NO: 108662 - DNA, 533 bp, Cannabis sativa
ttatgctaatttataataaccaatgaatacttttatatataaattataatatatatatatatactaggttaatattacgtatatttaaggtctgtttggcacaactgtattataagaaaaaatagttgtagttgtgttgtaaaaacaaaacagctagcagaattgtcgaagaaatatttaagttgaatgtttgataaattataaatgacaaagtgttgtaagttgttaatattctattataataatgataatgttataatctaatttattatatttataagggttaatactattttggaccctgtgttttacaaaagttactaattagaccttgtgttttatcaaatgacaaaatggacactgtattttctaaaatggtaaaaataggaccttgaacttaatttttgataatttttatttttaatataaccaacttgaagacaattcctaatacgaacatatatagaaaatgtaagcaatttagtcatagtacttttagatcggattataattaaatttattttgataaaaaa

SEQ ID NO: 108663 - DNA, 540 bp, Cannabis sativa
cccttcgagaaacttgagttctgacttttctttgaacattcacattctttaatctgttgagaactcttggttggcatatttgcttgtttattgttcgatattctaaccaaacactcatcttgtgtgttgtcttttgtagatgaactcaggtgcgtcttgggagaacagacattggatcgattaggatctacttcaacttctacacgaggatcatcctcgtcttcgttctagcccaccttcctctagtgaaggacattctctaaatcatgtacccagccataaaatgatagctcgtacaaagaaaaccacatgtctggctaacgcatctgaccctcaagttgctcggcacgccactttgcccagcaccgaataggatccagccgtccagatggagggggatacatgttcactgggcaagaggtcgaaaaacagttgagctaagactataccctaaatatattatctaagaattatacattcagagatactgttgtaagagctaaaagaaaaagattctttctctttgatcttaagtcaata

SEQ ID NO: 108664 - DNA, 597 bp, Cannabis sativa
atgtgaagtggtaatcttcaagtcctgactaattgtggcattcagtcctctcacatatttctgtttctttgtgaaatctgtgggtaccagatcaccagcaaactttgacagcccatcaaactccagagtgtactcggtcgctgacattttcccctgactaagcttcacaaagtcttccacatgtgaagttctcatagcaatgttgtaaaacttttcttcaaacagatttttaaattcctcccaggtcattacactgccatcccgggtttgacccacaatatcccaccagacgcgggcatgatcttgtaacatgaaggctgcacaattcactctctcagttcccgtcacccccatattgtcaaggatacgggtaatagtgctcatccactgctcggcctttattatatcagtacctcccagaaacgtcagaggttgcagcttcacaaaccgctaaaatacagaatctcgatgcggcattacataccctggttacccaccactggcacaggttctggtggtaacacttgatcaataggggcagccagttgccttaatctatgcaactcttcttcctgatgaagtatgatacctcgcatt

SEQ ID NO: 108665 - DNA, 858 bp, Cannabis sativa
tgaagctttctactcagcttgggttgcaaatcccgtactcgtacccaagccaaacaaaaaatggcgagtgtgtattgatttcatggactgtttccacttctaggaatcaatcagctcgtgattgcaacaacagggcatgaaatattaagcttcacggatgcttactcggggtacaatcatatcaaaatgcatctaccaaaccaagaacatacaagtttacaaacaaatatgagtctatattgctacagagtaatgtcgtttggtctaaaaaatgctggagcaacataccaaagattggtaagaaaaatgtttaaagaccagatcgggcgaaacatggaagtgtatgtcgatgacatgctcgtcaaatcgaggaaggctagggggcacatagatgacctggacaaatgctttaaagtcctcaagaagtacaacatgaaactaaatcccgtaaagtgctcctttggagtcatcgtaggacagtttctaggcttcattgtcaatgctcgaggaatcaaagccaatccagagaagattcaagccctcctggatatgaagtcgccaacaagaaccaaggaagtgcaaagtttgacttgtcggatcgccgctatcggtagatttgtttcaaaatcaacagacaagtgtgtcccattcttcaacatcctgctagaaaataagcaattcgagtggacagaggaatgcaaaaaagcttttcaagagctaaaaatgcaactcacaaagcctctcgtacttttaaaacctctagacaaagaaaaatatgggatatacttagctgtcatggagcacgctgtgagtgccgtgctgatcagagaagaaaacaacatacaacacccagtctat

SEQ ID NO: 108666 - DNA, 780 bp, Cannabis sativa
ctgaatcccatttgaagcataaccgcccgtagataaccccattctactcgatcataggctttgctcatgtcaagcttaagtgccatatagcctttctttccttgaactttatgtttcaagtaatgcataacttcaaaagctatcattatattatcaaaaataaggcgtccgggaataaaggcactttgagtaggggagattacctgatcaagtagaggtttcattctgttggcaagcaccttggcagtaattttgtatgcaacattacacaaagcaataggacggagatcacccatggtaactggagtctttcttttaggaatgagaaccaagctggtgtcattgaggctttcggggaaagagcttgtttcaaagaaatctctcacaagagaaataacatctgaacccacaatatgccagtgtttctgaaagaaaccaggtcccatgccatcaggccccggtgctttatcaggatgcatttggaggagagcaagtcgaacctcatcatcactgatcggttgcaaaagcatatcattgtgtaaatcagtgataaagcaccttataccagctgtgacataatcaaagttaggatttctagcagtaaagatatcttgaaaatactgaacaataatatcttgcaaaccattatcccaagtagcccatgacccgtcagctctttgtaattgatgaatgttattggctcttttccttgaactagccatagcatgaaagaacttagaatttttatcaccactattaagccagaattgctttgatcgc

SEQ ID NO: 108667 - DNA, 631 bp, Cannabis sativa
ttttttttttttttcaagttctttgcaaatatgcattgaatgtatctacacaatatatttatttttcacaaaataacacaaaattttccattacaattccccaatcttatgatccacggtatagttaaggacaatggaaaatgctaatgataattaatttgatgtaattatatttacaaaataacaataataataaataaggatatcattaaagacgtctactgttttttttttttatcaaaagaatagttaaaaaaatagtcaaagttcataacataaaatcaacttaatctgttttaatcaattttgaataattttttattttgtaatctagtaaaatttttagtggaagaaaccaaattttttgaaaaaactaactaaaataatatcttatgatagcacgtctctaggggatacgaatttctctaactacaaatttgataattttctttttcctaatagacatagataatgatatgagacaaatctagatagtttccttaattaccacaataaatagtgttgtgttagacaacaacctcagccagcaaacaaacaataatcaacacaccagaaatgaattaatgagttgcagaaaatataataacagaatttaaagaacacaatcaag

SEQ ID NO: 108668 - DNA, 597 bp, Cannabis sativa
cttcaagagagtatgtcaaacaaattctatccatgacaagtcaatcattccaccatccaaatagaacacaagtgatatgcgtcaaaaataaatgttttacatctacatgaacagccttctaatacacattcaccttacttcaaacagttatgagtcaagcacacagttaagattttaatccattgcacaagtgaataatagtaagtcaatcaatcttccaacttagctatcaacacatgacactaaaaaaaactaactaactaaaacaaaacgaaaagactaaaataaactgaaaaaaaaaaaattaagtctctccccccaaactaaagatgcacattgtccccaatgtgtgaaaataaaccaagatgagagaaacttacctgagcccccttagaaggggtttggcggaggtggctgatcataggggttgaagtggcgtggcatggcaaaatagttgggatcgtccacaccaacattcattctcgtgactagcatgttcaattgggccacctgctgctcatcgaaaacactccgttgggccatgtaattctgcatgtgcatgttttgctgaatcagataattcagctgatcatgagt

SEQ ID NO: 108669 - DNA, 535 bp, Cannabis sativa
  modified_base (263)..(273): a, c, t, g, unknown or other
tggagtatgactggcgtattgagtataggctaacattatggtcaatagtattgtcgtatgaacgttctagactcagtactgtgtgggacacgaggatatggttgtgtatatgggcgcttgattatagcatgagatattattacattttatgttatgcttttcttactgagtctttcaattcacagtgctattttctatgtgtaggtaagggcaaggctaaggttgaggagtcgtgagagtgagcagatgaagattgtacatgnnnnnnnnnnnaggcctggagcgtatgatctttgggacatcagggcttttgctgtatagtcgttaggcgataaagttttgtatatgaatagttaaaattttgtaaatgtttctgtaaatgggatcttagaattttataagtatattactttatgtttttaattaaataagaaaattttaattaatcacgattttcgataaccttgttgattaacaacgagctgcacagtacgttaaaaatcacaccaacacgcttaagttagttagggtgtta

SEQ ID NO: 108670 - DNA, 511 bp, Cannabis sativa
  modified_base (452)..(461): a, c, t, g, unknown or other
taaaataatttccaacagtaccaactgaagcattccatgtctatccaaacttgaaccatctcgttcatcaactcttgacaattgttgtgactaacaagaattttactgcctctgtaatacttccacacacatgccaacaagcttccttttcaataaaagtgccacttgcgccttacgatgtcactcaggaaaacttggcctagtgtaccaagcatacagtatggactacccaatcaaccttgtactacgccaacgggtttcaaatattttattgtgcctctctacaattgcacgtggtagttgtctttctagcatccctgaacttaattcaaaccaaccatcactttctcctctcaaggatgtccagtattcccacgaagaaaagcaacctagtctcaatttcatctcactctactgatccactttaggaatctaactgttgggttttatgnnnnnnnnnnaactccatttcaatgtaatctattttattcaacatcaataaagaaacaga

SEQ ID NO: 108671 - DNA, 1004 bp, Cannabis sativa
  modified_base (678)..(682): a, c, t, g, unknown or other
aattatattctaaaaattattctaatttaagttgatctaaaattaacgaatttctgactaaaatacaattttcaatttaattaatttattatagaaactaataatttagcatcttgattaaaatcaacttaattgttaattctaatataatatctaagaaaaatattttaatttaagttggtctaaaataaattaattttcaacttaaatatactttctaattaattaaatttcttgaaatagaaataaataattaagtatctttaataaaatcaacttaattattaattctagtttaagttctaagaaaaataatataatttaagttggtctaaaattaattaacagattaattttcatcttaaatatatttttctacttaatcaaatattaaaaaatataaattagttactaaaaatcactatctagaatcttttctttaaactaagtgtgttttttaaattaattttaaaatagtccaataaaaaactaatttcatttatttcaaatataattatgttactaattcaattttaataaggttaagctagtataattagcctgatataattatttaaataaggcaaatgagctttcacaattggggttgttcatgtgagggaggactgggtccaattgtcgtacccactactaatgggcccctaactctcacacaannnnnaaaggagagaaatttaacctttcattaaataattgttattaattgaataaggtcaatactaactaggcctaaataaaactatcataggtaatattttattttagcaacctagtttatttaaatatctaaaaataaatgggcttactatatgcatcaaagcccaaaagcaaacatataggctcacacatgtcaaactgatttggatgggccctatcatgtttcttggtttatcacagaggaaagaaatacaaaatttacctattacaaattatttataagatctattgacaattggactatgattaaaataatatcattggat

SEQ ID NO: 108672 - DNA, 508 bp, Cannabis sativa
gaagctcaactcagaaattgcaatttatttccaaaatagaaaactttattataaaatcttccaaaaatagaggaattgtttgcaacaatatgaaaaaaaataggtaataaaatcgcaaactaataattgaaatccaaacttttttgaaacttaaacaattaattcaaaaataaataaaataaacgaacttcatctttatcttggacgaattccacctttttgtccaactttctgattcaactcgctaagatagcatccgagttcaagaaacttgggctgtaataagaagaaaaacaaataaacatggttagtaggtccagaattaataatccaaatggacaataattcactaaaactcatcagtttataggaaaagaaataccttgtttctttgcaagaagtataggacattgggatttccagtgtccttttccattgcaatagaaacactttccttttgatgtatcactaggagtagcatgttaactcaaacttttagatctccttg

SEQ ID NO: 108673 - DNA, 802 bp, Cannabis sativa
cagatattactccttctaatgttctatcatcttctactcaagtagaggataatcccacttcctcggttgaacctttgcaagttgatacaatcgagaattctgccaccaatgttcctgttcagaagatcacggctcctcgtcgtagtgggaggatttccacaaaaccatctcattatggcttggatggtgaaatcaataaggtctttggtgacggtattgatgacgatccattaacctataaacaggcaatgaaaagtccagaacataagcaatggttagccggcatggatttagaaatagattccatggaaaagaacaaagtctgggaatatgtagaagcacctgatcattatcgtccaattggatgtaagtgggtcttcaagaagaaaagaggtgctggaggcgaagtcgaaaactttcaaagctagactggttgctaagggttataccaaaagagaaggtgtcgactatgaggaaacttttagtccgttcaccatgctcaaatccatcagaattgttctctccatagccgccgctttcgattatgaaatatggcaaacagatgtcaagacaactttccttaatgtaattcttgaagaaacaatctatatggagcaaccagaaggctatgttcttctagggcaggaaaagaaagtttgcaaactcaataggtccatttatggacttaagcaagcttctcactcttggaataaaaggtttgatgaaattatcaagacctatgggtttcaccaaaacgatgatgaccttgtgcttaccaactcaaggataatcaagtggtagt

SEQ ID NO: 108674 - DNA, 532 bp, Cannabis sativa
gtgattagcctgttagataagaaagcactttgagactctgagataacaaatggaagaacctctttaaaccgaagaaccaacacctttgaaatcaatttgtaaatgacattgcacaagcttattggcctataatcccccataccagtaggagtacttatttttggaataagggtgatgatggatttattcagcatatccatttcattgccattattaagtattcccaagaccacatcagtgactgaagaaccaactatatcccaatagttttgatagaacatagccgacataccatcactaccagggctcttgtctggactcatcatctttaaggcagcagtaatctcggctggtgtgaaaggctgagtcaaggtgtcattcattgcagcagtaaccgtttgtgggatagtgtttattgtgtgattaagagcagtcgaatcaagaggctgagcagtgaagagctcctggaaataatctgaaattattgctgtcattccttgcttcgaataatctattacaccagcagcatttt

SEQ ID NO: 108675 - DNA, 592 bp, Cannabis sativa
gtacacgtagacattccaacctggcagttaacacctaaaaatggatggaaaaggctaagtgctaacagaacttgggtttagggggttttgccgccaaaattttagaattggaggttagttgcaaaaacctagacacttaaggaaagtatgccgcaaatttctttaaattatatacaataatataacttaaaaaataactatttgattataagatgtttataaataaattttaaaggtaatcaaattgtatctaaaattatatgatataaaaataattttttttatgtaaaagtaacaaataattttttatcggcactataagtaaccaaattgttacttttgaaaatacaagaaaattaaaaaaaaatcgtgatgaagaagctgattatattgcaaatgttagttgattgatattatttatagtttattgttagaaaagatggaatagtaataaccacaatatttgttttacataaaagtaactaattagtttattatcaatattataagtaaacaaaaaattacttttgaaacacaagaaaaaaaaaatcatacagcagaacagagcaatttttggatcaatttttttaaa

SEQ ID NO: 108676 - DNA, 553 bp, Cannabis sativa
  modified_base (496)..(515): a, c, t, g, unknown or other
aaaactatttatttaataaatataattaattatcaaataaaattgtcatttatattatttattaattagaccataaaaagtctcttaattaagaaattcaccccaaaacctattttcttcacaattaagccattgcttattagtgaaaattcataaataagacattgtccaattttagaattataattgattaattaaaatcacttaactgagtctgcaagcagtattatctcaactagtgagaggacgataggcgtatataatcgagattctaataagtagatctagattttacaaagtaaattccctaacttatcaattcctccttgcgccactatagattcggaattgcaatcttaattatatagaacgttgtataggtaccaagatatagatatgttatgattatccattgttacaatcctaatagtcgaagatcctctatagattatctgtatccaatagggataaatttaccgttttacccttcaatgtnnnnnnnnnnnnnnnnnnnnagctacctataaatgatatttcaaaaaactaatataat

SEQ ID NO: 108677 - DNA, 906 bp, Cannabis sativa
  modified_base (312)..(315): a, c, t, g, unknown or other
acggtcgtgtacccagaccggaattgagacccgaacctggacctaaatttcggatccgatcccaaacagagacttggacctagataaggatcgggatacaaacttggactcggaccaagaccaagactgggatcgaaatgctgggcctagatctgcactgagatcttgacccagaccaaaacatggaccagcactcgggacctaaacttggagctggacctaaacctagacgcagatccaggtccagacctagacacaaacccggacaaagactcggacccgaactcagacccacacctagaatcagacccnnnnctagacccggacccggacccaaactcgaactaagacaaggatcagaaccaaggacttagacccgaaccctgacaaggacccgaacccacacccggacctgaacctagtaccaaacccaaaagtggactcgaacgcgtatcttgtgacccaaaattggaaccaaaactgaaacttgaccgggatttgaactaggacatggacttggaatcataacgaaaattggaccaagatccaaaaccgtaaccggactaggactcgggctccaaatcagacctagacccgaattgggagccggacctggatccaaaccaaaaccaggactcgggacctgaacccgaacctgaactcaaacccaaacatggaacaagactagggacacagaaccagggtctggacctagaactgcacccagtctcgatcccgaacacaaactcagaaatgagacctgggacctgaaccagaacaagaccgacacccatgacagtgatacagatcttgactaaagattcgtgtaacggggcctagaacagaccagtagtcggtgtctagatcttggaatcagacaaggaccagaacccagacgaagaacca

SEQ ID NO: 108678 - DNA, 552 bp, Cannabis sativa
tagtttgtattataatatttacaaaggatttggggtcaacaccaatctccaatccggacctgggacccagaccccaacctcgaccaggatcccaaacctggatcccaaccccgaacccggacatgggacccatacccggacctggacctaaactcggatcccaaacctagaccctgaccccgacccggaccctgaccccgaccctgacctggaccccgaccctgacctggacccctaccccgacccaaacccgaacctagacctggacccggacccgaacccagaccccgaccctgactagagatcgggacccgaattaaataatactaatacaatacaatacaatatattaatacaagttaatatcaaacatagaattgtattaaataatactaatacaatacaatacggcccaaacgagcctaaagaagtatttttgtattttattttttaaaagttttggtctatattaagagttagtcccacattgttaatgtgtggaaataaattgtgatatataagatgaaatggctactcctcccattgccaatt

SEQ ID NO: 108679 - DNA, 518 bp, Cannabis sativa
  modified_base (388)..(395): a, c, t, g, unknown or other
attctgacaattagattttttattaaaaaatcagattctacaaataattctaccaaaaattggcttttgtttcaatgaaaaacgatttttgaatcaaaagttttgaagaaaacaagtttgattgcatacccctgcgagtgcggaagcatggaagtggccgaggacagaggctacaagcagcctcatttgaccgaggaagctcggcgctggcagcctgttcagacagggcatgtccgagaaaacttggtcagttttgtctgaatggccgagcgtgtccgagcggttccaaggaccgtgcgcgcgcgtgtgtgactcaaatcctgatattttcgttcaaattcaaaaaaatcatatctaattcataaaaaatccaaattaggttctgtannnnnnnnaatttattaattttttgtctaatttccaaaaaaaaaaataatccagatcgaaataaaaaatatttcagtaacatacatagcgatttctaaactatcattaaataagcacataaaccacatgaa

SEQ ID NO: 108680 - DNA, 568 bp, Cannabis sativa
gtagccatatgtgacaaaaatctttaaaagatcataatcagaaatcttaatgatctctaaaattttttgttttctaatttctgataagtgaacatttagtcttttattctccataaattccttataatctatttggctacataccgaaaaatttccttatatggttacttaaatatctatccaatattcttaatatgtatattaagtacaaatacatatatgcttgaacatatattagattccaatataaattaagaatcttttatatttcttgaattctaaggttgcttttaggacaatgaattagaaaacttattttctttagctacaagtctatcacctggtataacatctttcatgccaaaaactttaaatacttaattgatatatgtcttttgttataattcaagaatgtctcaagaatattcttaacatatcttgaattcttaatacaaaatgagtatatcattaatggcaagtaattttttaccaatataataccaagatcatattcttactcccactaaacctgtgatatacacaaaatcatcaaaagcttctatcttaa

SEQ ID NO: 108681 - DNA, 528 bp, Cannabis sativa
  modified_base (289)..(290): a, c, t, g, unknown or other
atttctaaatttgtatattattttattttgaagattgtcattctaatataagtgtattttttgttttggtgttgcaatattttttagtttcgctttgctctgaagacaactagttaataatgggaaggtgtcttttcaatgtgatgtggtgctgtttgaagacgttataactttattgtctaaatttttgggggccgtttttttccatgtggctcgggatgagatttctgcagtgcatggtttggcaaagtatgcccttcggttagacaatgagctatcctggttcgannggtgccgttgccgattgtggattgctgctttgataatcttgtgtgattttgatcaccgcgtcaaaataaaaattatgttgctaattcaattttaattaggttaaactagtttaattagcctaatacaattatttaaataataaggcaaatggaccttcagagttggggttgttcatgtgagggaggtctgggtactgtatgtcgtacccactactaatggcccctaactctcacacaa

SEQ ID NO: 108682 - DNA, 609 bp, Cannabis sativa
aatctgttaagtgcacaacaaaatcagttagataggcattttatatattaggtaagatatgttttgttgattttttttgttacttctatgtgatttttttttattttcataaaatattgtaaaaataaaaaaataaaaaataaaaactttgaacgtaaaaataaatttttttacaaaaaaataatattttatgtaattattcctattttaaatgggtatttttcaagaaaaaaaaaataaaatttatttttatatggtataaaaaaaggggaatcaccctatgcacggtattttttagtttattttttatttttacgtgatttattatgttagtttatttatatatattcatttttctagttttacgttaataattattgtacattttatttatacggttttttatctaagcatgcattttttattcttgttaattatctttcctttctacttttcacgcatatttattgggacaaagttttaatacatggatcaaattttgattaaatagaatatataatattttttttattgatcattttttaaataattaaaaaaatagactaactaatttatgagataaactgtaacaatcataaaaactaaaaa

SEQ ID NO: 108683 - DNA, 594 bp, Cannabis sativa
cctcttggaaacatgatcaaaattgaaattagaaaattgaccaaaattaaaactagacaagactaaaacaatcaaaaacatgtcacagtgacaagtagggatgttcattgagccacattcaatatttttaggcctatccagatccgatccaattatatattggatgttaaattttaccatctgatccgatataattaatttcagtcatccaatcgatccaacatccattagatgttagattggatcggttgttctatccatcgaatatattatatatatatttattggtttaatttgatttatccaatattttagatctagtatttttttgatcagatcgaatccatccaatattataggtccagtatgtattggattaaactggatccatccaatccaagaaaaaaaagagtaaaaatttaatgctattttttatatatacatatagattttacatataacaatataaaatctaattactcatccaaaataaataaaaatattaattaattcgattgaatgttggatgtattggatttttagacacacccatctaccatgtaatccgatccaattagatatttaaaaataaca

SEQ ID NO: 108684 - DNA, 504 bp, Cannabis sativa
  modified_base (27)..(31): a, c, t, g, unknown or other
tctggattacattgaaatagagttttnnnnngggcataaaacccaacagagtcgtctcaggagcagcaaggcaaaacggacacgttgcagatattggaacatgttttgtggaaagattaaaccgagttgggagactgttggtagaagctctccacagaaaattaagaacctttggagggagctgcaactgccataatagccgccagattccagagttatcttgaatatctctcctgggtttcattgattgaagcagagaatatgcactcctaacagtgaaaactcctggcgcatcatgtaaccagtaccacaaatcagtactcatatgactactgagcggaatcttccacaccaaagctcgatctctagcagtgagcagatcagctaatacttccccatcccattcaacccactcaactttcattaaagagtcgaccgactttcccacaagacctagatggacagattcaatgaaagggttcatctcatcaggaagccaaggct

SEQ ID NO: 108685 - DNA, 828 bp, Cannabis sativa
tatttaaattttaccctctctttctatatctttcatttctaccttttttttcagccactataccaattttgcccttatctcccttcctctccaactcgcccaaactcccattgaaacctaagcatctcaaaatcctctcagatttttgctattgctattgctttgagcagaggcggtgatcgatattttgtgggttttccaggaaatgagaattcgatattgagagtcttgttgttacgattgagaatttcgtttcgaaaatatatttttaatgtgaatttgtgctattcaaatatggttgaagcagaagattaatgggtctgagttaaaatggggttttttctttttgttcacttgtttttgctttgattgaccaggttagactttcgtaagactaaatatttcctttttctttctttttttgcctcatatttttctacctcagtgatctatttttctttcgtttatgagattatatgggtaagtttattttgttgtgaatgcctattttattgatgtgatattagaaattattatttcttatggtataaattattagttgataccaatttttatagtttattactaaaaatatatgttagtagatatcacttgaattaatatgattctctcagtttactggagtgcttttagattattattattaatttttatcacaattaatttttatcataatttatttgaatagagcacgaattattattattttagtggaattcataatgaaataaggtgcaagtgcgttcagttgctacggaggaattcgtaacttatagtaagggtatatttggtagttcattataaaat

SEQ ID NO: 108686 - DNA, 591 bp, Cannabis sativa
ccagcgctgggggcatagccaacctgtacgctacttgccctatcctctcaaggatttcaaaaggtccaatgaacctcaggctgagctttccttttttccaaaagtgtttaattcctttcatcggaaatattcgaagaaataccatgtctccgattttgaaatcaatatcccaacgctttggatcaacataactcttctgtcactctaagccgcgagcattcgcactctaatcttgtcaactgcctcacttgttctctgaacagcttcgggacccaagaactttctttcacccacttcatcccagtgaatgggcaattaatactttcttccatatataaaagttcataaggagccatctcgattgtttcctggtagttgttgttataagagaactcgatcaaagtaaggtactttacccatgatccctcaaagtcaagcacacatgctcgtagcatgtcttctagaatctatatcgtcctctcgaattgtccatccgtctgaggatgaaatgttgtgctgaactttaactgagtacccatagctcgatgcagactcttccaaaatcttgatgtaaactttgcatctctatcc

SEQ ID NO: 108687 - DNA, 548 bp, Cannabis sativa
agtggtgtgtaagcccataagtgtagtttgtggctggctgagatgttgtactccataggctgaagtaggttcattgaaggggccttcagttataatgggggcttggtgaaaccggtaaggaaaaaaagtaattttgtggtggtggaagaaacataagggttaagtatattaataaaaataagaacaatcataatgaaacgatgtaattacataaattttattattaattacttatatgtgagacttatacaaccacttgaggctagctcaagttcaagtggtcataggagggtgcgtgtgtgttggaggtcctgggttcgagtcccaggttatgtatgattgtaatatataaacgcttaaatcaaatatatatatatatgtgagacttatacgacttggaatagagatgggttgtttttgtcggtatttgtcagctttagataaatatatatttatggaggaggtttcaattgttacattaaatatgtaatcatcatagtttcatttttttagctattagattatcattgaatggttgtaattaattt

SEQ ID NO: 108688 - DNA, 846 bp, Cannabis sativa
attaaatctagactaatgaaaagggagacaatacctctggtagcctattaggggatcctcactctcttttcgtattttatcgaacatccaatccaataacttactaaagagttcatactacaatgttccaagcaagcctcaacactcaggaatagagtgggctattagattctattggatgagtataattttgtaatcacaatatattctcaactcatgagatactatgaagagataggatagatcacaaaactcaaaccacattgtagtgtgtgtggcatgtgaattgggggagagagagatagatgttaggatttataaaacactcaagaaatataaatatcacagatctaaacatatttctaaaagtgctttaatatagaaaaccttaaatcataaatctatagaacctttgctgaattaaagaagaagaagatgataaaagataagcggaagcatgaacctgaagttggagattgcaaagaaggttatgatcttccaagaatacactatttcttaaagtattttctctgatgtgaaaggagagaatacagaaaccctagtgtttcttggggaccactacctatttataggctcattatataatgaattttgagtatttataatttagcccctcaacaaattataaataaacttacagtatctacacattatttctataataatttaatacccttttgatacccataacataattggtcacttaattttgtatcacacttttataataccatatatatatattatacatatgtgcccacataggattttaatccaacaatctcccacttgggcaacatatgttaccttataaatgtataacct

SEQ ID NO: 108689 - DNA, 511 bp, Cannabis sativa
  modified_base (153)..(153): a, c, t, g, unknown or other
tgttactcaattgtcccatctatgaatgagtacatgtggtgaaaattgagggttaaaaccaaaaggtttctaatggaggttaagcttaacaaaactcacttaagcttaagaagtatctaaagaatggtgagatactaaaactccacctatatnggctagaggtggtgccgcctcttatgagaattaggactattctctttaaagagtccatgaattgaaattttgcacatgtctattaacggtgcaagaacaagacatgcagtctcaagtgagcattagcaaaggtatgtgtgttatcaccggtttgtactaaaggaatagtagttcaattctatggcaaccaaaattttatcaaattttgtggtaactacactaaggtaaaattcaagtcgaaagatattttacctaatgcacctaagtaagacttcttaaaattatatatttattcaatcaaagtgaaggaatgttatattttaatataatattttgattaattaaataaatgttacaa

SEQ ID NO: 108690 - DNA, 723 bp, Cannabis sativa
ttattccttttaggattaggatttataattgcgccaagaaaaaagcagccctaactgatttattttttaattaaatttgaaaaaaaaaagatattaattaatatacatatatctgacactaattttttttcttttttcttttttttttttgaaagcagacactattttagttaaaatcatacaaaataaacaaaaaatcttaaaaaaaaatcgaaaataactagatattgtcaattcattttcgttatttatttatatataaattaacaagcccctcgattgaaaaaaaaaaagagaaatttgttgaagatattgtttcttatatttaaatcaatatatatattttttcttatatttctttatgtgttttatttttgaacaacgtcttctctgattattttttatttttttaatgttttttttttaaagataacaagagaataaacagggtaaaaccaagttacaaagatttagttagaatttaaaacacaattgtttcaaagtaactcttcatcaattcctaatgcttgttgagcaaggctgtgagctgaaacatttaagcttttagggatgaaacagattgttacaccaagaaagtgtgataaagggaggagataattttccagactttattagaaaaggtcgaaagatccctatgcttcttgagaatcttggagatgagcacttgacagtctgaaacaacattttcaattaaaaatttga

SEQ ID NO: 108691 - DNA, 520 bp, Cannabis sativa
agggagcttgatgtactcaatggtctgtacaaggtcggatttagctcatgcaatgagcatgaccagtagatttgttgccaatctagggaatgctcactggactgctttgaagtgggtaatgagatatataaaaggaacactgaacatagggttaagctatgatggcactagcagatacaaggagttggtaactggttatgtggattcggattatgcagggtgtttagacactagaaaatcattaacatggtttgtttttactgtctatgggggctgtgttagttggaaatcaaacctacaaaaggttgttgctctatcttctacagaagcagaatatatggctgcaacagaggctattaaagaggcaatttggctcaagggattgacaagtgagcttggcatcaattcagattatgtaacagtgcactgtgacaatcaaagagcattacatctcatgaaaaatcccatgtttcatgagagaactaaacacattgacatcaaaatgcactttattagagat

SEQ ID NO: 108692 - DNA, 3299 bp, Cannabis sativa
ctgctctctaggtcctatttatataacatagaaaccctagagacagtcacaagatcgaatctacagctgtacaaaactttcctaagaaaaacacgatctggaacatcagaatcggaagttgacgcagccaatcagaccagaaaaagagaacttgctataatcgggttcgatcctcaattaagactggattcctgccataaatagattagatattctgattgtattaagatacaatcgaatttaatgaggataaggcatttaatcaaggtttcctttataaaccaactttccataagagaaaagattctcttacacgaagtttcctaaacaaaggaaagtccagctggaaaaagtatcttccctgtcatagaaaagatcaaccaaatctgaatatacaaggtaagacaaccggttataaatgcaaagatatcttaccattaaataaaaaatattttgtcaactaacttgccagaaaaggactttacaatagggagaaaaaaaacttcttgtgcatgggatcattttacacgacataaaattgatggtaaaactaaagcggtttgcaaccactgcgggcgtaagttggtgggagaaagttcttagagaactacgcatttaaatgctcacgtaaagaggtgtccagtcaaaatggtcgaacttgccgttaatcctgctacaagcccttcagttcatttcaattttgaccctgattttggaaggatcaaattggctaaaacgatcgttaagcatgaatattcattgtctatggttgagcatagcgggtttatagaatattcaagtactttgtgtcccatgtttcaaatattgtaaaggaatacagttaggtctgatatcatgaaaatatttaaaactgagaatgaaaaatgcaggcaatgtttagaaaaaagtaagaggagaatagccataaccagtgacatgtggactgcaaatcataagaagagggaatatatggctgtaatagctcattttactgatgattctttgaacttgcacaaccagattttaggttttaagtgtgttccatgtcctcacgatgctccagcactacttgaggcactaagatcttgtcttaatgaatggaaaatagaagacaagattagtacagtgactctctataactgtaatgcaaatgatgccatgattaatttttttaaaggataatttgagccagacaattttattttgaaggaaaagttgctacatgtgcgttgttgtgcacatattttgaatctaattgtcaaggatggcttattagtcattggtgatagtgttgacgaaattcgagataatattgcttattgctcgggcacaccaaaaagaaatgaaaaatttgaggacactgtttgtcaacttggagtaccatacaccaaaaaaaatatcacttgattttgtaataaggtggaattgtcctagaaaacatgtcgcctaaacctatgatagagggtttttcgttgatagtcaacgtatctcaagagttctaaggtttagctccatgcgacatgtcgcttggagccattttctgagagaagtgttgcaaaacgttgggaatttatgggggatgtttctttcatcaatcaccaatgttcctatctccattattgccatatttttcctggtaacaatcatggcatgtatgatatcaaatgtgaatccaaaacactatataaggaggtctaaggtgctcatttgtgtaaaacagttttttgtcaaaaaagcactttgctagaaaaccctaaggctctataattctcaaagttatttcctagagagttcccttagtgctagttaaaggtagggtaataaataagcttttggacaaatgtgttatactttgctcaagtcatggtaatcccgactaatgtacactcaaagttgtgagtgagtatatatatttaccttcttgttatgtatgtgttatataatatatttttatacatcttcttctatctttcttttatatatacaatatatatattatatatgttgtaatatctatttaattaatcttttatattattcatttattaaattttataatagcattataataaattttaattttcttttattgtaataaaatatctaccaattattctgttaatggggcaaatcataattagtacctttaagcctgattaatctagcccaccataaatggctcaataggaccatgcacctatgtaaaaggatctaaatttcactttgtaagccgaaaccgtaatgaaattcctaagagaaatttcatatattattattgtagtaattttagggggtatattgaaaaatacctcttttatttatcaattaatcaaatttacttttaattttatatttaattgaaacgtacatctttttatatgtactttacctaaaatatcctgatataagggagtcacatggagagtatattgaggtgataggggtaaaatcggtaaagtgtttaaaacaaaggtaaaaatgataagttttaaaaaagaggataagaataaaataagacagtataaaaagggtatagaatctaatttcctctattttaggacatcgtaaaaacaatgttgttatttctcctttttcatctcttaatctttataaataatcttctttttaggttgctgaaaatcttcatcaacaaatatcttttgagtcaatctataaatttattaatttccaaaactgattagttataatataacatatcaccaaagaaaaaaaaaaacttacaaattactctaaaattatatcaaatataggaacagattgtttaaaaattatttaagcttgcgtaattctgttactatgtttagttacattataaatgattgtaattcctgctatacgatatgtctaatattgctctttttttttgtgaaattaacgatcaggaaaaaaaaagtgacgcatatcattgctttgaatctcttgtttttatattatttttgagaatgatgtttatgctgaagtctcatctttatgtttgttagacgacattttaagttttattaaaattaataataatttttgagaaaaaaacatatttagttttctaaaaaatctttgaagataatcgtatattctgaaaaaattcgattttggtgcaacaatatcaaaactaaaatattctggaagtatcataaaatcttggtataattattagcaaaatggaataaatggtcatagtcagaatacgacttcgaattatgctttccaaaaatatgggtgaatggttacatacaaaaaattgtatcctatagtaaggtactaattggtaaaaattaata

SEQ ID NO: 108693 - DNA, 526 bp, Cannabis sativa
aaattaaaaaagccgcatgtgcgggttggtttaaaaaaataattaaaaaccgcaccacccgcaccgcgaacacccctaaatgtgattattagtttttcttacatatattgtgtgatttgttcttatttgttttacttacatattttagactgactatctgaaatgtgatttatgatcttaatatgaaatctgagaagttaatattagaaatgctctaataggacaaacataaattttgatgtaatacgggagtatttatatagcttatgtgatttttagattctgaatttaatgcaagttatatgttaatttacttcagagatacaagtatataatatataatttaggaccttaatgatctaagaagagttaggattaatttgataatttatcatcaccaaaaagtagagaattaataattaactttaacaaatagaaaactgaactaacatgattcatattcctaaacattcatccataattaattacactttttattgttattttcctacttttcaatttttag

SEQ ID NO: 108694 - DNA, 572 bp, Cannabis sativa
ttgggccaagcgatcccaggcctgatcttcgagtggaacaattatttgctgccaagaagaatacttgggaaccttgtaatcacaagtgttttctttatcagcgagaaggcccactgatggcaagttaactttgttcaaaaggaatttgcatgatcagagaccgtaaggaagagttatcaggcgcctgtgcctactaaccatcttgggggtaggagtaggtctcgtcagaagagttgtcagaattaacaaaacattagtcaagtacttaaaaaaaggaagactgatgtaaataaataagaagagaacaatcatttacgaagtttgcgaaacatggttgtgccaatgggggagagaccagatgtccagaagaagttgtccttgaaaggcagtttatttggcaagtctacaataatttttggctcgctagcgtgagtaccaagatagaaaaagcccactgcggcgttcttcctcgatggaacggccttaactgagtaaagatactcaatctctatgggtttgggacacccccaattcataattttgtacaagacttttaaactagcgagaatcct

SEQ ID NO: 108695 - DNA, 500 bp, Cannabis sativa
  modified_base (433)..(449): a, c, t, g, unknown or other
tatataataaaataatttattatattttttatttaataaataattaaaatagtaaaataaaaatacttgaataatataaaattgtttatgctaaatactaatttaatgtaaatattaatttttttaaaatatttatataaattttctagtaatttaaaaataatatacaattttattgttatactgtttttcttagaatcaatttaagtatctttgtttaattaataatattttaaattttgaaaacttatgtataataatttaaaattatacattttcactaattagtaattttaatgaatacatttttgattaaaaaaaatttataaataaatttgtgataattttttcatttaaattcttattaaatttagaaaatattaataaaatcaaaatttagaaaatgataaaaaaaatctcacctgcatgggannnnnnnnnnnnnnnnnctagatgagataaataatcccagacatataagattagctggattagttatc

SEQ ID NO: 108696 - DNA, 524 bp, Cannabis sativa
tagggctgaattatatggattaaaaagaattatatggaggctgagagtatcatgttctttttatagtgttacaaatatactctgatacttacgtaattaatgagttattctataaaaagctattgcatcgattcacatttcctttatcttgacacgtgtcctccagccaaattttgagtataacaattgtcccttaaaaagttcttttttagtaaaaagagcttttttgattctggcagttgtacagtttcgagagtcattatgaatcgtctcttcatattctgcacttctcccaatcgttggatttttcaatacttagctttcttgtcactggactttgtgtataaaaaggtggctcaagcttgtcatttttcataaacctctggctctttagtgagatccattttcagaatggatcctctctttcctgccaaaatgtcccttctgaattcaaaagtttgtcctcccaaactcataacatccagacacaccaacccatttccatttgtttccaaggacttcaa

SEQ ID NO: 108697 - DNA, 587 bp, Cannabis sativa
taaataaataaaataccagagaataaataaaaaaaatgagaaaattatacttatctatcaattgacatattttagaaaacatataataaaaccatgtaaagaattaattagtatatatgtatatttatgggtaaatgctattttggatcatgtgttttgcaaaaattacagattgaactttctattttgttaaatgacaaaatagatcatgtattttctaaaatggtaaaaataggactctgcgtttaattttcgacaactttcttttttaatataatcaacttaaagacaattcataatacgaatagatacagaaaatgtaaatagttttgtcataacacatttaaattggattaaaactaaattttattttgagaaaaaatcagttcatgatcctatttgtattattttacaaactacatagtctattatatcatttaacaaaacaaagagtctaactaataacttttacaaaatacagaatccaaaataatatttacattatatttatatattggaatgaatttgaacttgaaacctctattattaagagaatgtaatagtgtttcttagcatgtggggagaag

SEQ ID NO: 108698 - DNA, 903 bp, Cannabis sativa
tcttttctcgggggattctttctactttgtagtccgtgaactcgtggagcagttcccggactattgttacatatgcgaccattctttcaccgcgcatttgatactctcccgatatctggtttacgaccagttgggagtcgctgtagacttctactcttttggccccaacggcctttgctaatctcagccctgctatcaaggcttcgttgtttaaagctgagaagtcgaatcgtagggctgcttggaatcgaagtccggtcggggatatcatcgcaacccccgctccggatccgttttcattggaggctccgtccataaatactctccatgtggggaccgatggtattggcgcattcgcggttgcctcggcttcattacattcagtgatgaagtctgccaatgcttctccctttattgagatacggggtatgtagtgcaagtcgaattgacttaactccatcgcccatttgaggagccttccggacgcctctggcttttgcaggacttgccagagtgggtgattggttaacaccttgattggctgagcttggaagtatggccttaattttctttaggccattaggaggcagaaaactaatttttcgatgatggggtaccgtgtctccaccactatcatgcgcttgctaacgtagtatacgagatgttgagttttctcttcttcccggactaaggcagtgctgaccgtgtgctcggagacggccagatataggaacaggtcctctccatgaacgggttttgataggattggaggcttggccatgtgttctgtcaactttttgaatacctcttcgcactcgtcagaccattcaaacttttggcacttcttcaatatgttgaagaagggaatgcacttgtctgtagaccgagagataaaacggctca

SEQ ID NO: 108699 - DNA, 728 bp, Cannabis sativa
tttactaagatcaatatcggtcccagtccaatgtgtactccatacatccaaaactagcatactttaccaatgtcctagaaagaacataacaattatcaaaggtgtaaattcagtgcactgatgaatcaagggacattatcttttgaagcatataatcacaattacattccactgtgttgacctcactataattgtgaataactatatattttggacttaatagattttgtacatattaaaacataaacatgaaaactatatgtaaacataaatgacttctaatcttctattgataacaaattagattacattgaaatgtgttttatttagggcataaaatccccacagacatacccaagtagcgagtatggcaatcaaccagctttacacccataagagaaaccaaaaaatgaccctcgacctaatgtaattggcggcaaagacaaaggtcagacttttggagattactttcttgacccgacaagttagcctattgacctagaatttgttttagacagtgacattcttcttcatttgcattaatgaacacaaggctatcatctacataaaaaggtgagacaaggtcaagccattcgaatattaaaaagccaataaatacattaatttttgattgaaagtgtataattttttttattaaatatataaaataaaatataaaaaattattaaagacattattaaattgtaaaagagtaaataaaaagtaat

SEQ ID NO: 108700 - DNA, 1471 bp, Cannabis sativa
aacttttccaataccaactagcatgtatataaggagtgtagctccaccaatcctcttccttcaaatacacaatatgaacccacttcatccacaaactctccttgttattcgcgattgcccaaacatatttacacatagctgttttgttctattcttcaactcttttgatacctaaaccccctgttgattttggagtgcaaaccgtgtcccaattgattgctccaaccccctgaaacattgattgtcctttccaaagataagctctgcaaactgctttaatgcctgtaattattctctttggtaaaataagaatttgactccagtatgcttgaatcgccattaggacaaaatttatcaaactgttctccctgcaaaagacaagttcctcgaactccaactcctaattctggtagtcatcttctctatcagtatctcacattctcttcctgatattctctttgcattgataggtattcccaagtaagtaaaaggcaaattctgtcttgaaaaacttgaaagtttcagcaacctctctactacagtttgctccatgttactgcaatataatgctatttttgtaggacttggttgcaatcctgaggtgacagagaaaagcttaagagcttgcaacgggtacctgacacttctctcattccctttgttgaataatattacatcatctgcaaaagcaaggtggttcaatttgagctcaacacatctatcatgaaaacaaaagtcttccttgtccccaactttccccaccaatctagatagatactccattcctattacaaatagtaatggagatataggatccccttatcttaagcctctcttagattcaaagaaaccatggagagttccattgaacatcagagagaacctaggtgttgagatacattgaatgatcaatttgacaaatggaattagaaactgaagtccataaagcatctcctctataaattgccactctactgtatcatatgccttttgaatatccaacttaatcacacaccttggtttgttggatttcttaccataatgcctgatcaaatcttgacaaatcataatgttgtgccctataaatctacctttgatgaagtctccttgtgattgagagataatatcatgtaaaactaatttgattctagaactcaaaagcttagttgcaatcttataaatgacattgcaacaagcaataggtctaaaatctttaataatattaggacattttaccttgagcaccaatgtaatcagagttgagttgatttccttaagaatctcgccattaactacatatttaatacaataattatatatgcttcattttatagatataaatttctaataatttacagaataaatttttgttttttcttttcaaaattaaaaaacaaaagtggttatagaccatatttttatttttcaaaaataaaattttaaaaacaaaaaatttaggtggcgtttggta

SEQ ID NO: 108701 - DNA, 600 bp, Cannabis sativa
agtaagaaaagcataaacaataacatagcaataacccgaattataatcatgcgctcatacacctaaccataaccctaactgagtcaggaacgttcttgataaagtatgacttactgcgaatccagcctatactcagtactctagtcgtactgatgtggtagcagataacgcatactatctgatagcctagcatatatctgttggcatcttggtacaactctatgtacacctcatcgatgccctgatatgctaatctgatggctatagatttgcctattctgacggcaactaacatgtacgctaaacatgtataaacatatgcaactattatactaatcttacctcgttaccgaattcaggtgtgccggccaacctgagtagaacagctgctcgatgaattacatgcccctaaatcacattattcgcaaaactggtgagtgacacgctaaatcactttctggagacttaaatttgaaactaaaacttttccaatcgataaataataccctaaatatcgcaaaaaggggaaaactagggttcccaaaatgctccaaccgatagaccggttcgccaaccgaaattctggttcagtggggtttc

SEQ ID NO: 108702 - DNA, 2754 bp, Cannabis sativa
ttattatacaaaacataacttaaacaaatataaaactgatactaatatactagaaaatacaaacatatattataaaatataaatattaatagaaagatagttaatatacaaacacttagagtaatgtaaatatgtatttatttaactttttaatttaatttttatttatgcttattatatataatttatacttaatttaaatatattaataataaaataatatatatgaaaaaaatagattttaaataaaaattaaaagaacttatgttattaaacaaaatttttaaactgaaatttttttataggaaacccttatggcatcggttatttcaaataatatttttccccctctacgatatcgcttggaacaatttcggtagtaaattttactaaaatcgatattataaaccctagaaatctgcctctaaaaccctaaattatttggatgcatatgcacattctcttaaatttgttgctcctacaataagagccaatgtaatttaagatattttataatcataagtttctttcatatattgtttgtgtagaaattatattctagtttcaaatcacaataatttcattaacacaaagaatcagaagatagaagatggcattttatataatagttattaactcttgtttaattaaatgttaccaatgtggtactcctaataaaaattccagtttattcacataatttttgagtaaattgagatttaaaatcataaatatatgagtcaatgattcataagattataattagagttaaatttattagtcatttcaatagctttctttcttgccttattcaattagcctttaattataaaaggatatttcattttagtccagatcggatctgggttaaggcgaattagatccgcgtttagagtccacccaatttaaggatccaaaaaaatattttttctttaaaaatatacataatttttaaataaagtgccttgttacacaaattgtaaataattatgcaagtatacgtaattgcagttttaaactcagacaagtaaagttaatccacatggaattgttattgagtaccacttaattagatttatatttctatttaataaaatcgataaaaatattgaataattgaataattgaaaattgaaaattgaaaagcaaaaaaataacaataaaaagtataattaattatgaatgaatgattagaaatatgaatcatgttagtttagttttccaattgttaatattaattattaattctctcattttctggtgatgacagattatcaaatttactccaactcttctcagattattaaagtcctaagtcatatattatctatttgtatctctgaagtaaattaacatataacttccattaaaaatcacataagttatgtaaataatctcgtttcacatcaaaacttatgtttgttctattagagcattcctaatattaacttttcagatttcatattaggatcatgaatcatattaaagataaccagtctaaaatatctaattaaaacaaataagaacaaatcacacaatatatggacgaaaatttaataatcacattaactaaattaaagaaacatcactaacattcatcatattcctaattaagctctttaagctttgtaattaaatctattaatgggcacttattaaaaaaagccaaatcattaacaagaacaaagatctctctctctcaacatagtacaaccaccacaacaactcacgtttagcttcctctatctccacaccgagctcattcgagtttctgatcctgtttatcaccttcaaattaaaactcacaaagattgttcttcttttttcgtgaaatttcatcaatattgtaaacaatctcgggtgataataacatgcatttagttgacaaacacaaagttaatcctacttccttcaacttcctaatcatcttctcttcattttttgccttttcaaaattagcaaatccatacatattcatcataaccttaatcagagtccactcgcgacaaccatcatcattcttttcaacttttttttttcatatcaacaattctcaaagccttttccaatttcgttatcttcccatcacgaatttcagcctgtgtaattcagcaactcttaatttttcacatcacaagtaagaactcgcactacaagaaatgtcacttttgtcagcatatttttgtgctggcaaatgtttggtattgtgttggtaaaatgaaatttacttctaatgtgttggcaaatcaaagttggtattagaacttttgccagcacaaaatgaaaagcactggtaaaaataacttttcccaaattcagattttggccactacaaatgtgcgctagtaaaactttgacctttttgccagcgcagtagcaaactgtgttggtaaaattgatatttcttgtagtgttgtcattagttttcaccttccttagagggaggagattgcgaagttggtgttggaagagtttcgagttcgtgtagtaataatcttcatgagaatcttgtggatcaagtaacctagcgaagatcattatgtaatttaggtcatagaattcttgatttataatcttaatttttttattattatggttattattagggatattggtggctaaaccacctgaactttacggtttgtaacacttaaccacaaaaatcaaatttttagcggctaaactacttaaattctggttccgttttgcactgcacacctccgtccaaaaatcacagttaagtgccacggtgga

SEQ ID NO: 108703 - DNA, 1484 bp, Cannabis sativa
tcaatagttcaggtggaatttttaagggccaaaaaagttcagggacatgatttggtaaatgtcaaagttccgagggaaaaaatcctaattagtcccactaaaaacatatagtgtaaaataccgataaattaaattctaaaatattctttttggtaggaaatatatatattattattattatttatacatgatgctcaaagaatcaagctgaaatctcaatgaatgtgcatgaaaatatgtatattatatgatcaaattgaaagtataattgatatataatatacatattttataaacaaattaattaataatgaatagttattgacagagagtcaacttgcatatataatattaattaattgtatactgacaaattataatctttgcatgcattagtttgccatgattcatcgcatcctagctatgagagctatctcatcatcatggtccatcttctctacacatagaattaatttctcagtcttcttctctttgtttaatttttccatgcatcttaatgatttactgattaaaaaaaatatatacttcgttaatatttaagcatggacagtacataacaacttgcatatataatcaaactgagttagtagagtttcatgcattgtttcacattccaaacaataatctcttgtcttctcttctcccactcactcttttccattattcatctctaatttatatcatggactacctctttccatcaatcttattccttctcacattacttcttataatcatcccattgattatgaagacatcatcatcaaaaaccaatcatgataaagctattgtaacaagcaatgtttcctcaacaccaaagttaccaccagggccaatgaagctacctctcattggaaatctacacaaccttataggctcttctctccctcatcgccggttgagggatttggctaagcaatatggaccattgatgcaccttcaactcggtgaagttcctcacattgttgtttcttcacctgagattgcgaaagagatgatgaaaactcatgatgtcaaattttctgaaaggccttttctcctcattgctggtaagtattatggtattgatattgtttttgcacattacggtgattattggagacaaataaggaagatttgcttagaacagtttttaagccctagacgagtacaatcttttcgatccattcgagaagaagaagtgtttgatttcattcaatatgtgcattcaaaagaaggagagtctttcaatcttagtgtaaaaatattctcactcacatatagcatcactgcaagggcagcctttggtaagaaatgtaaagaccaaagagcctttatatcgactgttgaagaagttctaaagattgctgccggttttagtgtcaccgaagcattcccttcacaaaagtggttgcattggattagtcgctcggggcataatatggaaaagaaggtcaaaataatagaagcaactcttgataaca

SEQ ID NO: 108704 - DNA, 2055 bp, Cannabis sativa
ctcgaggtccttagtcaactcaactattttcctctcaacagtaaaaatcttcttgttgacttcacccagctccatccagacagctccaagttccaccctcacgtcatcagcatccttcctagccaagtccacctctgccctcatggtgttggacatggtagcatttttggaggcagcagatttagctcgggagtaggtgtaagcgaacttcagaccaacctacatagagaaaaaactttcaaatatgaaccaagtaaagaaggattaaaggaaactgtcaacaaatacttaccctggtgaattccctcaagactcctcccatcaacagctctagggaagactcgttgtcagcaccggccagctgcgcacttacctcaggaacgaaccggttcatgtaacgtgtcagcatctctttacctttcttggcctctggaagcactagcaaaggtggattaggagcccgcatttgctcagatccgctcttggccagcttgaatctaccctttgattgctctggcctgtttgagcttcctcctcgagaatctttggacttagcaacttttggagtaggaagatccgcaacagctagctccttgaaaaggtcaataacctccccgaccggtgccttttccttggaaggggtcgcctcactaaccctaaatttattggcaggaggagatgagcttgagcttcctccaactctcttcttcagaacatcaagcatcttctgagacatgtttgcacgaaacaaaaacaatatggttagaggaaaaacgcataagaatcataaagcatgatagtcaaaaagtttaaaaacaagacggaatatcctacgaaatgattgtccgagcaagattcaagactccatcatcacctgacaagtcccttatctccgccatggcagctttcccttttcctagtacgggagaagatggccgagcagatgaattgggctccctaattcgaatggcatgttcaacgggcctggcctgggctggaagtttcttcctcctttttagcggagtcacctgctcttcctcagcctcattttaaggattcaagggctcatgagcatactgtttggcccttgcacctcccttcaacttagcttcacgcttaagttgaatgagttcatccttctgatgagctctctcagcctgtccagcactagatttcctcttcctctccttcactggctcaggaatgaaatcctttggatagagctcgtacttcacaaagttgtcctcgaaggtcaactaactaaatgatatttcggtcatctctcggcagttgagcaagcttttgagctctatctctaagagcaagagtgaagggagggcggtgatacgtggggatctgatggaaacgagtatgggtggtgcccatgccttccaccatgaagtactcgtcagcaaaatgcccaatcttgctcacggccttatccccagtgcccgtcaaccacttgaagtcttgttcagagaaatagaattacaccgatctgccttgcttagggttggacttcaaatcaaaaaactagcttacctcatggggagaaggcatatcccatttctgggacgcatagagaacgaagagggcggagaaatacttaatgcccatggtagtaaattgggtcagacagaggcgaaggaagtctgccacattcctaaagtacgggtgcaaaggcaacaatggccctcgttgggcatgagtagccgaccaggcgcacatttccctttcagggtttgtggcgcgattattgtgggtgggaatgtaacagtccaattcgcccaggtagcaatccttgttgagatcccgcacgcgtgccttagtaacctttaacggcagactcacccacctcgcacccaaattaccttgccttctatgaggaaatccagcattaagttcctcactagcgtagtccacgtccttaactaggacgtcgccatcagcatcaactggctccttggccccattgaatcccccatagtttgggggtgcaacctcctcctcttccttcgcctcggagggactgctaggatggacatcgtcctgctc

SEQ ID NO: 108705 - DNA, 752 bp, Cannabis sativa
aagtagaagacattaatgacacactcatttgccttattcctaagatcccaaagccaacccgaatgtccgaatttagaccaataagtctatgtaatgtgatctataaaatcgtggcaaaatgccttgctggccgaatgaagaatagtatgcatcaagtaatttctgaggagcaaagtgcctttgtggggggtaggctcattcaagataatgcaatcattgggtttgaaagccttcattgcatgaagactaagaggtttggaaatggaagaaaaatggctttgaaattggatatgtccaaggcttacgatagagtggaatggaattttttacgaacaatgatgagaggattgggatatgaggaacaatggatcgacaaaatcatgaattgtgtggagagtgtctccttctcggtcctcatcaatggggagaaaattggtaaattccatcctaaacggggccttcgccaaggtgactcgctatccccatacctatttcttctttgttcggaaggtctttcttgccttattcatgaagccgaaagggctagaagcattaatggagttcaattcgggagagatagaatcaaggtttcacatttattctttgccgatgatagttttgtttttcttaatgcaaaagataatgaatgcgatactatgaagcggatccttcagcaatattcaacactctcgggtcaacaaataaacctcgagaaatctgaagttagtatgggtaagaggatctccaccgtt

SEQ ID NO: 108706 - DNA, 1664 bp, Cannabis sativa
  modified_base (113)..(126): a, c, t, g, unknown or other
agtctaaatgcagtgaactaacaaatcatggaaattaaacttttgaacatagtcataaatatattctactgtgctaacgacactataatcatgaacaaatatatacatatttnnnnnnnnnnnnnncttaatagaatttatacatcaaatgtaatcatgaaataaatcatgtgaaccaagaaacataaaagcgatttcttacctttgttaattagtaaatctgattatattgaaattggttttatttagggcacaaaacccagcagtatggacggccaagatcttggcacaagctggccgaccaaaaggtgactttcagactaagggagcttctcttcaaccaagggaacctaacctttacaaggaaaaggtgtacaaagttggcatccacttgccaaaggctggcttccacatccaaaggttggcctcctcttggtaaagttgacaagaacatgacctgccagaccctagcaggaacatgacctgccagaccctagcaggaacatctcttgccagggtctggcaggtttggctggccaagagaagcctataggccgaccatggtgagcttatatggctggccaggatttgggcacaagctggccagctaaaaggggactttcaagctaagggggcttccattcgaccaagggaacctaacctctacaaggaaaagctgtacaaagctggcctccagtggccaaaggctggcctccatattcaaaggctagcctcctcttggtaaagtttacatgaacatgacctaccagaccctggcaagaacatgacctgccctactctggcaagaacatgacctgccagaccctagcaagaacatgacatgccagaccctggcaggagcatggccgctagaccttagactatctccaatgctagatgtaaaatttgtgctaaatttgggataaaaaataaatttttgctatatttagcccactatttacaattgtgctccaatgtacaagatgtaaaataagtaaacaaataattaattatataaagagtcatttgatattttattgagaatatacaaaaactattatttttttaatttttttattgtttagataatggtaatatggttaataaagaatgtaaaatttagtaaacgtcaataaatcataataattagtggtattatagtaaataaaaatgtagcatttattgtgggtcaaattcgtcaaaatactatatcttctgtcaaatttggcataacttttagcatgttccaattttagcacacttttaagaataccattggagcaataatttttgttaagtgtgctaaatataactatacaccacctttatagcagtccattggagatgctcttatcctacaggtgtatggtcggccaggattgacctagcaggatacttctatacaacctgatacgtggactgcaagctatctgcaaattgggcccgtaacaacctaataaaatagatggaaaatatctatgtttaagggaattttagtcttttataattaatcaatttaatatacaaatacctaaggatttcagttgtaaattagggtttaggctctcctatacaaaagggccttaactctaacctaaaagacctaagtctaattctaagtccaaaatcctagtctctcttccacactctctctctctctctct

SEQ ID NO: 108707 - DNA, 759 bp, Cannabis sativa
ctataactccattagtagaagctcttagagaaatggtacaagattggttctcaagacgaaaagaggcagctacatgccaattttttgacgtgacaaaatgggcaaatgacgtaatggagagcaaacttgatcaagcatttcgaatgaaagtatgtatagaatctgtttatttatttcacaacatatattttaaattgaatattgctgaaatgaaattattgcatggtttatattattctatgctattgtggataaccttcttatggctaactcgttctatacgacctgtaacaatttttacattccaaataactatgcttttatgttttacttaataattaatttgtttcacaggttgataaaatagatatgttcaaatatcaagtcacctatggtgacacaaccttcattgttgatctgactgaaaactcatgctcttgcaaggaattccaactagagggaattccatgtgctcacgccattgcagcaatcgatgcgaatcattttgataaatacaagttttgctctgagtggtatagcaaatctgttttgttggaaacatatgcaggttcagttaaccctcttccaaataaagaggattggaacaccccagatgaaattaaagaagaccgcatcaagcctcctgaattcaaagttaaaccaggacgtcctaagaaaagaagaggagaaggaattggagactatgccaagcgtggtcgacgtcgaacgatgacatgtggaaatagtggaatattggac

SEQ ID NO: 108708 - DNA, 549 bp, Cannabis sativa
ttaaaacacagttcatcacacacattcaatttgatattattttttcatatgttgatgatcttgtttttggatctacttctaactctgaagtgcaggtctttctcccagaaatgcaactaaactagagtttaaaatgagcatgggtgcagttgtttttcagagtaagtatacaaagaacttggtgaagaagtttggtcttgagagagccaaacatgataatactcctaagagcacaatcttgaaattatcaaaagataaacgaggagtaatgatagatcctactttgtatcaaagtatgatgggtaggttgctttgtcatactgctaatcgttctaacatttgttatatggtttgtgtttgggctcgctatcagggaaatcccatggaatctcatatttcttctgagaaaagaatcatttgctatgaaaatagtactcttaattttaggatttgtttttttaaagacactgatgctaatctggtttgttttagtgatgttgattggacaggtaatgcagatgatagaaaaagtactagtggtggatgttt

SEQ ID NO: 108709 - DNA, 794 bp, Cannabis sativa
atatatatatatattggtagaccaaaagccagctaagctttacatacttaatccgctacaaaatgagacccacaccaacggtcaagcttcaataaagttaatcataagaacgcttgattatactccttataaatacttatatcacttgtccactcatatacctagcttgcacttaacttgtatcagccatacacaagacatcaaagaggagtttttaatgttttgctcattgaaaaactatactcattcacttatctccattcattcccttgctcgaattgtctccaactctaagtagctacaattttacattgaacaagatgacgcactaacaaattgaagacaaacaatacacttgtcttgaaaatcactgatgtaacaaaccctcatcaaaacaaaattacttttagatatattcagtctaactacttatgccgacccaatcattcttgatctaaaattacgctacaggcactctgagtcaatcatgcacacctacgagtaatgctctttaatttgagtataactcaacttaaagagcaagggacaaactgtagtggccgaaaattgctctaagcccaacgaaagggcctaatgatcgaagtacttacaaagcccacttataagttagaaacgaggaacccgtaagcccaatggctcacatgggccacacccaatccatgtcgtttggctcatacccatattcgaatgtccaaccaacaataaagcttgatcttgaagtgtaatgttagggttgacacgtggaggaagaagaatgttaagtttcccaacta

SEQ ID NO: 108710 - DNA, 500 bp, Cannabis sativa
tttgagagtaatcggtttgttacatatatatatatgtgtgtgtgtgcgccaccgtgtgccaccgctggaaattgcttcttggttcaatcgttcgttggtatatatataccgcatgcgattgaagtttttcaatttaatgtaatatatatataaagtgtaaagtaatttattgttgctgcgatcatatatgtgatgcatgtatattgttttttttttttttttgttttactgatgcgagaatgcatcacatactaaatggtcaacattctgatttttcagtcaatcgcatataataatttacagtatcttttttatatacatatgcgattattggtctgttagtagagaatgcattgcattctgttatgtttttttttaaagaatgcattgcattgcattttgttagacttttttgttttattatgattattattattattttattaatatataataattttaaagtaataataataataataattcagtaacaattaaat

SEQ ID NO: 108711 - DNA, 529 bp, Cannabis sativa
tgaataataatttatagtgtatctattcttggtgtatagagcattctatgtaaccaaaagtgcaattccaaatctatagttgagtcgggaggaattaataagatagagaatatacttggtaaattctagagctacttattgagagcttggttacataggcccatggtctccacattaactgagataatattgttttgtagtctcaattaattgatttatttaatcaattaggattctaaataaaaattatgtcttatttgtgaattttactaaggatggacacaattgagaagaaaagagaattcaaagtttatttattgattaatagatcttagaaggtctaattaataaatatatttaaatggtaattttatttgataattaattaattaattataattaaataactagagcagaaaaataatattactgaagaaagataagtttgcttcattaaggaagcaaaataatggccaaaatctaactcatgggccttataggagttcgaacatgagtagtttattttaag

SEQ ID NO: 108712 - DNA, 1525 bp, Cannabis sativa
agagagagagagagagatcaaaatcagaaagtggcagaagagagatattattatttaaaatttatctgaaaaaacatatatttatacatatatatctggtgttcccatccagtgatgcttgacaaatttaagggggcaggcagagagagagagagagaaagtgagagttatgtcatctttggattcctgactcatcttttcccttacacctctctcagcctcagcaacagcatcacttatagtcagattctctttggatatggaaatgaatggaattggagtaaataacaagtgcttaattatttctttgttttaaactctatacaaacaatacttttttttatcagccaaatcatagtaaattttgtttactatactcaactcaactactttttagttcatgtcagttctaaaaaccaccctaataatacaatataataataaataaaaagtactagacgacagtggaaagcttaacaaagcaccttttttcccttttcacttgttcatggaaaatactgtaagtttacacagtactattacttcagtgccttgtagaattttttttcccctttagagaaaaatgcctatgatttgaaaacctatttcaaattagtaattttaaagcaagcacattctatcttttacctagatacgcaaacttttttgtttagtaaaagtcaactaaatttactttccaagaagacctataaaggtcagtttttcttatcacaattttatagctattctcttgtgttggaaattatttgcttaatcataaatgaccctttgcctttggcctttatctcaaaaaaacaaaaaaaaaaaagcataaatgaaaaagaaagaaggcccacaaaagcatacatgggaatgcacagttctcttcaatgagttaacgacaagcctttcaatgaagaaagtggtggagtgagtggggatgctactaaataaataaacatacaattcttttaacataattatcatggacatgatcatgcagtttgaagagtttttgtagggtccaataactcataataatggaaaagagaaaaataaataaaaaaccaaacaaacaaaaacaatgagtatctaattgttattaaataccaatagtattcaatatcaataatattttgaagcactatgaaataaaatagttgacatattcaataataaatattaattgttggggtattaacccaagttgcacattaaaagaatatacaaaagttgttagatataagtatttcaccttctctattagtatgggccttttaggaaagtattcaaaaacaaaaccgtaagaacttagcctaaaacagacaatatcattataatgtaagagtcaaggtggaagagcggggccaacaataaatcaaaacatgtaaaatttaataattattacttttttaccgataacaatatgacatcttatagtagtattagacaccgttgtccatcatttatgttttctttccaaataaaaggatctcttcttgtgggtgtgtacatgtaacaaaag

SEQ ID NO: 108713 - DNA, 668 bp, Cannabis sativa
cttaaattttgttatattgaccccttaagacatgcatatgaatattggtttcacattaaatttggttaaaatgaccccctaattcaaaaattaaaaatattcttctattcagtgtaaatttttacaagttttctttcttacacttatactcgttagtattgtctttaaaactcaccctacacatctcaaaaaatcgtgaaattttacaagaatgaagccaagaccattgtgcatcacttttctattagacacgttgagagaaaaagaaatttttaagcactaacaatcatttaatcaaaatagtataaatctcacatttctgataatggtacccctttatgaaatgtggcccgaacccatctcaaaatatttttctccattagtcacaatgaattcttactactgagacgggaatatgaagattgatttcgtgttaaattttattaaaatggcctcctaattaaaaaattaaaaatattcttctttttaggataaattttaacaagattttttctgactcttacactcattagtgttctctttaaatctcaccttacatatctcaataaatcatgaaattttacagggacaaagtcaagaccattttccactacttttctactagacacgttgaaagaataagtcctttttaagcacaaacaatcaat

SEQ ID NO: 108714 - DNA, 727 bp, Cannabis sativa
tgttctataatgctcctaaccaatatggctacagagttaatatatacaattgttgttttcagctgcatatatgagaagttcaactacaccatccaagccaaagataaccccttgtgtgaaaattgaaccttcttttaccaacaatagtaatgataaagaaagtatggtttcacaggacttaattgcaaagaaagaaatagttgaaccttcaggtaattttaagtctatatgaatcaagaatataatgtcaaacattcccctagaaaacttagcttatatacatattttgcttataaatttaatgcagacaagtttatgaaggtgaaatctgaagcaaatactgatgacaatcaaggcagtaataataagaggctttcatcttctgaagcagccatcaaattcatctcaaacaatccttacctccaagtgaatttgagatcatctcaggtgtatggaggaagaccggtatgtagagaaaatgttacttatacacatcaaccaatataaggacacatatactttattatcattatatctttgtgttcatcttttgttttttcatatcatgatcaagagactactagtcatgaatgtttgtatggtacttcttgtttgtgcagtatattccaatggcttttggaaacctttattttgagaaaaaggcacaaactgtaactttttgggttggtgagaaaaattggcttgtgaacttaactgttaataagag

SEQ ID NO: 108715 - DNA, 569 bp, Cannabis sativa
tttcaattatgatttgatgtaataagaacagatgtctatatttatttgatatatatgtttatttttgttcaaattttttgtgtttaattttcaaagtattaatttatgtgttctttcaagtttcaaaatttatacttttttattaatattaaaaaaaattatatgaatatataggatgagttcaagctctaatgcagatcaaagagggagaggtaaaaataaacattattggacaccaacacaagacagtgtattgattgaatgtcttctagagttgagtcaaaattcaacatggcgagctgattctggatttaagaatggatatttgcaacaaatggagattatgttagaggaaaaattaccaggctcgaagttgaaggcctcacctcatattgaatctcgtattaaaaatttgaaggggaagtattcttgcttggcagaattattatctttaagtggttttagttgggacaatgaacattctttattattgtgtgagaaaagtgcatttgatgagtatgtgaaggtaaatataaagtaatttttataatacaagtatttatatatat

SEQ ID NO: 108716 - DNA, 509 bp, Cannabis sativa
ttctttaaatattacatccctgctatttactgttttaaaacctctttgttcccaaacccaaagcctataacctttaactccctcgggatacactagaaaaaacatttcatagctctaggttctaatttcccaacactttggtgtgcatatgctgcacacccaaatactctaagattagataagtaaggaggtttacaagaccatttttcttcaggagttttgaatgcatttgcattggatggacttctgttgatcaaataaatagttgttaaagctgcttccccccaaaatccttgggataaccctgattgtaacagcaagcatctcactttgttgagaatagttatcttcattctctctgcaactccattttgttggggtgttatccttactgttctgtgcctttgtataccattttctttacaataatggttaaactcctcattacaaaattctaatccattgtcagtccttagagtttttaatttttcatttgtcaaattttcaac

SEQ ID NO: 108717 - DNA, 1830 bp, Cannabis sativa
tttgttatttttttttatttaaaaaaaagtcatccaataatttctcataaactaagaattctgttatatagccacattttatatagaatagatatgctaaataaacttattggtttattttgacatatttaaatatattttcattatttgtttacatattagccttttcgtatagcctatcatcgtatatgctaataaatctattagtttattttagcttcttgaaataaatttttatttttatttttgtatattggaataataattcaattcatttcatatagtctaccattatatatgtcaataaacttagtagattctatttgttggaacaacattttatttttttcaatacatagtaaactataatcaaacatacgccaataaacttattagtctattttcatatattgtaacaacaatttattttttattttaaacacaatgtgtgtctatgaaataacaaactaattagtctatgattgatatcatgagtaatctaatggtttttttttattctagaaatagcaaaaaaaaaaaaaaaatcacattttgaaatgttaattaataatatattttttaagctaaagcgagtaatgatgtgttataataaaattatagttatcaaaaatatattttatgtaacattaaggtattatactgtaactttaaaatgattaattgataacttaaatgtctataaatttagttaaaattgtgtgaatttttttacttgtaatttattaatttttttaaatagttttgaaatatgtaaaaaaaaaataacatagttactaatgataccaataaagattgatatgggagaacgggagctaatttgtcaggtttaattttttttttttatttagttgataaaaatgttttagacatgaagcatctttaatttattgttttggttatttacgctgaggtgtcacgttaattgtttcaattattttaagtaacgttattattgtaattaatttataaataatgtatattaatgaaaaattccctttatttatttgagaaaaagtaaattttcaaatacaacaaaatttaataccatataatttaatatgttattattttttttttcatatttagtagttgctaaattatattctaattttataaaatgtatatacttttcacaagtttttaaaataatttataagaaaacaagatagtaccaaatttttcacttaaaaaaaattaatgtaccaactaattttatgggttgctcaaaagtattttattatttactagataatattttacataggtttattttatagaacaactagagaattaagccgccaattgcgcggtgttatttaaattttataatatcttttcatatatatatatatatgtatatattgtacttattaagtgatataatataaaatataatattttaatgtgtatattataaacaaaatagtagtattgaaattagaaacataatttgctatttttaaaatatagagaaagatgataattttataaaaaatattagaaatggtggagcaaaaaaaatgcatgtgtttttttaaaaaaataatagcttctgaatttaataaattgtgcttgtgactggtgaggtagttttttttttaaaaaaacaatatttagattcttttttttaataaaagaaaaaattcaaattctccctctaatttataaaataaaattatcatttaagaaaacgaagtatcaaatataataacttttgtgatacacattttgaaatgatatttatcatttgtaataatagaaaaaatatatttatacttggttaattataatttttgcaatatagtctca

SEQ ID NO: 108718 - DNA, 574 bp, Cannabis sativa
ataatcttgtctaggggtcaagtataattttttgtgctgaaattcttgtgttggcaactgccattattcaataatatttgtgacactttttttcgtcattcatttttttgttaaaactttcttcattgattttattcttataggttatggtaagctcaagtattttaaaaaaataaaaacatataaatgattgttaattattatgaaatcaaagattttaggtttagaaaaaatcttatacattttatatgtattaaagcttaaagcataaaattatttttttttgttctcagtaatgcaatttagaattctagtttgaagaaattttataaaaaaaaaatatacacttttttttttctatttaatctttaaaataatttttattaaaaaaaatagtttgttaattttttaagtgttttatttttaaataacaattctatgtataaattttttatttctattaatagttttgtgtattttcggaagatagagaataacaaaataggaaatattaattttttaatatttaattaatgactataaatatccaaccattagatatttgatccaatgg

SEQ ID NO: 108719 - DNA, 1712 bp, Cannabis sativa
tttttttttttttgttacataagtagtaattcattgtttaatattttttttttatgtattttagattttattttgtaatgagtcttgattttttatgttagtcgttttttcttgtatgattatttagcattttgtatgtttgtatggtagttgtttttaatagatttttaatagttgtattgtagttgtgttacaatgtgtttagtcatcagcttttattttggctttttttttcaaggaatgggaatacaagtacgttgaaaatccaatcactataaatcgaaggtcgcatgtacttgtacttacaatatcattgagaaccttcatgtatggaccatgtatttagatattgttaagaaaatatttaagcaactactgctgaactgataattaacgaattgtagtttgaggttatttttgttagaaatcattgttttaaatactctaatatttgttaataactataagcaaacgttaacacaacatggaagcaattgaaaaaaataagatacaaaatatcattttctattaaattaaacaactagttatcaactagtgcaatttgattaaagaataagattaaacaatagcattttgcaaccttgtattaatatatcaaatatgatattttaattgcattaaacaatattacatttaaaaactgttattgtaattttgtatcttgagatttttattgctttgctttggaatattattgtattgttcaccaaaatgtccattgaccaaattgtcttcattatttgatcaaattgttcgttgaactgttttagaaatggaattggttccgtttcttgaaattttgaaattttgattatagacagtccattattagaaatttataaagaaattgaaatgcaatagtatgttgataatacaggcacgacaaccaatattttatataatacatttattgtaaggcaactgttatacaactaaaaaaatgaatgtccttgttattataaacgaacttaccacaatatagtttcttgtatatgactcttgcattgccaattataattcctgatttttttattataagatattagtaagacaactatttgacaaccctaaacaacaaactggcaattatgtataaaatatgtgttggggtatttttaaggacaattttaaccaacttttattagactgatgaacaaagacttgtagtttgaggttattttgtgaagaatcaactgtaggaacattgcaaattaacatcaactcaaccttcgtttagatatgaacaaactaactatattagaattgcttttatgagagctttgtgttaggttgtctatatgaaataccctcaaataatactaaaacactgtagactaattaatgtataagtattgctacatcagttctttgagcatcaataaaaataaaaggcaattgtacgacaactaaattgtaattaaaatattaaaattatgtggtcaaatttatgatacgagatgaatgcaaatttagtttaaggtcgcaattggaattgattaattccaagattgaattatatgatatcttattcagtttaattataattatattaattttgttttaattttttttcttcttaactcatattcttaaaaaatatattttttcctggttgtacttttgatttggagtctgttccaatcgatttgctaccttctttggtagcagattttaatggttaataaagatgc

SEQ ID NO: 108720 - DNA, 725 bp, Cannabis sativa
  modified_base (174)..(179): a, c, t, g, unknown or other
  modified_base (324)..(329): a, c, t, g, unknown or other
ttggacttggcagacttgggggtagaggggtttgcagcaaacagctcctcagaaagatcaatgacctctccagaaggtctatttttcgtaaaagaggaccccgcaccgccctttgacttcttggccggaggagaggcgctagagcttccgcccattctcttcctcagagcatcnnnnnnctgccgagacatgtctgcatagaagaaaaacagtatggttagaaaatagccatcagaaagcacaaggcatgaaagtcaagaagctcaaaagtaaagtaaaaagcaaggttacagcccgcacaaagactcagaagtccatcatcannnnnnatcgatcttatctcagacatgacagctttccctttttcagcaaacgggggagatggccgaacaggtgaagtgggctcccttatgcgaatttcatgttccacacgcctgggcatggccgggagtttcttcttcctcttcagtggggtcacctgctcgtccttagcctcagcttcaggattcaaaggctcctgagcatactgcttggctctggcacctcctttaaacttagcctcgtgcttaagttgaataagctcattctccttatgagcttgttcaggccggcgagcatcagacttcctgttcttcaccaccacggacttaggagaaaagtcctcgggatagagcccatacttcactagattatcatcggaggtcaactggataatattcctgtct

SEQ ID NO: 108721 - DNA, 658 bp, Cannabis sativa
acacacagatgctaagcccattaactattgatcaccaataatatccaagttttaataaaactaataaaatttaatgtaagcccaagtaaaaagtctaacatcttattcttattcaaatcctttttaatgatttgatttgatatagtgtgttgatgaatttgatttagttgtgttcatttgcattgagtcttaaatatggttttgatcttttcaatatactttttaaatttttttaatctctgaaatgagttttagatttaatatctcaattgggttttgggtttaatctttaaaatgagatcttcatcttttgggtttaatttgtaaaatggaatttttcatttttggatttaatttttgaaatagagttttggtctttttgatttaatcactgaaatgggattattagaataaaaggtttaaattgagtgggttgggtaggttagggatatagttggttaagtgatgtaacttctagattttgataaatattgaaaatatattttattgaccaactaggtagggatggcaattatacctataagttcgggtatccgcccctaatgcggcgggtacgggggttgactttcgggggcaggagcgggtatgggtttaaagattcatacccgagtcagaaacgggacgggggcgggggaat

SEQ ID NO: 108722 - DNA, 613 bp, Cannabis sativa
  modified_base (253)..(256): a, c, t, g, unknown or other
gacccagacttgtgccagtacctgcgacccaggacccatgacccggaaccttgaccagaacccaaactcgtaccaaaacccggacctaaaccaagacccagacacagaccaagatccggacctagacacggactgaaacccagaccgagacccaaacccagactcatactcgaactcggactcggacctagatcaggactgggacccagacccaaactaggacagaggcctgaacctggactaggactagaannnngactgggactgggaccgggacccgggacccgatactgagacataggacctgagaacctaaccgagacccagacctagactaggccaagacgcgagacaaggtccagtaccgaacacgcaccgagacctgcacttggacttggccctaacccggacacggtcgtgtccccaaaccgggaccgagacccgaacccagacgtagacctaggacctgatcccagacccagactcggacctagatagtgatctggatacgaacctggactcgaacccagacccagacccagaccgagatcgaaactcgggacctagatcaagactgagaccatgacccagacccagacatggacccgcacct

SEQ ID NO: 108723 - DNA, 940 bp, Cannabis sativa
gtcatgcgtcatcctgtagatgcgcaggcgtggaaaaactttgacaacaggcatcccgattttgcgagagacccgagaaatgttcgcctagggttggctgctgatggatttaatccatttggaaatatgagtcaatcgtatagcatgtggcctgtagtgttggcaatctataatcttccaccgtggttgtgtatgaaggacaacaacttcatgttgactattcttattcctggagctagatcaccgggaaaggatatggatgtatttttaaggccattggtggacgagttgaaggaattgtgggtgaatggggtcgatacaagagatgctactaccaattcaatgtttaagatgcgtgcggctctgttgtggactgtgaatgattttcctgctcgtagtagtttatctgggtggagtggtcaaggttacaaggcttgccctacatgtaacgaagacacttgttccatgagagtgctcggtaagacctcttatgttggccataggaggtttttgccgtctaatcatcgaatgagatatgatcgcacctttgatggaacaattgagaagagatgtcctcctcgaagatttacttgtgaggagatattagaacaagtaaatgctctaccaagtaaacttcctggaaaacacatatcttttggtggtgtgagaaggaaaagaagtggggatacaagtaattggaggaaaaaaagtatattttatgaacttgaatattggagttcaaatgatttgaaacacaacatagatgtcatgcacgttgagaagaatgtgtgtgacagtattcttggcacacttttggataatgacaaatcaaaagacaccatcaatgcaagacgtgaatttgctagataccatggaggtgatggtgggggtgaggacccaccagatcctactaggattcccaccgagtgtgaatttgcta

SEQ ID NO: 108724 - DNA, 2943 bp, Cannabis sativa
gttgcagaagtgaagagtatagttgtatatagattgaatcttgtaaataataaacagattactagacaggagagagcctatttgaatagattacaatgtaattaatttgtttctttgtattgttttgagggcagtttttgtccttgtgaggcttgagggtgtatttgcttgttgattaatgaagtttcttctttgtgatcaaaaaaaaaaatctaatgccgacgccttggtaaaactggcctcgcagaacaaacttgataagtagaatttggtacctatagaagtgttaagagaaccatgtatatgtgaaaaagaagaagttgagatgattgatgcctcgcctacatggatgaagcccatagttaactatctactcaacgaagaactttcagcagataaaaacgaggcatgaaaattcttatattcagtgcctcgctacacgatagttgaaggcaaattgaataggaagggttatttaatgcctctactacggtgtgttctccccacaaaagcaagtgagataatcaaagagatcgacgatggattttgtcgagagcatgcaagttggcaaagcttgtcaaagaaaataattttacaaggatactactggccgataataaatgaagacacacgaatttgtcaaaaggtgaaataagttttaaagattttcacatatacctcgcgtaccaccaatagaactaaaaatgataacctttccatacccatttgcaacatgggggatttatttgattagggcactgcccacagggcgaggaggagaaaagtacacagtggtggccattgatttcttcacaaagtgaacagaggatgaacctctggtttccataaccagctagaaagttctcggcgttgtcgtcaagaacataatttgtagatttggaatgccaatttagatagtatctgataatggaacttagttttatggtgagttatatactgagttctgcgaaaggaataaaattattaagagcttattgtcagtctcaaggcctcaagcaaatggataagtagaatttgttaataaaccttgaaggatactattaaagagaagttggacgatgcaaagggtagatgggtagatgaactaccacaagtactttgggctcacataatgactgagaaaacagcagcagggcatactccattcttgcaggcatttggcaatgctgccagtagaagctaatattgcgacccacaaacgatatttctataatcacgaagaaaatgttgtaatctctctttctgatgtagtttttaaaatttcactattattgacaaagctaaagtatttttcatgtaattacaaagttttattctttaaaattacttaaggggcatatatatgtaaattgaaatttatctagaaatacataatatattacaaacctactccactttaaaatttctaaagtttttcaagtaattgattgaagttgtctacagacaatgtaaagtcataaatttaacctttcttgtgagaaaggaaaataaaaaagtggcatttgtaaatgagatttaactcataaaagcaacattaagctacatgcgaggttgaatatttaacggctcgcattttataggaatgtattaaacaaggtaccaaggtgccttgaaaaaatacttaaccttaaatatgaatagaaggagtaataattattcatacagggaatcaaaaatgtacaaagtaattcacaagatgaattatttaaagtatgtttaagtttggttaaagcaaaatataactgtttatgtgaagtagatttgataaactgctcgcgaatggaaaccaaagcaaatgacaactgctcgcatacatagtagattattaaccacttaatcaatattaaaggaaaaacgagaccaatggaaatgcgcacttaaagtatcttaattttgatcaaaatagaattgtttaagttgtgaataaaaatgcaaacaagaaaatatattaagttcaagaataaatatgtgaggcaataaataaaaagaaattaaagaaaagaaaagttggccatccaacaatgcaaatttgtctttacaaaaaagtgccacaaggggcaaaccattgtctcggccaaaagaccatttccttaaataaaaaaaaatataaaaatagttaaaaacaaatgctacatcgtattaaattttgacaggtcttcttcttctttctcttgtgcggcctcttcttcaactttcttggcctactcgtagtaggcaaggacttcatccatgccctcccccaagaaacttaaatccatttctgcattcggcatccaagctcgataaatggaatgcttggcaacaatgttgcatcgttccttactattggcctcggccccctcgagcttcaaggtggctgcatcaacttcttcttgaagtttcaggcacatctcgaacttgtccttagcctccttttgggctacctcaagtttagccttgtgggccctcttcacctcctcgacctctttgcgtagaagggtgatccccgattgagcttcattccactctttggcaacagcctcgcattgcccaatgcttctctaaagctcgctctcgaattatttcaccctgtcgagactccgacgttggatgaaaaaggaaaggaaggtttgttaaaaataaataataatgaaaattcataagtatttttgagggttcttgaaataaaatgcaaaacaaaaaggagaaggaacctaattgagagagcgaaggcgagactccttttaagaatctcgggttggactgccattattgaccaagtcccagtcgctgggtaaaaggatcggagatgacgccagcaggccgcagtatactgcaaagagtgttctaaaccaatgctcctagcctcgataggcaaagcttcagccacctgacttgaagaagcggttattgagtttttgtgccctaaataaaacccattac

SEQ ID NO: 108725 - DNA, 504 bp, Cannabis sativa
ttattattatggaatatggtatatatggtaactattatatatatattttatttttatttcaattttaagttgttgatcaagggttaagattaaagtttgggagtatatattggatgcttatgagatatacttagggtttaaaaacgcataaacaagttgaagggaggaggctgcagagagaccgatagtttcatgtgaaacttagagagagaaagagagattttaattttgaaacacttagagagtttctgggtttgtttgatcgctttgaatagcttctacacgatctaaggaagctaatggtcatgacgaaatgcgctaagacagcaggtttcgaaatctaccattttcatgcatgttcatacatgttcttgagcgatcttgaatttgaacgtgtttgaataatttatggatttacaaaaggttgtatttaagcttataggacctaaaggatcattttttacgtgaaaaatcgaagcgttaaggccccatacgaaaattgcc

SEQ ID NO: 108726 - DNA, 2056 bp, Cannabis sativa
tacgcctgccgtcaatttccctccaattgcgaccatggcgacggagaatggaataggatcgatgtcggtagcctttgataggaaaaacatcaatcatgagaccacaaatgggtttcataatccaagggattgaatagagagggaaacgtaagagagggctgagagaagagaatattgttattgagagagagaaattaaaatgagaaagctgaaagaatattgttaaaatgagagagaagagaatattgttattgagggctgaaagaaacttccagatatcaatgtctactcaagtaatttgttaaaagaaaagaaaagagtgatactatctcacaataacgaagcgaagatgaagaatatttcataaagatggaaggaagacttttctcagaggaggattcatctccgatcgcactatttggagataaagagggatttttatcaacaaaaaataagaaagcatattacttgaaatcaaaggagttactgcgtagattacaaatttgatgtcgtttgatagtgaaagagggagaagagtgtcaatcgtatttttagaattttaagctttcaatgtcaatcgtattaatgacaatttatatttatcctcagccaaaaaaaaaatattatttttgaataaaaaattaaaaaaaaaaaaattaaagtcacccataaatttctcataaacaattcagttatataggcacactttatatagaatagatatcatgacaataagattatataccaccattatatataataaaatagaagctaacgggttgttgtgagttgttggtatatatatattttgtcgtacaatatatttttattttgttgtatggtggtatatttgacataatttttttaaaaaaataaaaaaatattttaacaaaacttatacaaatataacatgatctttaagtaatttatttctaaatctaaaaaaataaaaaataaaatattaattttttttatatggcaaaaaataatataaataataaataatataaaagggtcatttctgtacaagttttaaaatgagaacatttacttacaagtgttatgatttggggtcatttgctataattccctaaaaacatttggtgacaaaactcccttccgccaattatttgtgcatccaaaccctcttctatcaaaaaggtgtccaagtagatagtatatttgcggcaaaactcctattttttttgagttagcacttatggccccaatcaaaaatttagtagcacttattctacaatcatatttgttatgatcacatttcgagccataaatgtagacatgagatgaggataattggacacgaaaattatagaaaactcattaataaatgaaaagcctcgaggagatagtaaatgatgaaaaatatatgtcttgcattatgcgttgccaatgagacagcaagataaacaacatatggcgagatgataaagatagaagtcatctcaggtataatagactgaaactatattattggaaggggtagataattaattctttaagagcttacaactcattgacccatatactcgtgagtatgttgaaaggttaagggggataagcaaagtgcgactaattcagaatctcaaaagactagtctaagagttttcgcgaaaggctatagcaagggaaaatatcttaactagcatctcatagaatactaccaactatccctgaacaccgtcgaataatgcgagccatagctagagtgtgtcatctcggtaaaggcaaactgcttttgaattagaacaacaaaaggttatcagcacttactttattttatccacatgttgtaaatatgaaacttggggattgtccacgtttcataaacggttacttagaaaagatcaaaggagaataattcttattccttgaatccctataaatagggacaaaacctaagggaaaagggatcaatcatattgggaagaaaagaccctgtaagattgagtgaatattcacagtatttcctctgtaatctaagtacattaccaagaaatactcaaaaataataatgactcgtggagtatgtagattt

SEQ ID NO: 108727 - DNA, 649 bp, Cannabis sativa
ggttctttaattatcttttttttttaattatagtgtttgaagatatctctttgtttgttttttttacataaaaaattgtataatagttacccttattatgaaacgaaaaattacataaaaaatatcaaaatttaaaatttaatatataattctaatcattattaaatatcacacctattgtaaaattatatcaaattgtaaattttaatatttttgatgtaattttttaaatacattttgtttttaatattgatgaaaaattatataaaatttaacaaaatttgattcaatttttattatttagttatcatttcataaaatataaaatttatttcatatatatcattcaaaaaattttaaatacccgtcgcgaagcgcgagctatttactagtttatttaaattaaaaagatttataaattagttatattattattatttgaaattaaatatatgttaaaaacactttaaaaaaatatatataatattaaaaattatttttcctatgcgatattaaaaaatatctcttagatattattttaatttttattaagtaaccaaatcatttaaaaaattaatatgtattgtgaataagtatagtggggtagttaattttgaaaaatatgtgtgattattaggcattgcaatct

SEQ ID NO: 108728 - DNA, 2322 bp, Cannabis sativa
aaaactcattctaagatgagtctagtggtccccaagaaaccctagaatttctgtattctctccttctccatcagagaaaatacctaagaaaatagtattcttagaagatcaaaaccttctctgcaatctccaacaatggcttcaggttagtgtttccgctcatcttttatcatcttcttctttaatttaataaaggttttatatatttatgatttaggattttctatattaaagcacttttaggaatatgtttagatctgtgatttatatatttcttgagtgttttataaaccctaacagtttgaccatatggtgtactggtaaagatacttttatgagtattcttttagccacatcccggtttattcattttttaagatactatcttgttgtaacggtgtaatcttttaatattataatgtaaatattgattactatttatattgtaccaacaatttgactaaaaatgatttatggatactatgtacaaaatgaaattcaatttgttttttaggaaatgtctcaattatctacaagtgtcgtgtgatttatcaaatttagacacatatcttgaagaagaaaaagaaaatcaatgaggttatattcactaatgttgtaccccgctcttccacttttcgggcagccacacattaatatgatatttctgtttttagtttaacccttcacggttttgtttttggcacattttcagaagaccagagtacgtgaaacacttatatttaggcagctcttatctattatctattcttccgatgtgggacttaaattgatacccaacaactaattcatatcatgttctcaatatttcatgagaaatagtctggttattacttttcttatacttaaattgatgaaatagaaagagttgaaaaattggccgaattgcttgtaagtataatataaaaatatcttcattatataagaaaagaatataaataaataaatatcttcatgaaagagactaaaaaaggcaacttgagaaagcttccaaaactagatattatggtatggcaaagatggcacgtacgtagggtatatagggtgaccctccaaataatttttttcaattattatattttactaaaatattatgaattaatattgatcactacttgcttcaataattaataaataaataaataaagtatgaataactatttgtgccatttttttatgattttgattttagtaagtttgttttttaatcatttcatatactattatttttaactttttttctattttgacgatttaagttactcattaatgtatgagttgtaatgtaaatttgggttgcgattaaaattactccatgtacttttgtataaatacaaaaaattgcttttaaatatacaaataaaaaaaaaattgaaaaaatttagtgaaaaaaaagacttttagcaaaataagtttgaaataatcaaataatttctaaaaactttgtttttaatttcataatttctagaaattttgagatttcttcattatttgacaaatgagtacatttgctattttgtcaaactcaaaattgtattcccataaaagaaaacctaattatagacgatgacctcaaccacataataagaaaatatatatattaataattaataaacaaagataaaaaatcagggtaagttaatattattataaatgagtgataaaaaaattattattcagattattttgccaaacggtattttttctaaaataaaataataatgtggtagtggtattacactatataaatattaaatataaataaaaattcattagaaaaactcctctattttaaaagcatttacgtcatgcatgggacttgattaaattacacaagaatatagagaatattcctctattttattcccatcttagaaattaaactatataattcaatttactatttgttacttttctctcgttctgtaatttacggtgtaaatacttatatttaaaagttattatattaaattatatgacacctaataattaattatactaataacgatatgacaatcacatttctcttttattgaaggataaatagtggcataagtactcaaatttttgagtttgtaagctgcataaactctattttaaatttattaagaaaaaaattataagtaattgatgctacatgttttcgtccagaccaaatgatctaaaatcttaatcttatataggctctatatttaatttaataattttagatatttataccgctatttaccctttaattaataagggaaatttgaatttccatacttacaaaatcccattatttttttcctaaatacatactta

SEQ ID NO: 108729 - DNA, 682 bp, Cannabis sativa
tttttttttttacacttacacttctaaacatttctaaacatttttaaacatttttttttgtatttttacagaattctatatagcaatccctattgcaactagtgtaacctaaatcgcaacaaaatatcgtatagaaaccctattgcaattagcgctgcaaccattttagaaacccaaatcgtaaatttgaaaaaaaaaaggtaaaaaaaaaatatatgaggtaatttccctaaaagtaaatagtatttttaaaaattattaaaaaaataagtttagtttttaaaagatattttttttatttgggtccctaaaatgagtgcgccctaggcgcgggcctagcttgtctagggccaaccttccactcaatagttcaacttttattttctcaaccaatcaacgggtgacatttggcagggattcaccaagttagccaatctgatcacactacatggcactctaattttaatttttaaataattatatttttacatataatttatgataaacttatttgtgtattattatctaaaaaaattgggtgttaatctttttatctccttataaatattttatatagttttagataaatactattttggatcatgtgttttgtaaaagttattaattggatcatttattttgttaaatgacaaaatgaattctatattttccaaaatggtaa

SEQ ID NO: 108730 - DNA, 735 bp, Cannabis sativa
  modified_base (59)..(64): a, c, t, g, unknown or other
  modified_base (337)..(346): a, c, t, g, unknown or other
  modified_base (690)..(708): a, c, t, g, unknown or other
ttcccttttgcttacaatatctataattagtaaaaacatacattacatatttagaatannnnnnttgagggattcagacagcttgccacatcccttggatacgatcccatgattgtagggattgcttgtgtgcttcacgatatcaatcttgaagtcgctaagtcttgatacattgctcggataaatgacttcgtttgttgtccggatcatctgcccttgccctgctcggtcaggcagactttgtccgtgtagatccatggctgaggtctgttcggaatatctctctagccaaatgtagagaatagcagacacgtgtcaccagtatgcgttgccacgnnnnnnnnnnaaaaatgggataacatttgccctcaagtctgcacgggactaccaaagtcacgcgtagacttcacttagcttaagttcgtgtctcaacggatggcacgtgttcatgtgcctgttggtgatctgatgtgattctgaccaaaagtcccttcagtatttggctaattaatgatctgatcaatttgcacctcgaacactccaatcgtttcacatgttttgacggttgcctttctccaggtacttaattgcttctgatttcccaacatttactttttaacagtcaaagatcctctatagataatctacactaaataggaaaaaaattaccattctacccttcaatgtatnnnnnnnnnnnnnnnnnnngcaacctataaatgatatttcagtaaa

SEQ ID NO: 108731 - DNA, 779 bp, Cannabis sativa
agtcaaattttaggtgtaaatgcaattgtaaaactcagctcaatcaatgctgagattcaggttttctatttatagagagaaaggctcaaaggagccgttacatacaaagagcacatgctcaattacagctggcaaatcctaacagaatcaatgaatattccctcaacaatgatacactaatcattacaaaataacaacctttatactctcatgattttcctatagcagccgattgacacatggcagattgaatggaccacaagatattgcagagcaattgctgcagtatccttcatttcttcacagtaatgaaatacaatggaatggaaatgaaacaatctcaattccattcttttgtttggttgtatattaaagtgttgaaatgttattctaatagaaattatggaatgaccattgcatcattttggtggaatgacaatttcattttgaaatagaaggaaagactattccaataaagaaaaaatttaataacttttttatcatttatttttttatgtattttaaattttattccattcctaatcctattctcattcccatttctatgtttttattcctcccaaccaaacgccaccttaaagttttcacgattgtttaattttagaatatgtatttcattatttttgaaaaaataacttgagaaagcaccaccaaaaatataagagctctatgaagctaagagaatatatattcattattatacacatagctttgaaatatatatgtaatttgtatttgtttttaaaatcattattttt

SEQ ID NO: 108732 - DNA, 675 bp, Cannabis sativa
ctatactcgatacgctagtcatactctagccgtaccgatgtgatactatcaaatagtacgctgctattgaccataatatcagcctatactcggtacgctagtatactctagccgtaccgatgggaaactgtcaaatagcacgaaagccaacatacatatctaatgtaatctatcaggcttactaacatacacgctaaacatgtaaatacatatgcatactattatactaattttacctcgattctgaattcaggtgtgccggtcaacttgagtggaacaatctgctcggcgaattacaggctcctaaatcacatcaattacaacactgataagcgacacgctaaatcacttcctggggacttaaacttgaaactaaaagtttcctatcgaagaataacatggcagtaccctaaataacacaaacatgggaaaaactagggtccccaaaatttccccaaccggtagaccggttccccaaccggaattctggttctgggaaaaaattcttggaagccaatcggaattccggttcctacaggcctctctgaaccgaaatttcggttcagtgcaggaatgattaaaaatttcataacttgaccaaaacaaccccaatccaatccaaactttccagacctgttctatacaccctagagaacattttcaaggcaataaaac

SEQ ID NO: 108733 - DNA, 1175 bp, Cannabis sativa
gtgggatctgaaaaaattgtagaacccatggaggatgtcgaggaagtatcgatgtgtgacctcgaccccaccaaggtcctccggctaggaaaaattatagagacggaggaaaaagaaaaaataataaagacgctaaaggctgccacagatgtttttgcgtggtgtcaagaggacatgaccggcataagcccccacatcataacccacatcctcaacgtcaacccggacatgccaccaatccaacagaaaagacgccccttcgactcggtaaaggcagaagccctagagaaagaggtggaaaaattactaaccagtggcatgatccaagacgtgtattacccagaatggctggctaatctggtgttggtaccaaaaccaaatgggacatggcgggtttgtatagattttaccgatctaaacaaagccttcccaaaagactgttttcccttgccaagaatcgaccagatggtggatgccacctccggattcaagttattgtccttcatggatgcatacgccggttacaaccagatcaagatgcacatcgcggatcaagagtgcactagcttcaggaccaataagggggtatactgctacctggtcatgacttttggactaaagaatgctggtgcgacttaccagagaatggtgaatcggatgtttaaaggccttttgggacgaaatatggaggtatacgtggacgacatgttggtcaaatcaaaggcatgcgctagccacgtagatgacctagaagaatgtttcgaagtggtctggagatacgggatgaaacttaacccgaagaagtccactttcggggtcaaatcaggaaagtttttgggcttcattgtcagccagcgggggatagaggcatatccagagaaaatccaagctctcctaagcatgccttcccccaagaaacacaaagatgtgcagagcttaaccagaaaggttgcggccctaggccgttttatctctcgatccacagacaaatgcattcccttcttcaacatcttgaaatgccttttggactaaagaatgctggtgcgacttaccagagaatggtgaaccggatgttttaaggccttttgggacgaaatatggaggtatacgtggacgacatgttggtcaaattaaaggcatgcgctagccacgcgatgttggaaattattttacca

SEQ ID NO: 108734 - DNA, 807 bp, Cannabis sativa
tccacctgtgggcctagtggtaggtgggcagaccttgtctagtaattcatcgggagaagtcataccaaacaattccaaccaggttaattgtgctggttagcacattagccaaacaaaccaatcactaagatagccaggcacttctgtattcaataggttggggaggactcatgatcttagaaatgatctaaataggaggagaggagtagacaatcaacttgaaacgccgatcgtgtagcccagaacccgcactcaaattcccgctcagaaagatactgacgttactctgatcggccgaaatgccaaacaggtaagtccagctatgcaggcacaactcgacgaactaaagaatatgttccaaggcatggccgatcagataaacaatgatctcgagctggaccgagcacgtggaacccctttctcccccgagatcaacctcctagcattgtcgcacaagtttaaaatgccaacctagaagatgtacaatggaaaagaagatcttctttcccacctcaaatatttcgagatgcaaatggatctgcagggagtacgaggagatgtatgttgcagaatttttcctgccacctctcgaaagccgcccaacaatggtacttcaagctggcacctggaaagttcaactcatggaaagctttctcctcgaaattccatgcataattttcctcctctcgccaactttcgttgcacctaggagacctggtcaatgtcaagcaaagacgaggcgagcctctctgagcctacattaacagattcatgacggaggcgactaaggtttcacgagtaaccgaa

SEQ ID NO: 108735 - DNA, 1004 bp, Cannabis sativa
  modified_base (188)..(190): a, c, t, g, unknown or other
ggtaaaatatttccaacagattccgagcttcatcttcatcttggactatttccacccttctgtctaactaagtgattcaactcgctaagatagcatccgagttcaagcagttgaggctgaaataagaagaaaacaaataaacatggttagtaggtctagaattaataatccaagtggataataattcnnnaaaacacatcagtttataggaaaagagataccttgtttctttgctagaaatttaggacattgggggtttccagtggcctttttcattgcaatagaagcattttccttttggtgtatcaccaagagtagcagcctttttctttttaacagttttcacagcttgaacatgctttttgctatttatccacttcttcttgttcttgggtttggaagtagaggcaaagtttgcctcagccttagtcgctccattaccatttacagaattatgagctttagacctttccttcttattcatgacataatttgaggtgtaaggcagaaaagctggagtcagactattcaagattagactcacttgagttgtctgatccatttcagctccatgattctgagcttcttggaaataacttgccatctgtagaaggtgatcacacacgttctgatgaggactcatccatgcattgataaatttccttgtcgcttcaaagtgagattggaatgatgccattccaaatagttcagttaactgtgtcatgatttctgcagccgtgtcagtgtttgcaaaccttgttttcaaggtgtcaaccatgctagaaagtatgaagtatcgagctttgttgttggtattttgccaacgctcgtacttctcctttacagctttggttgcagtgtcacccggctgctcaggagatggtttagttaacacaaacagagcactctcacctatgagagaaatgttaatgttctctttccatttagggaagttagatccactcagcttattatcagtcaatagtgacaacatgggattggtc

SEQ ID NO: 108736 - DNA, 509 bp, Cannabis sativa
tagctatggaaagagtcaggattgtgttggggttcgaaaactgttttgtggtgccaaataagggtaaaagcggtggtttggctcttttgtggaaggacacctttgtggtgagtgttaaatggtatggggttttcttggcgttttacgggattctatggtagtctcgatccgagcagtagaaagtcttcttggcagctgttggaaagacttcgtgacttaattcaaggtgcgtggctatgtggaggagactataatgagataatgacagcaaatgagaaaaaagggggttgtaggaaacttgattctcagatgacagactttaaaaatgccatttccttttgcaaattcagggaagttcatatgaaaggtggggaatttacttggtgcaatgggcgacaaagtaaccttttctttgaaaagttggatagagttttggctaacccagattggtttagacgttttcgatcgtcgatggttactctccttccttggtggaactcggatcatcg

SEQ ID NO: 108737 - DNA, 951 bp, Cannabis sativa
tttcagtttttgaaataaaaaaatagtttaacaaaaaaactgtcaaaactgccaaaaaccgcccaaaactgccaaaccaaaatccgtcaaaaatcgtacggtcggttttatacggttataatttctaaatggtcggttacggttttcgtaaaataaaaaccgtaaccgaccggtcggttataaaattttaaaaaccgaccgattttcacccataatttgagtaaatgtgtggggtgataatgaaaattttgcccatggatgaattatatgtggtgttatggccctatggggcattttggtcttttcgaccatttattgtattttcaatgaaagaaatttttggtggaaattagatgcatttttctggtttttgatcagctctaaacggaatcccccttcccctctctctttctcaattttcttcactttgatattgctttcaattggttttttagtgtgtttagagcttgaagaaaattgtggtgttagttgttgaagagcttgaggtattttttacctctcctctttttattttgttgctgtaaattaaagttgttaatgcatgttttgctagtaactatgttcttagtgcatatttgtgtgattgtaataatttgagagatttgtatgttgtttaagcttgcaaagttatagggtttgtctttaattatgtgtttgtttattgggatggataaaagagggttttgagctactgaatttgggtttgattttagagttttcgatctataatattagcttgtaaatggaatttaattattaaaccttttggaatatgtgattgtacatgtttggccggtctataggacacgggcattacagtttggtatcttgagcgagaaccctcggcgcacacaggggagacacgggcgaggcttacgggcgctggcagggtgcactcggacgtgtcacgcgcgtgcgattgagcaccct

SEQ ID NO: 108738 - DNA, 1068 bp, Cannabis sativa
gcaagcagccattgacaaccgaaccaccgtattgatacgaagagcctaccaagttgctaaccagcaacccgcatccagcatcccactgggtggctcgaaagaaactcttgctgggcatactgcccaaactttgaatggtcagtcgttcaatccccagtcacaggttccacctcagagttaagaggtaggcagccagacgatatctggtaatacatcaggtggggttatacccaataactctgcctagactagcggttctggccaagtgatcggccaaaccaaccagtaatgagacaacctggtgtttcagtatttacaagactgggaacacctcatgatctcaggaatgatctgaatagaaggagaggtttgatgaacaatatattcaaccagccactcagcctgtaatccgcattcaagatccaacttaaaaagatccttaagtggcagtgatcggccaagaggccaaacaagttcacccatctatgcaagcacagttgaatgaactaaaaaatatgttccaaggcctggccgctgaaaggcttaatgatctcgagttggaccgagcacgtggatccctgtttactcctgagatcaatgttctagagctacccctcaagttcaagataccgaccttgaagatgtacacagggaaggaggatcccttatcacatctcaagtattttgaaatgtaaattgattagcaaggggtacaaggagatgtgcattgcacaatttttcctaccacactttcaaaagccgcacagtaatggtacttcaagttgacaccaagaaggttcaactattggaaagccttctccatggagtttcatgcacaattctcttcttctcaccaacgcccactgcatttagaagacctgctcgaagtgaagcaaagaccaggagagcctctccgagattacataagctgatacgaaccacaccaacagttgtgatgaaacccgacaccaaatatggcaaactccaagaattctggaaatttggatgtggaaccgcgacccaatgcttagttaagcatgaaccttgtgttagaaattattttaccag

SEQ ID NO: 108739 - DNA, 520 bp, Cannabis sativa
  modified_base (374)..(376): a, c, t, g, unknown or other
aacctagaccaagacccaagacgcgaacccacacctagagcttgatctggacctagactgaaatccagacttgaacccaaactctgaccgggactcaaactccgacccgaactcaaactgaaactcgaactcagaattgctaatggaactagaaccgaactagaactaggaccaggaccaggaccaggacttaatcccaaacccgaaccaagatcgggacccaaacccacacaataaccgggacctagacccagaatcaggatagggacctgggaaacagaacaaggaccgggacctagtacccgaccaagacccgatctttaacctaggacccagcttgtgacccgacaccagaaatggaaccagactgggannngagattgggatccagatctggacaggtggttggacaaaacccgtagtcggtgccaggatttgggacaaagccctagaaccgaaccctgacaaggacccgaccccacacccggacctgaacccagtcccaaacccaaaagtagac

SEQ ID NO: 108740 - DNA, 716 bp, Cannabis sativa
gcccttgaaacacttaacgtactttctacgttataataactaagtgtaacaacttaggaacatgtaggacatgattgtccagtatgagaggccttatggtcatagagcagttcttaagtttgctcagtacactggtgctcatgccattgctggaaggcatatgaataaaccaaatcgttattggtcatctatgtacaaagcgagatgcctctagcgagatgctcctatccacattagcgtcgaccgcttagaagataggagtgataacgattatgcgattttctagaattatctacacgtgtttaaatggaacatgatcaaagcccatgtttcgtgaaaacagttatgtaattcaaatttaaatgtaaataattgccaacctatattcctataaatagggatagattctacagactaagagacggaaaatttttgagagaaaaagagatcacaacctgtaattctgtatccaaaaatatctttaataagatagactagtggactatgcagatttaactgcaaaactacgtaaaatacttggtgtcattcttattattctacttattaaatttcttgtatctgtgtttaattacgaaataggctcattaaccattaacaaaaattgagagcctacatgataaatgttggattatggtcttatcaagatctagatttactagtatgttatttaacaccctaaatatgaatttctaaaa

SEQ ID NO: 108741 - DNA, 519 bp, Cannabis sativa
tttttcttgagaaatttgcatggagtaatgcaaattttattttatttataaaattgtactttgctattttattattctaaataccattagtttgaatgatataatactcttattttgcataccgtttttatgacacttttctttcattttattttttgtttttttttcctttcattaaatagcaacatagggattaaattctctcacaacatttttttttttttgtctttttatatataatattaaaagctctttttttaataaatgtgacatattatagtctttttttttattttttttaaatttaaaaaaagaattaatcacgtcatttattatttatactcaaaaattatactgttgtaatttattttttgtggtgatcattttaacatgtggaaagcatatgtatttttaccgctacaaaaaaaaaattaccaaaattaaaagtaacactaaggtatcttaaacaacaaaattattatatttagctaacataatttaacttaaaaatctaaaaaa

SEQ ID NO: 108742 - DNA, 610 bp, Cannabis sativa
  modified_base (432)..(433): a, c, t, g, unknown or other
tggctgccttgtttgctgggagagggggattcgagccgattgggccatgttgttttgggttgttttggcttttcaaaaatgccaaattttatatccttgtgccattttttgtcaacttttcatttcttatcttttattttcacaaatgctattttcaacataaaatatatcacaataattttaatgaaaatatttatttaaatctaaatttgcaattattttgataaaaataatgtattttccttaacttttttattttttccccattatgccataaatattaattatgatttataaacaaaggtaaaattaaatctaaataaatatttttcaacataataatatattgcattaatttcttaaaaatattataagaaattatttttatttttgtatttttacactataaaatatgtaatattttggcatttnncacaactcccaactagcttattgctagtccctagcaattcaagcggataacaaaatattaccaatatgaataaatcaaaagaaactctaactaattgaaacaaaataaaatattagtgtaaactctagaaaatactaaataaaaatttgtaatagatataattccagattttgtgtg

SEQ ID NO: 108743 - DNA, 541 bp, Cannabis sativa
tttcattttttttattataaaaaccaacatggatataatattagtagaatctatatcatatatcctttaactaataaggtttaaatcttttcatcaatatatatatatataaaatatactaaaatttataatatttgatttggtgattaaacttttgtagaaaaataattattttcctcaatttgtgatataggtttaatgatataatgttttctaataaaattagaattttaaattataaaaataatgttatatattctataatctatattactgttttgtttgctatataattttttttcttataattattgaagatgatggactcaactaatttagtgggcgaagatttacaatcacgtcgaaaaatagattttgaaagtgaagatggaatattgtcttcaaatattaatataaaatctcttcattctgaaattgatgatgaggcaataccaaagattggtatggaatttattactgaaggggaagcttacgatttttataatgcttatgcctgtaaaataggttttagtattagaag

SEQ ID NO: 108744 - DNA, 529 bp, Cannabis sativa
tggcacgttgtgattggtccaggtggatttatttttattttttattttaaataatcatttaatattttaaattataaaaaataaaaaaatatatttttttaccttttactccctctctatcttttcgtcttcttcttggcacacctgttcatcttgcttcttcaacctatcgcctcctcctccttcttcatcttcgtcttcttgcttctagccccaaagccttgaaatcgaaaccccctgccttctccctctcgcctggttcttcttcttcgcacacccgtgttcttcttcttcttcgtctggatttctggaccccatgttcttcttcttctatgtcgatacccgtgttcttcttctttttcgtctggatttctggaccccatcaagtcgcacacccagatctgctcaggaaccatgtatggggtcattgttcttctccctcatcggcgtcggcctgcgaacactcctcaccaacgccttcttcctcctcaccatcggagcagctctatttcaccacagtgcatcctcc

SEQ ID NO: 108745 - DNA, 1577 bp, Cannabis sativa
gatttgacgtttcaaactttattgtatttgtaatattttaactattagtgatagtccaaaccgtaaaaattgcaaaaatcgcaaaaaccgcactgcactacaccatttcttacggtttgatttctgtggttttttagtttcgtggtgcgggtgcggtttgggaaattagaaaaactgcatgtgcggcttggtttgaaaaaatggtcaaaaaccgcaccactcgcaccgcgaacacccctagagaaaacccagaagaaaccaggtgttctcttcaaatctttgaccaattcttacaaatttcaaccttaagctcggtttagaactttgaggtaagctctctccatgtgttcttgatgatttttaaggttttaagctaggttttgctagttttttttttagatttcggggctgtgatgtgaaattgagaatatgtttctatgtttgatttaaggtttgattgtgtgtgaattgattatcttcttcactactaggttttgaattgagtttgaaaacccaaattccactcaattatggtgtattgggtattttgatgtgtttctggattttgaatgtttaaatatgttgattttatgttattacactgttctaggaagtttaagcaagattggtgaagcttgggtttggttttggggtgtaaaactagatttttcccaacctgccagaaccggtcgaccattctacaggtcactggtgaaccggtcaaccagtaaggaaaaattccaattttcttcgaatttagtttttggctcaggttgaacctagtttagggtattttagggatgtctaagctatttttgaaccagtaggggttagggtttgttcgattatggaattagggtttgtttcggagtttggttaacttgttcaccttgtttttttgccgtgacataggacccgagatcatcgagcgtaatttcactcaggtcgtcccgcacacctgatattggattgaggtaagaaaagctacttccactgctaaacatgtcaagtgagaaacaattgttatcgtttgtgactcgattatgatcggggtaatgatacagtcattaccgttgctgaaatgagtaattactcaccttgaaatcgtagatagatttcttacttatcaattgctttatcaggcaacgatagtgatatttgtagctcgtgggtaaggagtggtaaggatgctttatgaggcatcaaagttggttcgtcttataagaagaataattgtttatgtaatgtttgaatacgcatcgaataaatgtttgtatcggcttttaatggacaagatccaccttttgattatgttttggaaatgtaacgccattttgtaatgccgattttgaaacctgttgtaaaagtttatagacaaaggatccccaaattcagcggtactttgaatgaaacgttatgtttttaatttaattaaaagttttaattaaaccacacttttcttaaactgttaaattataattataaattaatttataaaaccacacacacgtggcgtccctgtgggacagggcgttacaacatggtatcagagcgactaaagtttaaagatcttaaag

SEQ ID NO: 108746 - DNA, 717 bp, Cannabis sativa
  modified_base (239)..(254): a, c, t, g, unknown or other
  modified_base (382)..(383): a, c, t, g, unknown or other
  modified_base (684)..(685): a, c, t, g, unknown or other
ttttctctctaggttatgagactttttttttttttgaacaatctaggttatgagacttcttccttcttcttcttctcatttcaaaaataccatagccttcttcacaaacaaaattcaagccttagtgattgagtggatgcccacacatatcaagtaagccctcaatcatagtgtgtaagactctgaagaatccaaacaacaagaaggagtttcagggtcagatcttggtgatactctgnnnnnnnnnnnnnnnnagggttagaaatctgagcggaaggagtcatttaatttcgctgcaaccaatgtaagatttctcataccttttatgtgttttttaatatcgtattagaagttcatgtttaggatgttaaaaacatacttnntagtaaatctagatcctagtaaacaatattccaacaccaccgtcttactcactatgattcagtacttgactagctatgttcgggcatggcactctgtcactcaaggtttcgaattggatcaacaataaaggaggtttgaaatcactatttaaggtgtctctcatctactagttgtcagagaatgaaaactagatttggtaggttgaatagttaagttgacaagaagatgagatcagagcatcatgttccttttatagtgtttcaactagagcttagagctgaattatatggattaaaaaannataaaatattgggaaaaaaatcacttaagtgt

SEQ ID NO: 108747 - DNA, 640 bp, Cannabis sativa
gctcgaagaagtcattcaacgagttgaaggtgagcaaaagccgggcaaaacgaaggctccttccattggaccatccgcccaacttcccagctattctaacaattcaactggcaagcgttcaagcaacaaccacaagcaaggaaacaggaagaaaggaaagttcaccgataaatccggacagactccccatgatcatgccaaacacactgcattcactattctaactgaagatatagagagtgtgtatatggaaactcagtcgttaatcccgtacaagatgcccgggcccatgaagaaagataccaacaaaagcgacatgacgaaattttatcggttgcacgtagactacggccacgacaccaacgaatgttacaatctgaagtgggaaattaaatttctaataaagaaaaacaatccgcacctgtagaagtatgtcaagaccaacgaaggtcaaaacaaccaggatctgctacctccacccgtagatggacacttacaagtcattattggaggaccacacattgttggagattcgagaaaagctcggggagaggtatgcctggaccgctcagcacgagcaagaagaagtcatcctggccgtggaagaaaggaagcctaaagttccacgagcaagagagcc

SEQ ID NO: 108748 - DNA, 905 bp, Cannabis sativa
  modified_base (850)..(854): a, c, t, g, unknown or other
tcactttgtatatttttgatttctcatatgaatagttaggccttctattcatatattaggtttaagtatttttttcaaggcatcttggtgtctcgtttaacacttttctacaaaatgtgggtcgttagtattcagcttcgcatgtaacttaatgttgttcttatgagttatttctcatttacaactactacttttgattttcctttctcatgggaaaggttctttaatcaaaaactataaaaattttaaaaattctaaagtagtgggtttgcaatatatcatgtatttctagatagattccggttaatcatacacatatgcccctcaaataattttaaaagatgacactctgtaattacctgaattatgattaactttattaataactgaagttcaaaatattacatcataaatagaagttacaacatcaattcactggtagtagggtcgcaaatgttccacgtactagtagttctttatcagtgagccataaggaccctcccagtttggattaaatactcatgcaaaagtgtctctcgtatttgtaaaaacttgccttggcaccaagtctccaacattgaagagcctcttcttcaccttcttattgaagtatcttgtcactcagtgttggtatgctgcgttagtggtctgtgactcagtacgtttttcatcaagtagatccaaggacaattttaagagttcttgtttttcttcttgattatagaaatctcatctgtgagccacgatatttacttctaccagcagcattgcctctaagccaaatgctaacgagaattgagtatgccctgttgctttcttctcagttattctatgagcccaaagtacttgnnnnngttcatcgacccatctacctttggtagcgtctaacttctttttgatagtat

SEQ ID NO: 108749 - DNA, 753 bp, Cannabis sativa
aggttgttatgatccaaataacacctttgaagagcaaaatatccttagacagcgcagaggtaaggtatttgtttaactgtattttggtcttaaaatatgctccaaacatctgaaggggctttttgttatgatccaagatagtgttcaagtggggggttgggttcatgttgtatctgatactatgctgcaatattttcgggtgtagaaagagatcggtatggtgtgatgcggtttgaaaaactctgccttgatggttaaatgcttgctttacttgcaccatgggaactaaagattacatttttgctgtccttaaaaattttgctctacttgaattactacttcaattgtctcaacagaattctgtttgtgttttctaaaatcagttgacatgtgtattattgatctggtgtgatactttattaattgatattctaacgtggtctttggaatttgccattgtaggattagatgtggctcaaacagattgagcacttgccttttatgagaagaaagctcataaaggcaaactttgggatattctatttgtttatgcttggtgagacaatgatattgggatatattgaaattaatgtaattttttttttactaataacaacgtacatataatacgtttatatgttttacttattaaatacattaatccacaatttacctttataaaataaattgtttaaaaaatcataccactttacttatagataactaaaaaaaaccaacaccttaaataaaact

SEQ ID NO: 108750 - DNA, 1176 bp, Cannabis sativa
caaagcttttaactataaggaaaatcttcagagctggtgcaatggtatattaacgggaaataatggtaactatcttaccgaaaatattcaagttctctaaagaaagttgtagtggtggatttgttctactatgttgatctaaaagtgtttgcagttcattttcaatctgaccccttccccctgctgacacctccacactcttggccacattcaagtcattgactgcatagtcataaactcccaaagaagcatttgccaaacctcgtctgtaccatgcctacaaagaaattaagtaactaaaggagaaaaatgaaagccaagttatataaactagctatctgtaacattcccattgatcagtagcatatcttcctgacaatatccatcaaccctgatctgaaaatcagcattgacacatcaaatccgatgataaatgaaactttcacgaaatatattccttgaaatatgcaagtaatgctgagaacatatatttattcttcaaagcatgataaagcaatgatgacacctaaggcattcaggatgaaagagcataatcacccaactgggaattatgttaatgttacatattccatcttaaggatgctagagaaattggttaaatggaaaaataaacagatattctaatctgaaccaccttttttttttcatctttgtaattcttttccaaattttctaatacaaccatacttgctgaccaagaaatcatagatgttccctttgtacacagcaatatataaatgcaagatattattaaataaagcagctcacctttgcatagctcggataaaattgaagtgcacgatcgcagtctcgtacacattctgttaggtgattcattttctaaagggaaacacgagtgcataaattaaccgatccaccaatatgcagagatgaaattatcaggcagaaaacttgaagttgaatcttcggttaagagattattatctgtgaactgcatgcttctagctactattcaagtcagttctaaagaaaataagaaaaggaattgatgcacaacatagatagttctaactcttagcttctagataatgactaattcaacacttactttattgaaacctccggggcatgtacaaatctataaatgtcataatatacaatacgtgcattatgcataattatttacctattata

SEQ ID NO: 108751 - DNA, 3101 bp, Cannabis sativa
aataggaataaaataataaaaaaaaatacaagttagctatttttgactagagatgatgatctaacgataaaaaattaacttccgaggttaatcgtcaattttcaaagctcgggttgcaacggcaggacccgctctaggtaagtcggagcttattttcgtaactctcttggggtaaaatttagagttgataacttcaaaattgcgattgaagtgtgagatattacttgatagagcattgaatttgcttcgaaatgcaagttgaatcgtatcaatcatatcaatattgggtaagttatggctattttattgaaggttgttttgtgcccatcgcccacattgacatccagtgcccacgttgacatatgacgtcaatctggatgctggatgagtggaaaaatgtcatggggatgtacttttcgaagcctaagtaatattttgacatcacttaatctgtttctgtgttttggtgaggttggtcaccagttcttggagatgttatttttctatataaatgagagactcgaaactcttcatttccaagtgttcttaaccatgttggttatgagaaatgcaaaatagtgaatttgacttttctggcttcatggatcttggttattgtggaaaacagacggatggttgaaatagaatcaaaatcggataagcaaaacccagtgcactaggtcatttgtcaacctaggcgccgggtgcttatttcggagcttccaagatgtcattttgaaacttccaatgttgaacttgaggacgattctcctaccccatttttaaccattatatattgaatgttcagattttatttggcatttgaatgatcgaaaaaatcgcaccaggttgattgtcaacttggacgttgggcccagcataaggtcaacctaggcgttgggctctacttccagggcctcaggtttttagttttctctctgattttgctcattattttttatgacgaaaaaaatgctcggaacactttttttgaaaacttgattggaaacaacccaggtcaacaatatgtcagcttgggtgctaggcccagtgtcaggtgtcaacctgggggctggctcccctttatggcccttcaaaagtttcgtttggtccccaaaaatagttgaatcttactctttattgaaaacagagaagatgctcacaaaagttctcagaaaacatcattgaaattggcccaaattgataaaatatcaacctgggcgttgggccagcccttggtgtcaacctgggtgttgggccttgcttctggcacccaggaagtgttatttcttccccaagataacatattttcttgtttttgatgaagacaaagaagatgcaaaagtcggatcatcgatttgatacttggaaggtgacaaattatcagcctaggcgttgggtacctggaaggggtgtacgctggtgggtttggttggtttatgctatattttattcaacccaatgtaaagatcgggttacaaaaatctaagtgcaacccgcccaattaagaaaaaagaaaatagtaatctgcctaataaaattggtcagtttagtcgggttaacccgtccaaaccgaccactaatatttattttttaatttatttttttattttaacattcaattgttatgttttagtaaaatgtaataatgagacaaatatatatagattgaatttaaagttaaaatcaactaccataaaaaaaaacatattagtttcaactttatattttttaaatagttatctaaattatatgatatataaatatatataataaaaatatataaatatattaaaaaaaatctcttaatcggattggtcaggttaattcgggttgattggacgggttatatttttgttgagttttttggtttgcattttttgttgggttatctcagtttggtttggacgattattcgggttggacactttataaaagtttatgtatagccctagttcctgggtaccgggtgctcaaaaatgaacttactctgaatctaattatgatacctcaaatatgttcgtggtatgtctagtttgacccatgtgcactaatacggtctcggaaactgaaatcctagctgaagatgtcaacttaagcacaagatgaaaccctaggtgtctaggttgacttccggggtgcatgttcatgtaatttcagctcttggggcctagatttggttactccacatcttcatggtatagaatactaaaagatagtgagttggaaacaagttatcaaagttcaaacttccattccaaagttcccaaagtcaaccttggtgtaaggctagggacccctcccaagtcgacttgctatgactcaggactactcaactccgagatgtcatctttcttaccacgtgtcaaacatggatgtccacatcatcagggctacttttggtgtaagcaatatccttttgagtgattagctcgagattaatgaagatgaatttcattcaaaaaaagctttaaaaaaacttttatgaaaattttattttaaaaaaagcctttaagaaatacttcagcaccatttgttctaaaagggtttttatagtcatgtgttagttgagctatagttaaaaaacttgaaagttggcatttattgtccacggtgtcttataacacctgaaactactaattatgtgttagttgagtgtgcttttgtgcaagaggttttggagtaattctagtgtggtgttgtcaggtggacactataattctagttttagggcttggttacatgatctttttcaaagatatgtcaagaagaaatgcgctgaagtttccatgctatgttagtcaatttagagaagtcaaaatgctctagtttggaagcaaaaacatgcttcagttcaacaaatcaaaatggtagtagctgtcacgcttcaaaaaaggtgtattgctcgggattctaatgaagtttctatgacttcgtttgaaccaagagatggttttgagaaatggatgaaactgttagactataatatataatatgaaaatacaacatatataaacgatatgtaatgcgaaaaatactacaaacatatcgaaatgtatatgcaacgaaagatcaaattacctccagccattgatctttga

SEQ ID NO: 108752 - DNA, 807 bp, Cannabis sativa
cggtaagttgagaatctgacatgacttcaatggttttggcattcaactcaatggataggtctagcccatcgattaacgcctcgtattcagcctcattgttggtaagtttgaagtcacatttgattgcccgttggataacatctccttaaggggaggtaaggacgattcctaggccattccccttgctattgcttgatccatctaccgctagcatccatgtcgagtttgtttgctcatttaagcataataattccttttctacttgtacctgtccaacacaagaaaagtcagcaataaaatctgccaatactgtgacttgatggctgtcctcggttgatatgttatgtcgtattcactgagctcaacaacccacttggtcatgcgtccagaaagttctcgtttgtgtagaatgctacggagtgggtattgggtcagcaccactataggatgacacttgaaatagggcctgagcttgcgccctgctgtgacaagtgctaaggccaatttttccagctgagtgtatcttgtttcagcatctagcaatgtcttcaaaacatagtaaattggttgttgctttccttcatcttctcgaactagtgcagcgctgaccgctgcttctgaaacttccagatacatgtacagtgtttctccatcctttggctttgctaggagtgtaggcgggtgagatagctcttgagctgtcttagcgcttcttcgcattcctccatccacacaaagtctttggtctttttgagagttgaaaagaataagtggcaacagtcggatgattttgaaatgaaatggctg

SEQ ID NO: 108753 - DNA, 579 bp, Cannabis sativa
aaaaaaaaaaaagcacataaaaacaacagaaaacccactataaaatacctaaacagcaacataaaaacaactatatataataacaaaaagacaactataaatcaataaaaaaaataacaagacattaaccttgttaaaatatataaattattcataatcaaattcgaataaaactacaaaaaatatatataaaaaaatactgcttttattaatcatgagagaaaggtaaaggaggagtgctcttaattatttttataagataaagagtgttaaaaatatgaaaaaaaaaaagtgtgaaagtaaaataattatattttagtaaaagtgaaaagagattaattaagatttttttttataaaatgtgattaattaaagaaaatagtaagaaatagtttcattgcgaatcataagaaaatataaagagagaaaaaaaaatataataagtactgtttgtattttttaaaataaaactttgtgagagtgaaaaagtgttagaaaaaaatttatacacttatatatatggaatactttttaatgggtattactcatgaatgggtacactacaagaaatgtcacttt

SEQ ID NO: 108754 - DNA, 557 bp, Cannabis sativa
taagcaaggttagtttgttttttcatgtataccattgttatgttctttgacacaagctgttcaccaggggtcattttgtattttgtacttgactgtttgttgacacttgcataatagagaagtgtttattctctttaatagtacaatgaagcgaaaaacatgtagatgcatttctctatatttgtgatatgaactgaaagctaattggacactgtcttttctgttttaattcactttctttctttccttcaatggctcgatatgagaagctaagcatctttaattttgggttctacatggaatagatctttactaacacgtctagcaattcagccttgaaaatgaaattatgttgtttcaagtgtattagatctagcactgctagtatttacgttatgatatgtaattaatctcaaccatacaattgtgagctttactttcgaaatatcccggcttaggattaattacacaacctttgtgtaatttttgaatttacaaattcagagcgtctatcattcctcaaagggaaatttgattttctatacttagaaaatcaa

SEQ ID NO: 108755 - DNA, 1140 bp, Cannabis sativa
agcatggcatcacataacacaaacatactctagatgcttgcatactgccaaaaaatggaaagcggtaaacagatgatcacaaaaaaagtctagtatttactcccaatacttactgcaccatgagtcgagcttgtctctgacgatgaatgtacatgtttggtcggtctacaggaagtttaaaaaccttggcgctctgataccaaattgtaacgccataaataattaggcacactacccaagatacttatgaaaccctaatcccttaatcgagattactaataaaattagcgcgaaaattgaacttgaatcataaacagaatgaaaataaaacttgtaatattttaaactttacaatctaaaagttatagaagttgggatcccaaaaacatttgcagaatattattacaagtcattttccttcagctgacctaagcggcaaaacagagtctcaaaaacacatcattggtagaccccaacccgcttggtctgatgtggcctggacatgtacattcttcatccagctcctgcactggctgattagcaatcgacttaccctatcctgcacagtagagcacctgtgagccaagcccagcaagacagtataaaacatatcaataatatgctcatcatacaatataaacaaaattgccatttaaatttgtctgtgtgacacagacctgcatgttatgctcacatgttcacttatgtctacgtggcgtagacctacgtgtttctctcacacatctacttatgtctacatggcgtagacctacgtgttgctcacacacgtctaaatacaataaggctttagaatggttcatctcagctatgattaccgagtccaacctcattatgccttgagcacataatccttaaatttcattacatttaacatggtatggcatttacacaatatatatcactacggtaataaccctacgctattaaccgctcatattagggtaataaccctgatcccagttacaattaatcacatatatcatattcaacacaagttccaccgcgcatactctatgtgctaactactgtcttacctgttgtcccgcaatagcagagattctgaatccttgggtgctcctgaccaggtgccgatactcctagtcacacaatctgggattt

SEQ ID NO: 108756 - DNA, 776 bp, Cannabis sativa
tagagagaataaaaaattcatatatttttcattaattggttaagtgagccaatagttctatttaacaagttaccactcttcacaccaacaacaaaatatgttcttacactaataaattactaaactaaagagtaatatttgttattattttctgttctttaatattagtttaagacaggggtgtatcagcttgacttagcaagtcttggaatgatggctggttcaagagtgagatataagaggggtagctcaatggttaggcatgttgtttactctcgtaaggtttgaggcctcatcatctaattgtaaaaaaaaattaataattaaaaaatttattataaggacataattttaatttatataaaaataagtttaatttttgtaaaaaaaaattgtaaatattataattaaatggcttaaatggtaaaataattatagtaagaatttatatataaataaaaaaaattatttataaattttaattgctaaaaaatatcttgttaaatatttatttaattatttaaaaaatagttaattataattaattaattctaaaaaaagaagttttacttattggtaacatactattataagtaaaaaaaaaaaaatataactatgatagttacaataaaaatataaccattgagtagtcatccacatatatatatatagggatatgattttgtcccgtgatgtactttcaccgaatatattctgttgtacattagatgggtctcagggtatattaaatgagtgtcagggtacgtttctacttt

SEQ ID NO: 108757 - DNA, 1644 bp, Cannabis sativa
ctttcctagaaaagaacaagatggcttaggatcagcgaaacgtccgctccaatttcacaaaaggaaaagatcagcagaggggcaggctctctagagagagtattcgccctcaggactgggagcaccgaaaaagcgtatatgtacatcaagagcccggggaaaaaggaagtaaaaatcgtaaacttccccctctggtttgaggtaaaggttcaatgacaagcacggtgaccttaggaatcacttggagaaaaagaaacaagcaatacaattttcggagggcacctcgagtgaaggaattttggatgaacttgtaatcctctaaaaagatatagccaaagtctctcaaaggcaaaagggagatgatttagagtctgattgtgaagaccaagagttgtgtgctaaaaacattctagagccagaactcccgaaaaaatttaaaatgcctgaaaagacgatgtacgcagaaggcacataccccagtgatcacttgtctcgattcaattgggtaatgacagttatgagggtcagtaatggcgcaaaatgtttgtgtttaccgttaacattaggcgaattcactgtggagaggttcaagaagctagaaccaggacctgtagattgttggaataagttacaagtcggctttcgaaggcagttcctggtggctaggaaaatgaaccttgaggtaagtgccttgacaaacattaaacaacttctaatggagacctaaaaaactttattaaaagttcaaagaagaggcctccaagacaaaaaatgtaatgctctaatctatagggacgccacgtgtgtaattttataaactagtttaatattaatagaataattaattattaaaaattgtgataatattaaaaacttgactaacgtaaaacattataaacaaacattataacgacataaaaagtgtgttccggggatccgattataaaaaaatttgctaaaaaaatatatacgacaaccatttaaacacaaaatcaaaatacacagcagatatagccagcccgaaacaactcctggcaactcagaacgcaggccggtgaggtcaatatgtacattgctggagaaggtagtcaactcatggcagctctaactttttcttgcccttacctgcaccacataacacccgtgagtcacaaggactcagcaagaaaagcaataaaaataatcatataatttattatttgaatattatcatttataaacaaccagaatcaaaccattactcattgttcataaaatgaaatccaaatcactactggtatttgccatgaataagcattagtatatagatatttggtaatacaaaaccataacattcaacagtaggtaatataactagccatatccatagaaatagatatgctcatatatgtgcattgcctaatcaggcaagcccgtgtcataatacaatatcataaccataacatttgatagtagataatataaccagccatatgcatagaaatagatatgctcatatatttgcaatgcctaatcacacaagcctgtgtcataatgcaatatcatatacaatatcaaaaccatatcattttacagtagataatataaccacccatatgcatagaaatagatatgatcatatatttgcattgcctaatcaggcaa

SEQ ID NO: 108758 - DNA, 580 bp, Cannabis sativa
taaatattcgggctgcatccgctcgttcttctaatgtcgaggcaagcttttcggcttggcttcgcaaagcatcctgtgttggttgcccatcctcacccaacacaagctcctccaagtcaacaaataaaggcgcctgaccgccagtgatgtaactcacaaactcaatctcattcgctcggggacataacatagagtacactgtcaactgaaaaataaaacaaatatattaatagatagaaattaacatgaattaaacataaagcgtaagaaacttacatttctagaaaataattttatcactttgtccttcctgagtgacgtttttggcttactctcctagttccccattctcggaaagcgatgcgacttcttcactgcatactcgttgctcaactccacgatggcctcgtatgcccaatactgcaacgctgcaatatagccataagatgagtatttttcctccttcagagtaactcccttttttaatcttcttaagcatcttattcttcacatccaagtagtctttattacaagtttccatcagcttggtgtacgaaatctttccccacgggtactcgta

SEQ ID NO: 108759 - DNA, 722 bp, Cannabis sativa
cataaattatttatgtgtattttttgatagaataataatatatgcactgataaattatatatatatatataaatacatattaattaaggtgatatatgtattttaaaatagtattagtttaaataaatgtaattagttaaaaaaaaataaggtcactatattaatagcataagctttgaaatttactaaattcattcattcatagtggttgcataagcctaaattaaaaactatgttatttgattttttagatgaacttgctctcgaattatttgattttattgggtgattgtaataattcgagaataagttcatctcgaagtagattattattcttatttttcttttatcttagtcttatgcatatatatatatatatatatatactaattaagaatgaactccatgacacagcttatgcatggttgaagtgcctaagaaaagaagaagaaaaagattgctatgaaactatgagagcagcaaatatattgggttgtagaggaagcaattatggtgcacaagaaaagtatgtaagacttagccttattcgaagccaagatgactttgatcatctattacaccaactcaacattttgatctcacaagagcaaaattacactgccaaatctatatcataattaatcaaattactattgctattactaagtgattagtagtatttgtaatttttcatattcactattacaaattaaaagttttta

SEQ ID NO: 108760 - DNA, 652 bp, Cannabis sativa
  modified_base (40)..(41): a, c, t, g, unknown or other
aaggtactgtgatactatgtccaagaactttattggtatnnatttctattacaacagtaatatataaattggaacaattacaggatcaagaataagaagcttctgtgcttcatcttcaaccttggacattctccacccttctgtccaaccatctgacttaactcgctaggatagcaatccaagtttaagcagctggagcttgtttctttgctagaaacttagggcattggggtttccaatggcccttttcattgcaatagaagcattttccttttggctttgcctcgggattagcagcctttttctttttaactgttttcacaactttaacaggcttcttgctattcttccaattcttcttgttgttgggtttcgaagcagaggcaatgtttgcctcagccttggccgtaacattagcagtgccagaattaggagctttagttcctcctttttgtggtcctccaatcaaattttcaaatgtttgaaggttgttgatcaactcgtggaagtcaagctccaacttgttcatgacataatttgatgtaaaaggagaaaaagctagagtcaaactattaaagatcaaactcacttgagttgtctgatctataacagctccatgattctcagtctcttggaagtaactagtcatttg

SEQ ID NO: 108761 - DNA, 852 bp, Cannabis sativa
catttatatttcattatgatttttaatagtgtcgaataagttcgaaactggttttacaagttttaaaggttctgtaatgagattgctctattttatgatgttattgtatattttttatgttaagtttctttttattattttgtttctaggtttgaaactagttttcacacttattttttgttttagattattgttgtgcattgtgtgttgttttgtttatatttatgagtattttgtttttgtttttttctccatttggttgaatgatgaaactggtttcaattattttcatcgcatatcatttttgttttgttttcataatctttattattgttgtgtgacgaaactagttccttggtgaagaaactggtttcttggtgaaggaactcgtttctctatgaagaaaccactttcttggtgatttttctggtgattttgctagcgacaatgctaattctgacgacttttttgacgctggcagcaactccatcgactttttcgacactggtagctactccaacaacttttctggcaccaatagcaaactccggaatagtcgtcagaattggcattatcgtcggtaaaatcatcggaaaaaccaccaagaaattagtttcttcatcaagaaataggtttcttcatcaagaaactggtttcttttcttggtgattttttctgtgatttttccggtgataatgctaattccgacgactttttcggcgccggcggctacttcgacgacttttccggcaccaacagctactccgctgatttttctggtaccgacaacaaactccggtgactttttcggcacgagtgacaagtctggcgatcaatgtagtttcatttgtt

SEQ ID NO: 108762 - DNA, 894 bp, Cannabis sativa
  modified_base (28)..(31): a, c, t, g, unknown or other
cattagccttcgcttttgttgaacaggnnnnaaattgggatcaatattcagaacgtgcgaaatgatagaaggatcaattccaatcatatccgcatgtgaccaggaaaaaaacgtataggttttttgtcagacctttttcgatctttagctttctgccaggatatctagatcgatttcaatctcttctaactcttccacaggttcaacattactgcttgggtccccaagtcgaggatccacatcttcatccccgccttgggaaactccctacttggaagtgttttttcccttgtctgtgctctggatggaggatacttccttcttagccttggccactacaaggttataacattcccgagcagtctgctggtttcttctcagacaccctaccccattctttgttggaaactttaggcacgagtggaatatttatgtgatagcctttaagtcatacaaggctggtcggcctagcattacgttaaaggctgaaagaacatctaataccaggaattgtgccatgatagtcatgcttgtcggagcttgtccaacagtgaggggtagacgaatttgtcctaaaggtgcgactccttggccggagaaaccatagacaggcggtagacatggggttagatccctgagctggagtcccatcttttcataggcagtcttgaacaagatattggaagaggctcaattatcaatcatggttcttgccacaattttgttagctatgtggacctccacaaccaacgggtcgttgtgtggaaacctgattttgacagcatcttcgtcgctgatggtgatggtaggccctcctggccgtgcgattttaggattcctttcttctatggccaggatcacttcttcttgctcgtgctgtgctgttcgggcata

SEQ ID NO: 108763 - DNA, 1334 bp, Cannabis sativa
tcttccttgccatacttgtgtgatttttctatttgtgtttttatatctaccactggcttgatatacatactggaatcaggattctatgtgcattgaaaagctgtattttatatcatttctcccaactcacaaaatcgtaaaattatatgaattctttttcaggtccctgggcgcaccccttgtagattcagtgatttctgatgccttgtttgaaaccactctgccctcgaccaatacaggaactcttgttgaaagtaatctcgaatcagtttcctgccataatgactcattaactgacaacatcatgtcagattcccgagctctagttgttgttcctgcaataagcatggaggcactagctgttgttcccgctaacaaaaaatctaagagatcttctgagcttgcacagcgtcgtaccaggagaccattctctgtgacagaagttgaagcattagttgaagcagttgaggagcttggaactggaaggtatgtccgttgcccttaatttgctagcccggagtagggagttgtgttcttgttttctaaggctatgcatggtactcatgatgcttcattctgcaggtggcgtgatgtaaaattgcgtgcttttgaggatgctgatcatcgaacttatgtggacttaaaggtaaaattcatgctagatcctcttccctcttatttggattggagcctttgggcatactaacatgagtggctttcactgatggtgtatattggtgtttggtgtcttattttgtttatgtcagttgggccttaaaagtttgtgtaaataaaataattttgtgtcacaaaatctgctgctaatgttgttatgtggctattgaataggataagtggaagacattggtccacacagcgagaatttctcctcagcaaaggaggggagaacctgttcctcaggaactcttggaccgagtattggctgctcatgcatactggtctcagcatcaagctaagcaacagggcaagcagccgagcggtagtttgaagattacggactctccagtagacagaaatggtgtggaaggtagtcattcatcatgatgtaaaggtaaaggaaactaaagcaagaaaataatgttgacagaaacaggggaaaccaaaacaaatgtacaaatcacgaaactttgtaatattatcacactcacttttattcattgccaacttcattgtcaatagagattggcctttgtaaatggtttgttggaataagatgattctaacaagaacttaatctcttttttttttttagatttaattgattcatttccacaaatttgtgaatcgttatgtagaaatttgaaaggacagta

SEQ ID NO: 108764 - DNA, 729 bp, Cannabis sativa
atgtttttctaagctttgaatattcttgatttcatgagtgataatggtgctagatgttggaaattttgttgtgtgaacttgctcatgtggggactttcacatctctcattgttggtgtttttctagggctgttgttagagattaaattggatctttggctctaattttagttgctggtttttggtgtatctagttgcaagttctatgttcttgagtttgagttatagatgggtttgctcaagttggagctttgaatgttatgttgtttaaatctgaaattgtgagttgtttctgctggatttaagcatgagaattatgtattttaatgcctacctttgtacttgttagcttatgcaagattaatttgagttctgtgttgatttgggttgatttgaaggtgattttggggctgaaatttgaagtttttgctagattttctgggttttgaacccaggtgccgcggcatggcttttgcatgtcgcagctcgccctttttgttctaggcagatcctaatacaaactttgaatagtcataactttgtgatccggactccattttgggagttctttataccgttaaaaagctcgtttcgagctctatgtgaatatttgtgttttgcatgccaagtatatatcttatggatgtggaatcaggggttaaccctatttgtgtaaatcccggaattgtgactaggattaccggcacttggtcaggagcacccggggatt

SEQ ID NO: 108765 - DNA, 820 bp, Cannabis sativa
ggttcgggtttggttcttcgtctgggttcttgtcctaggctgagtcccagatctagacaccgattggtgacgtgttccaggccccgttacctgaatcctgagtcaagacctggatcactgtcacgggtctcggtctagttctggttcaggtcccaggtcctatttctgagtttgggtttgggatcgagacaggggtacggttctaggtcccgaccatggttctgtgtcctttgcctggttccatgtttatgtttgatttcatgttcgtgtttgggtccggagtctaggtttggtttgggatccgggtccagctccaaattcgggtgtaggtcttatttgcagtctaggtcctggtccagttaccgttaaggattttggtccacttttagttatgattccaagtccaagtcctagttccagtctcggtcaactatcgcttttagttccaatatttggtcacagggtacaggttcgagtccacttttgggtttgggactcggttcaggtttgagtgtgggttcggttccttgtcagggttcgggtacaccgactacgagttttgtccaagccctgggtcttgatctggatcccaatctcgggtcgcagtctggtaccaattctggtgccgggtcacgagctgggtccgaggttcaagtttgggtctgggtccggtactttgtcccggtcctagttctgtttcccggttcactatcatgattctgggtccaggtcccggttattttgtgggttagggtcccggtctaggttcgggtttgagtcctagtctcggtcgggtttaggtctctgtctgggttttgat

SEQ ID NO: 108766 - DNA, 540 bp, Cannabis sativa
tctaggtttttacaaatgaaacactcttctcacaaaaaaaaagatatgaaaatatgagactagcatagataaattgctggaacactagattttacaaattttattttttcagaacttttagtaccatttgatccaaaaatagcgaagcctctttgacatgcattgtgaatttcttcaaaaatagaagattcagggttaagcatatttgagcatttttcttgaaattttcaagttctttctttaataaaataattttttcactttttaaacaaaaatcagtctcatattatttaattttcaattcaagagattcagtttgatgagacaattgtttataatgttctatttatccacttttcatacataagactcaatcaaggactccttacagatttcagatttatcggaatcatattcctccttaatggaattattcaagcacaatgatctttctttcactcgtgagtcacaaacaaacttagaagaaattgaggttggtgcaacattgttagaaatatcttcatcactatcagttttatc

SEQ ID NO: 108767 - DNA, 746 bp, Cannabis sativa
ttcatgtagtgggccagcatctccttgccctttttggcctctggaagcacaggaaaaggctgagtgggtgcctgcagccgctcaagagtactcctgactagttcagacccagccgttggtggtccagacaccttggacttggcagatttggggtaaaacggttagcagcagtcagcttctcagaaaggtcaatgacctctccagaaggtctcttctccgaggacccctcaccgcccttagacttctttgttggaggagaggtgctagagcttccgcccattctcttccttagagcatcgattatctgccgagacatgtctgcacagaacaaaaatagaatggttagaaacaaccatcagaaacacaaggcatgaaaagcaagaagctcaaaagtaaagtaaaaggcaaggtgaccgcctgcacagacactcagaagtctatcacacctgtcatcgctctgatttgagacagagaaactttcccttttccaaggacgggaggtggtggtcgaacaggtgaaatgggctcccttatgcgaacccatgttcaacaggcctgggcgtggccgggagtttcttcttcctcttcagcagagtcacctgctcttcctcagcctcatgttcaggatctgaagattcctgagcatactgttttttcccttgcacctcctttcaacttagcttcccgcttaagttgaattagctcattctccggatgagcttgttcaggccggccagcatcagact

SEQ ID NO: 108768 - DNA, 2200 bp, Cannabis sativa
agagagaaagagaggctagggtttctgacttagagtgatttggaggcttagtgatttagcttttgtaggctaaggttaaggcctttatataggaagcctaaaaccctagattacagtttaaatccaaagatattttcatagtttgtcagataattacaaaagactaatgtgcccttaaatcttgatattatttagccattctgttgggcttatagggcccaattcgtcgcccatgacttcttgtccacattttgggctatgcatgaagtcctgccaggttaatcatggccgctcaaggcctgcagggtgaggtctggtcgcccaagacctgcaagataagctttggccacctaaggcttgccaaaacttggcaggttatgtgtttgccaggatcctacaggtcactatagctctaccaaggggatgccagccttttgctagttgaggatagctttgtacaccgttttcctgtggaggtcaagtttccttagtcgaagggaggctccttggtctgaagtcaccttttgggcggccagcttgtgtacaaatcctagccgtcccataggctcaccctggctggtctataggcttctcttagtcggccaaggatgttggtacagccctttgagggctcgccttacaccatctagttgatgcttcacggttttgccatatcttgcatggaaaccttattctgcttctggcagggctgtactctacttgtactctatttttggcttacgtggacatgccacgtcaggtggtcaaaatttaggttaacaatgtacatacatagatatatacatatatttacacatatacacacacatatataaacaaatgtaaaataaaataaatgataaaaagtagagtttaattatatatatttatacacaaatatatctaaatttatatccacatttaaataaaaatacaaataaataataataaaaaagttaaaattaccgcctgagatggggtgtggtggggctacggtggtgctgacggtgggggtgaggtggtgcgggtgggagagaggaaattaagatagatagagagaaaagggagaaaagatggtggtggtggtggtgctgtgatgcggtgatatttggtggtggttgtgcggtggaagaagaatgaagaagaagcagaagaaagaagaaagtggcgaagaggaaggggcttcgaccggttttatttaaatgacttttgctggtgcatttaattgcatcaacaaaagtttattatgcgctggcaaagcctttccaatttaacctaatataaaacactgggttttagctaaacttttgtcagcgcaattatgctacggcaaaaggtttcccaccaacctaaataacacgtgagaaattttctccttttttttgggacttctatatatgtgtcgagaaaagtctaacttttccattagaacaattttttgatacttttgtcggtgtgtaattgtgctggcaaaagtttttctgccaaacctaattttcacgtagcaaaaaacgctccttttcttaccttttactggcgcatattttccccgataaaagtcatcattatgccgacaaaaattctatgaactattggcaattgttcgcactttttggcagtttacttctagcttttgtcatcacaattcacgacaaaagtcgtatttcttgtagtggctactattttttgtgcgttaggggaccacttgaggttgacatgtgttgtgcgtgtgcttcctttgcatactgttgtgtctgagtagttgtcataggataaaagggatgctcccgttgtggtacgcacactcttaggatctgacacaggggacaaccccttgatactgtggaatttggtgtcaaaggatcgccacgtcagctttagcttggcttctgagcgtctcttggaaagcccttccaaatgtatcccaaatgctcattcggaggatccttactgcttaggcgaggcgcccttccgaattcggagatattcgagtccatacgtaactatctgatatctcggatggtcttgaggcccatccttccaagttgtcttggactattgtcttgttgctattgtgcagaccctaaataattaactttgaattgaacatgccacgtgtcttcttttcagaaataaggataacaatgtatataaaaaaattgttagataatgattgtttttaatcataatctctaaagtt

SEQ ID NO: 108769 - DNA, 1393 bp, Cannabis sativa
gattcaacggaaccacacttatcccaatgggaaaagtgaggttgccagtcaccctgtgtccggacacaccccagagcacttttaagtactgtacattcgtggtggtagattgaccaactgcttacaacgcaatccttggccgaccggccctagtagactttggtgcagttacgtccattcgacacttgtgcctgaaattccccacctaggaggctggaataagagccgtgaggggcaatcaaggtgaggccaggcaatgttatcatgtcgcggctcacttgccagtattgatggtccgtgaagggatcgacacagaattggcagaagaagatgagttggatccctgtgtgggatccaaaaaaattgtagaacctatgaaggacgtcgaggaagtgccagtatgcgacctcgatctcaccaaaatcctccggctgggaaagagcctagaactgaaggaaaaagaaaaaataattaaagcactaagggcagccacagatgttttctacgtggtgccaaggagacatgaccggcataagtccccatgtaaaaacccacgtccttaacgttaatccagatatgccaccagttcagtagaagagacaccccttgatccagtaaaggcgaaagctctggagaaagaggtggacaagctactagctagtggcatgatcccgaatgtatattacccagaatggctggccaatctagtactggtgcctaaaccaaatgggacatggcgggtgtgtatagattttaccgatctaaacaaggcttgcctaaaagactccttccccctaccccggattgaccaaacggtggacgccacctccggattcaagctattgtccttcatagacgcctatgccggctacaaccaaatcaagatacacattacggatcaagaatgcactagcttcaggactgataaaggggtatagtgctacctggtcatgccttttggactaacaaatattggtgcaacataccaaagaatggtaaaccggatgtttaaaggccttctgggacggaacatggcggggtaactggacgacatgttggtcaaatcaaaggcatatgcaagtcatgaagatgacctcgaggaatgctttgaagtggtccggagatatggaatgaaacttaacccgaagaagtgcactttcagggttaaatcaggaaagtttttgggatttattgtcaatcaacgggggatagaggcaaacctagaaaaaattcaagccctcctgaacatgccttctcccaagaagcacaaaaacgtccaaagcctaaccaggaaagttgctcctctgagccaatttatttcccgatccacagacaagtgcattcccttcttcaacattctaaagaaatgacaaaaatttgaatggaccgaaga

SEQ ID NO: 108770 - DNA, 514 bp, Cannabis sativa
  modified_base (319)..(319): a, c, t, g, unknown or other
ttcatttgtttagttttattttaacgtatttgaatctcattcttattctagttatgtttttattcattttagggtcggccctgaaaatatatgggcccaagacgaattaaattttggggccctcaaaaatatataaaaaaagagtgttatgggatttgaacccatgacttggacattatgtcatctacctcaaccaactaagctataaatatttgttgcttataatacacttaaattttacttaaataaaagcttaataattttttttatttttttattttaggctcccggaaagtgtgggccctaggcacgggcctancccgcctatgcctagggccgaccctgattcattccaaccatacgccacttaagtgtgctctttataatcttaatgataaataagtgcatgtataataacatatgtaataacctttaggtttaaatttataaatttaatcctgtatgtatctttatgtattaaaagtgcctatctaacggcatttcttggtttaac

SEQ ID NO: 108771 - DNA, 885 bp, Cannabis sativa
gggatttttttctttttatatttttacgtatttaattttttttttttaaaatgaaaataaaattattttcatgttgccgcaacacataatattttatttatataacttaaaattttttataaacaaccgcgcaaattgtttcctagttaacgtataaaaataggggaaattatactttatactttttttatattgtcctcttttacttttatcttttttttttttttcaagttgccgcaacacataatattttatatgtataacttaaaaatttttataaacaaccgcgcaaattgtttcctagttaacgtataaataatagaggaaattacactctatacattttttatattgtctttttttatttttaccctcttttttaaagtctatcattattacttctttttttaaaacatcataccaattttgtccctgtcacttcaagatactctctatataactctcttatattagggtattttgggtacaagacatataaaaaaagatatgtttcaattaaatataaaattagaggtaaattcaataaattgattaataaaaatgctatttttcaacttaccacataaaaataaatgtgtaataattttgagaatgtttctctaagagaagaagaaaaataattctagaatgaggaaggccgataagccccaaaatagtatacgtgccatgttgactagaattggcaatttaaaagcccaaataataaaattacactaataaggggcattccgagaattgaactcgggacctctcgcaccctaagcgagaatcataccactagaccaaatgccctttgttagatgtaaagaatattttaacaattaatactatgtttctttaatgtaggatttttttttttttttt

SEQ ID NO: 108772 - DNA, 588 bp, Cannabis sativa
  modified_base (413)..(420): a, c, t, g, unknown or other
agggcataaaacccaacaaagattacattaaaatggaattttatttaggacataaaacccaacacaaccaatgaagttattttccttggagaaaggaaggataatgtgtaagtcatttatgttgattcatttgatagtaaaaataaatgcttaaccgttataaatgataattcttggttgtggcatagaagattaggacatgctagtatggattctatctcaaaattggttagaaaagatcttgttattgttttgccatctattccttttgtcaaagataaactttgttatgcatgccgatttggaaaacaaattaaaacatcttttcattccaagaaagagattttaactactagacctttgcaaatacttcatattgatttatttggtccttctagaattgctagtcttgnnnnnnnntactatgcatttgtaattgttgataaattttcaagatttatatgggttattttcttgacactcaaaagtgatattttggaaaatcttgtcaaattttataagtgtgcaaaatgaaaaaggatattctattacctccgttaggagtgaccatggtggtgagtttgacaa

SEQ ID NO: 108773 - DNA, 1348 bp, Cannabis sativa
aaatatccataactcaaaaaaaaaaataaagatatcagaccctatttcttttctagccgcctccctcctctcctctttgttccactctatctcggttcagacgaaaggaaagatgaaggtcccaatggccaccccggcggcagggcttcaacagaccaccctttcaccgtccaagcccaagacaaaccccatgaatctcgccactatctctccaccctattgtctaagttccggtctctctcgtgtctctcaccctcatagcatcgcagcatcgggatggtgaacgcctgcatcaaatggtaacctgtaacttttaatataattgataataataaatgatgaaataaaccaaccctttctctcgttctctgtttgcaatgcacgattgtcctactccggtcaccgtaggcgaaaatggaggccacgggtggcctcaccgagttctaaaacccaactcccttgagccacgaagccaccgccgttgttttgcctccgtgcagaagctcgtcggagctgcgagtttacgagccgatcagcctctttgaaaaatctccatgagcagatctaaaaattttgttgaatttttgtatatttttttcgtgttattatttcatttgtttttttttctgtatttgattaatttgtaaaaattatgtgtaatttttttctattttaattttgtgtaaattataaattataattattgatatgtatttatttattttagttttcttataattataaaatttaaaatggtatcatctcaagaacaaattgttaatttatgtattttttaaattgaattattaataaaattattattataaatttataatatataatttgaattaaaaaaatattaatttttttataaataaaaaagtatagatatagtgacacttttttagagtagctgttacttttatagtctgacaaggtttgattctaaaattttatagtgacgcgcgtggagtgaatctaaaaggatttagtgacccaccctgaagtgtcactaaatactacttttccagtcacccacattagtgacacgcggtgaagtgtcactaaatggttttagagtcattcaatatgggtcactgaaaccaatttttgtagtagtgattctttcaaataaaaatcgagacctatgctttccaggctatttgggatcagggtttagtagatactggctagaatagccctatgattagagccatagtaatctaaatgagagatttgcggagcaatcaataaatcatgctgttgacctcgcttttagccaacgagagtgagtcttatttagtaagcgataagtaattgatagcaatcgatatatggtaaagcaatg

SEQ ID NO: 108774 - DNA, 744 bp, Cannabis sativa
cttaccaatattgactacacttgctctgatcatacacccatatttttacaacctgaaactctgtccactgctgcctcttttcactgctttcggtatgaaaatgtatggtcccgtgaaccaatttgctcccagttggttgaagattgctggtttaattcgcaaggcttatctctgtctggtagaataaaacaatgttcaattcgattggaggaatggggaaaggaaatcttagggaattttaagaaccgtattgcccaaagcaagaagcgtatgaccagaatgaaaagccagacgagttcgttcctgtatactgaattcgaaagcgaacaaaataattatttcgaattattggctcaacaggagatttattggagcagagatcgaaacagttttggcttcataatggtgacaagaataccaagtatttccatgcttctgcaagtgctagaaagagaaacaatcagatacgtcaattgcaaaatactgctggggtgtggaccgattgggcaactagccttgatcaggtaattgtccagtattttgatgacctgtatactgctggttgttcgacaaatgctagggttattagagagattaattgcactgttagtaccatacaaaatgaagaactcttgaacccagtttcttgcgaagaagtgagacttgccttgttccaaatgcaccctcacaaagctccagggccagatgggatgggtccgggtttctttcaacatcactggaata

SEQ ID NO: 108775 - DNA, 535 bp, Cannabis sativa
aaaaatattatatctaaatatgtattattatatattagaagattatgtataatataaatcagacacatttaatcaatatgaaggggacgctgtaaattctggtctaatatataataaaataatacataattgtcttttaattaggatatatctcacttgttttggtatattttaattaacagtgtttgccttcttaaatttctctaaataacttgtattttcctacttgtgtccaatcacgcccaatgagttcttcctcattggtgccagcaaaagtgtgtttgatttataatcttaatgttgttacgaatgaattagtttattagagtgaataattattgaatgtataggattatattgaattgtttaattaaactttaaattttcttactttattagtgcattccaatacagttgagaaaatgtataatgaattaatgcattccaataaatgtagatttatttctcaacttcatttatttaaattgccataaaactaacaatactagactcatcgcgtaatattatctaaaaa

SEQ ID NO: 108776 - DNA, 567 bp, Cannabis sativa
gaaagccattccactaacaactaaatgctagaaatccaaataacataacctaaataagtatagcaacaaccacttttctcagcccaaaaaacccaaacccaaaatcccattgaacctagagaaataacatcaaacccaaaaaatggcaatccaaaatcaggctcggcattgagatatcaaatcccaaactaatttgaaagattaaatccaaaaacctaataaaagctaagaacaaattttctcaaacaaaaaacctaaaatcaaaataaaatacaagagaaaagagaaaatcatacctgtaatagccaaaaaatctctctctaggaaatttctttcatcgtcatgcttttctcattttttcatttcaaatctgagaatgaaggaataacaaaaaaatctgagaaatagggagatagagagagaggcgagatatatagagagtggaacagagagctatataaatacacagagagagagagataaagagaggaagagatttacctgtaatggtgaagatgaagccatggaaacttgtctgaaggtggtgattaacgagagagagagaga

SEQ ID NO: 108777 - DNA, 655 bp, Cannabis sativa
acaaagtattgaaaagattaaaaaaattcattttcaataaaacaataaataagaaaaagctatctaactagtttttatttatttatttatttttcaaagtcttatatttctatttatagaacacggttccctattggtgacaattattaagaagccatagcatctccaatggtaatattttggagaatgcttgatgaggtggaaagcttatgtggcaaaatatagggatgctataccattagagataaaagaatgctattcttgaaatttgtattgatgccacacaatgacattgatgctatgttttttttatacaataaaaaattaaagtgcaatatatataattatatatataatagtttaataaagaaaaaatatatatatatataataatgtgtgatatcataattatagcattttaaaaaagtattataccattggagtatttttagaaataaaggtaccaaaaatgatatggaagaaaaataaaataaaatattatattttggatgatgtggagatatagatcttcaaagaatgctactagtggagatgctctaaggaggtttttttcttatttatttatttcatgtaattgtgaatagctgtgcgtgaattaagatgcgatggacatggacaatgatgatgtcattgt

SEQ ID NO: 108778 - DNA, 598 bp, Cannabis sativa
cggaagcagagataggggcaaagaaggagcaggaaaaagaagtttgtgtaactggggaagatgctggattgatagttaacaatgaagaaaatggtagtggtatgatgcctgtggttaaggagaatgctagaaggcaagaacaagataaaacgcaagctaacaaagattgggttacacccaagaggaaagcagtgagacaaatggagggcaaggcgatgaatgataatacaaaaggctctaagtcaattaattgttttgctgctctgcaggtgacaagagaagatgagtttaaggcactggaccctcctacttttaatgatggaagtcaataactttatgggttggaatgtgcggggcatgaataaaaaggaaaagcaatttgctattcttgatgtgtgtcggttaaataaaattggttttggagcgttgtttgaaaccaaggttaaacatgagaaggttcaaggaatgatgatggagaattttcccaattggaactattactctagtggagttacttctggaagaattcttcttatttggcaagacaagtttgttcaggtgaaggtgttagaggagacaaatcagcttgtgcattgta

SEQ ID NO: 108779 - DNA, 4065 bp, Cannabis sativa
ctctctctctctctctctatcttctctgatctgtgtaatctacttctgtttgttttgattttctgcttatatatgtgttgagttggttgatcacagatctaggagttagttacaataacagttgtaactaactcatatttcttgatccagtagaggcgaagccacctaggattgagtccttgtttgttttctgttgtaaaatactgatgtggatttttgtatgtaaaagggactggttataagtggattttactcaacattaaagcctatagctagtctccactctaacaatagatttatttgtttgcactattattgaataataaaatggcaactatttgaaaatcaatatataaggatgtgagaactaaattcttatttaaagatctggtcttatttgatttcttgattaagccttgagaaggtaactaacatggacacccgagttcaataggtcaaatctattttgaggcaggacatcaagatagtgattactgtaattcttaaaatggtcaattcgaaacattatcattagtcaacactatatgagagatcaatagagcaatggtatgtttatactgtcacttgatatagtatgtttctcatattttataaatctgatctattttggagacgaattaagccgttgtttgataatctttagaagaggaagaatccttggtaaacattatatggtctaaatatttaaattcttcgtgatgggatcaacggtagactaaattatctcttagtttgcattgactaactattgttgtgattaatatttcgattttattgataattttttaaatatctaaagtgtggtgtgttataaaaggcctaaagtccatgcgtataaataataacgagatatcaattttgaaattgtcccatatacacataaatatatatatgcttatcgaaggcagcctagggcttactcaagtgtatgcattcctattatgatatatgttacaagcatgctggattggtacttgagttttcatccttatggtaccaaggatgtgttagcaatcgacaaattaacatcatgtcatatagtagttggttctaatgatatcaattgaaaaggctacatggatgataaaatctacttataagcattgatgattataggaggagctattttgtaattaagtgtcaaatcaaaatgaacacctacaacttcctctcttgtacatgtactataatggtaaaaagagttattttgtggttaggtattgtgtggacactaagagctttctcatttgtaaaaatataatgtgtgacgtgttacgaggacattgattatacattacaattgcgatattttatttcaatgttaagagtacttgattctattgtgaacttactgaacttatgtgataaatatcacactcatgtctttctcttggaacttgaggagtattattactccattaatagtgatgacgttctatatgtagtgagaaagttgtaggatcctctattagtataataacacgcacttacagataacatgtaaataactatactgatacgggttacctgaacgtatgtactaagaagttattttttgttttgattgttgggagctaaagatgtatttgataagtgggggtcattattttcatgtatgatagacatgttaacgattgctattggttgttgaatacatgcatattttggataactttttgatgttgtgcatgcacacttgttgatgcaagccagtggcttagtctatgtgttatgttcgagtagatcgagattagtagttatcatcatattttatgaatctcaaatgtctcatatgtattatatttgtatcatgtcgatacaatatgatgcataattagttttatagacattagtatttcttgagatttttgtctgttgacactattgcataatgagagcacatatatatgtataattatgtagtccaagtgggataatgctagaatattttatgtggacttatataattaagtgttgctcactcagtgtcggcattaacatttaatgataactatatactcagtaatgcatggtgttaccattgggccataatgggatggacataactcactaacatgtctagggcccatggacacactctaaaacatctttggtcagcccattgggtcaagataattaattctctcacattagacatctagatccaataggcccattttactccttaaataagagttttgacttattagatggttgagggaagaagtgtatggctaagtgtgtgtggagagaatattagagtagtgttcatcatacccaagctctattttctcctctttgtgtatagatcgatggtattaaaggtgtacaaagtggagcgtaaaaatttgtaaccattattgcaagataatatgctttactcatttacttttatgccataagatggtagttttgataaattgagaacataattattatttattaatctttgattaatattagttgatgctctattattatttaacaaatataataaagtaacattttaccaaatcttaactaaaactgatagtacaattaagtaagaccacaagtataactaatttaacgaaaattctaacttcatataagtttcgaaaaaaaaatgaacaaaaataaagtaaaataaaaagcgcataaaacgttaaattaaatgaaacacaaaaactactaaatataaacaaataaagcacataatttaaaagaatatttaacagttgccttacacaatactagcattaacaacaacaagatcttatatttaaattatataaattaataaatttataaaatattaaactaaaatcaattaaaaagtatagccatatcaaaagaaatgacaaccaaaaaataaataataataatagaaactgaaaacatgtaaatgaaattaaaaaaattaagaataagaatattatagggaaaatttgacttagcatgcttaaatgtaaagcatgatcttttaatataccacccgactaaaaataggatacttatacttttaatattttttcctcccaaaaatacccttgcatttcaaaaaaaacctctctttaactctctcactctctcactctaactaagtcttgttctctccaccctaaaaccccaaaatccatgagctcaaccaccccaaaactcacaaaatccctatccatcgccgaagctctcaactcgcttattttttgtatttttgtttttgtttttgatgatatcccaaaacatcgctaaatgtctctaattcacaatatcgctaaatgtcgcaaaatcacactcaagttttcacaatgagtatcgatgtgatgtgtgtttttagtctcatatcacaaatacatcgctaatatcattgttaaacatcactaaatacgcaaaacatcactaaatatcaataatcatcgctaaacttcatccctaacctcagatttggtctgtcattgcaaatatatcgctaaatatcacaaaatattgtaaaaaactagaaaacgagaagaaaaaatgcaaaaaatgagataggtcatgagagaagacaacgacagagcttgcgaccgggattctggatctgtgtgtttgacggtaggggttctaggtcggggttcaacgctggagaatgagagagttggggagaaaagtttttttgaaatgtaaaggtattttgggagaaaatatattaaaagtatagatatactatttctaattggttagtatattaaaataccatgttttacatttaagtatactaagccaaattttccaattagaaacaaaagcacatgcattaaaagaacccttattatttagcttagtcttagctttctttttctatgagccttctttgtctaagctttactcttctcaatatctacttcattaattttatgttttgtttcgccagtatctaaaccacacccaaagcttataacaaagttaactaaaagaaacaataagaataataacagaaactagtttcataataaactcatccaaaaataaacaaaaaacatgacacctctaaaatactaaataaagagaaaaaaaaaaaaaaaa

SEQ ID NO: 108780 - DNA, 607 bp, Cannabis sativa
cgtgagatgcacttctgtgcctattactttactaatttttgtgagtggatgttctttgagatctacgtatcgcatgcagccgctgccacgtattttaggaaaaatctgaagtaacatgtgtatgtataataatagagtggacagtattcttttgaaaagatgtaatttgggatctaatatatgtttcgaagacaattttgtcacaagggaaatcaaaataaaaaatatataaattcaacatcgagtagtacaagttgattatattttaattatattaataagtaatactatttattttgtcttgttctatgacggtttggactggagtttatctctagaaagaacaagatttttctaaacaattaaagaaattaataatatccctttcctctaaaatattgctttctatattactcctcacaacaaacaaacaaaccatgcatatacatatacatgttttttaaattaaaattgtaaaatcccaaatgggacttaattaatattattatgattgtgtatctataaaccttataaaagagagaatagatttttgggcttttcatagtgtatttacaaaaaaaactccttaactattttgaggagttag

SEQ ID NO: 108781 - DNA, 2288 bp, Cannabis sativa
  modified_base (199)..(233): a, c, t, g, unknown or other
  modified_base (1904)..(1912): a, c, t, g, unknown or other
cgtgagagttgaaagaatcccacaaggccaaatatcgagaaatttgtgggtgtacacgtcgggaaatttgtggattttgaaacaggtcaaagacccacaatggatcacaaccgactttttggaccatgttagaatttgggataagatgaatgagattccatctcaaaactaattggcaataggaggagtagcccattcnnnnnnnnnnnnnnnnnnnnnnnnnnnnnnnnnnnaatgtgggactaactcttaataaatatcatagtttttttttaaaaaaaaatcacctcaaattgataacttatagtgaaaagttacgccacactaatttttttttatcaaattacatcgttaatctctattaaatatcgttttcaggacaaattttacagtgacatcattaaatatgatttattattttattgtctcaaaattttatcattaagtaatatttttttgcccaaaaaattaagtttcacaaaaccagtgcccaattattattaagcctcattaaagcagcaattacaattgaaaatttataatttagagttctgggtttgataaaaaaattaaaaaaaaaaaaagaaatcattaaatcattttttcttgagtacaattcaccaaaacaaagaaacatgaaatggtgtttgttaacccaaaattcacactagtgacgtggcatctgacagattgccacgtgacagggagattgcctctgggcagggtaacatcaatatgtactaactaggcttgataccaaaatctctgaatgagctcaagtcttcaccactcgtcgagcgatgtgagccacacagcatgggaggccgattagagaaagtcgctaaagatcttcagagatacttttcttaatcgattccacaatactagcccattagtatccctattttcgtgggatttaatttataaaataagataatcgtgggattcacatttaagcatgtcccgatttatatcctattttttgggtaactaatgtgttcaatttttcctataataaataatgaggccaattcactattcagctggtcttctttggacgtacttttagagaaagaacactctaaaatattggtaacatttttcgagatacattgagaaacccacctaaccaggccttatgatcttgatatactttcataaaactaatacaattaaaaggaaagtaggtcattatcgctataaaggggccaaacctctaggggttgtttggtatgcggtaatgggagaagtgggaatgagaatctgaaagtttactatgtttggttaggtttttaatattttaatgttggctaagtgaaagtggtgggatttagtttggtcggcaagaaaaacccaatgaaaatgtggttttcactttccaatgctattggcagacacaaacttttgtatataaaaatatttaaaatatgaagtaatttccccaaattaaaaaatgatatatgaagttctttctttatttttatatattttattttataaaatatattatcaatttgtatataaatttactctttataattatttattattgttaatttttttataaaattatatgaaaaataataaataaaaattattttgaacacttagaaagaaaaaaatattgaattattaattttacaaaaaaaaaaaataattactattgtaaaaaaaattgtcgcattccattctaatgtcaaccaaacacggtaatgttgcttttctaggtttatcattcccttcatcaatctccaagcaatgttgaacctattcctatgaaatgaaacttgtataacaaacggcccctataaatttactgtgttatttatgagtatttacaattattttattattatataatctctttaatagacttagtgtgtcgttggctaaaagcgaggtcnnnnnnnnngtgctttcattgagagcctaaaatactatattgctctcataaaccttcgattttctattcactctaaattgacaaattatagttttgataagaagtcctcgtcaactgaaacacgcgatcctatggcgacggatcctagcatctaggctcctactgactcaacggtagacaaccccaatgcatggctgcctcctcgaggcaaccaacctacagttcctacaaacactaaccccataactattgggatcactacccctctcactggaattactcctggagttcaagagacagggactgccagttagggctgaacatcgggcgggtttaccgggtttcgggttggcgggtttcgggttcatgggtttcgggttcaaaa

SEQ ID NO: 108782 - DNA, 728 bp, Cannabis sativa
aacaaatctaaagattatcttttttagtagcaatgtaaagaccgcctatgaataatactttgtaggagtatgtattaataattatggaatgcatgttttagaaatatatattttatatatcatgtatgtttttatgctattttatacttaatcacctaatttctgtgattgtgttcggaagctgtggaaagcgacgttgggcctagagagtcgcattttattttagattatcggggtattatcgttaaatggtagaggcgttagaattttcgggatctttttatttgaccattttacccttgttagtcataatagtgaatatttatctttatgttagttaggggcaaataggtcatttcatgttgttattattattatttcatttggattttagtagctttttgggggctgaatctttatctttgttttagtaagtattatatttagttttatttaatttaaaggttaaattaaataaggaaaagtaaagaaataaaattagaaaaaaatcatcaacctagaaaattctaagtttttctctccctctccctttcgaaccccaaggatccagctgagaatccatcttcttttcaagcaactttgtataatcctttttgatttgtgaagcttcacctcaaggtatcccatcctagccttctctccctttattttctttgtttgttgtttttagtattgatgcaagggttgggattttgttactgtgatgt

SEQ ID NO: 108783 - DNA, 1258 bp, Cannabis sativa
ggactaggagtgttctgaagaacagtgataccacgtacaaatctcttttgtcaagttatttaaatttctgcaaatattttatattctgcttgttttgttttgtcgttggaaaactgatttctgcagtaacagaattacattctgcttctgcaggcgtatatagtttaatattttcgtatatattattgacatttgtaaaaactcgatttttcattcttagtaatgatcaccccaatagtgactgctaagagtaggatttacaaagtatgaaacaatggtagaagctcatgagataagaatgaccttgactctcgcctaaacgagacaacgtcggattctcatcttgattgaataaagggttgctaaaatggtgtccattttagatgagctgacaactctatctaactagtgatatatttgactcttgcctgaacgagacacttatgtctttgagttgaaaaccttggaaagtatttaggatatgtttgtttttgtatttttgcatgtttattcctatttgctaaatgcttattaatttatgaatatgtgtatgattttgtattgaaccttatttgacttctatttgttaatatttgtagttttcaatatgactatgaacaacccgattatgtcactgttgactaacaacaagctctctcgagctaactctgccaaatagatagagaaaattaatattgctctcataggtgaaaactcattatttatgttaattgaagaagcccttgagcaaccaggtgagaatgcaaccaaggcagtaaaggaaaagtttgagcattggcagaatgctaacaatgaagcttgttacattatgttgtctagcagagttgataccttgaagacaatgtttgccaacactctcacggatgcagaaatcatgaaccggttaactacactgattgggatggctttggatcaagctcattttgaggcgaccaagaacttcataaatgcatggatgaaacctcatcagaacgtgcatgatcacctactcttgatggctagttatttccaggaagttgagaatcatggagctatcattgatcaagaaacttaagtgagtttgatcctgaatagtttaactccagcttttctaccctttacatcacattacgtcatgaacaagttgactttttgactttcacgagttgattaacaaccttcagacatttgaaaatttgattggaggaccgtagaaaggaggaaataaagctccaagttctagtaatgctacggctgg

SEQ ID NO: 108784 - DNA, 763 bp, Cannabis sativa
  modified_base (55)..(68): a, c, t, g, unknown or other
  modified_base (202)..(220): a, c, t, g, unknown or other
aagactatgaagaatccaatcaactgaaggaaatcgggctcagatcttggtgatnnnnnnnnnnnnnnaggatacaagggttagtgatctaaggggaaggaatcatttaatttcactgcaaccaatgtaaggtttcttgaactttatatgtttttaaattccattattttagaaatttatatttaggatgttaaataacatnnnnnnnnnnnnnnnnnnntcctggtaaaataatccccaacaactggcctcagagccatgttaataatttagtttcatgaaatttgatttaaaacgatgtttgtgttgatttggatgtgttcatgttagtttatgtgcatatttgatgattgtatgaaaattgtaatttacgatgataaatattttatatttcgttctgaaattattattcttggaaagtagatgaaaaattaataaatttaggttttgatagaacttaatttggattttttatgaatcagttatgattttttaaagtttgaaaacaaaatatctaaggtggcacacacacgcgcgcggatggggatgcacctcggtcaagaccgagcttcagacagctcgtgactgaggtgcttcagacatgttttgtcggaatgctgctcacgccaagctgcctcagctaagaaggctgcattgaagcctttttccacgcgcatcatcccaaattttattttgtggtaacttttgatttaaaaatcatttttcattgaaacaaaatttaaattttggtagaattttgtgt

SEQ ID NO: 108785 - DNA, 813 bp, Cannabis sativa
  modified_base (333)..(333): a, c, t, g, unknown or other
atggttcgcgcagaaattagtgaaggactggctgtcaagctatttgacattgtccaaaattattttgtacggcaatctgaaccgacagattatgttcttcacaacgaagtcttgaacttttttggatgtaatggttgccagtggttcggctttcgtccactttgtgaagtaatcagacgcaaccactacatactccacctttacctttgggtaattgtccgatcaggtcaattccccaaatggcaaaaggccacggatttcgcatctgagttaactcgttgggcggagctcgaggtatctttgaaaatctctggcatttgtcacatttttaancataggcctttgaatcctcgatcattgtcggccagaaataaccttcccagcgatgtgatttccacaaaatccatcgtgcacttcagacaaaagtcgtgtagcttcttcttgggtaacacatctgagcaacggcatggagaatcctcgtctgtacataattccctctactattatataccgtgcagccttccttctcatctttcgagcttcatttcgattatctgcgagttccccagtattgaggtaggctgctattggcatcatccagtttggggaagtatcaattattttgatctcttccgtgtcagtgatgctaggctctccgaggaattggataggaaccaagttcattttatcacctacattactactcgctaatcgagctaacgcgtctgcaaacgtgttttcttcccttggaattcgtctgagactatagcttttaaattgtgcaagcatgtcatgtattttgcccagatatgc

SEQ ID NO: 108786 - DNA, 552 bp, Cannabis sativa
aaccagtacccaccaaaagcccattttttgagccctcttcagtatcatcatcacaaactaaaatatccatattgtcactattttttgagcccactccatcagggccattagaacccacctcatttgtccttcttcttttagtatcaattacaagcaaaggagaagcctcacttgtttccatattagtccccacgtgaataggatcagcaacatcattaattccttgaatatttgacttgccaatattcactccttcaaattgatttgaaataataacaggtaatttacctgtcgatattccttgattggtggtcataactcctcctaaagaagaagattgtccttgagcgttgattgagggaaatgaacctggaccagtcgcaccaccagtgaaggagtcgtcttcctcatcgccagttcagagccatttcgaatcgatcaagtgattccgtcttcgtggctgggcacgcataccagccccataaggcttgacaattttatcagcaggcacaacgaacaattgagggtagaacctatccgaatgacccaata

SEQ ID NO: 108787 - DNA, 3257 bp, Cannabis sativa
aagagtagttggagagcttttgtcctgtcttatcttctcttcactttcaacttgaacatgtcttgatggtgattttcggttctcagaaggtgtacactcatcaagcctcatcttgctcccacttacattaggcgaacagggtctttttcgtttggcaagtatgggcttaatatcccaattggtcagatctatagggcttttatcatgcaaattacttctaagaggagaactttcatcatcactatcaataataacatttgttgttcaaaatcagatttcttgtcgcctgcattgaacatggaagttaggaatcttacatgtgcatatctacccaagtgtggatacatatatacttgttcagttatatttatggaatgcctaacaaaacattttctttgacttaatgtcaatcccaacttaggcagtgcctacttcatctaacaataataactcaatttttgatacacaaagcatataagcaaattagacagttaaacaaatcagatcagatcaattttcaaaaataatgaaagaacaatatttatgttatagaatgattaatggcagcgttgaaacctgaagcacatatcatggatcctctcactaaaatttctgaaatattgttatactctccctaattctacctcccaaagaaaaacagaagctcgtatcatagagaaagagtaaagaaatatgaagaaaatagtgaaataatctttgacaagtttgacaacattaagattaaggctttaattaagtcattgaaagacaagactaatccaggcaaaaacaatcagcctgctatgtttcttgaacataataaagcaatacaaatataaccaatgactatccacctaatcaaggcaaacaaagtaatcaaatgtcccactgtttcttatgtgaattgagtcataaactttcactaagaaagtctgaattcagtgattcaagtgactgcagaaaattaagactcaggtgttaaaacctctacgttgatgacttggcccaattggattgtttaaagtgaaattcgccacataagctggtgtacgaaagaaaagaaaactatgtttcgataaaatcacaagaagcaatgcaaacaaagatcttacttggaaaaccttggttcattggacaagttggagatgaaggaagatcatcagaacccgaaacaacagcaaatccatcaattttacttgtacccttctccccattttccttgttagactcaatggaatctctggctgttacctttgtagccagagattccatttttgaaacattttctgtataagtttctagcaaggtgacccttttctccaattcttcaaaaaaattcttccaaacttcagtatcattctcagctctacttttcccagactctaaaaccttgttcttctccttgagctgagcaatctcatccactttttctctcttaatcttcttcaaatctatcaacatttcttctgttattttagttttctcctcagcaaatttcattccctcttcagctttcataaccttttcctctgtctctcttactctttcaccagcttcttttgctttcgcttcagccatcttcaaatttttcagcaaccgttctaacatttcttctgtttttttagcattctccctagccaatttagtttccacctcagctttcataactcttccctcagcctccctcactttttcaccagcttctcttgctttctcctcagccaatttcattccctcttcagcttttataactttttcctctgtctctcttactttttcaccagcttctcttactttctcctcagccaacttcattccctcctcagctttcataactctttcctcaacctctctaactttgtcaccagcttctctggctttctcctcagccaatttcattccctcctgtgctttcataaccttttcctccatctctaatactttttcattaagctttcttgctttctcctcagccaacttagtttcctccagagctttcataactcttttttccgcctctctaacctgttcaacagcttctcttgctttctccttagccaatttcgttccctcctcagcttttataacctttccctctttctctcttacttttccacaaaactctcttgctttctcctcagcccatttagtttctttctcagctttcataactctttcctcagcctgtttaactttgtcaccagcttctcttgctttctcctcagccaatttccttccctcctcagcctttataaccttttcctctgtctccaatactttttcacaaagctctcttgctttctcctcagccaatttagtttcctccagagctttcataactcttttttccgcctctctaactttgtcaccggcttctcttgctttctcctcggccaatttccttccctcctcagcttctataacctttccctctgtctctaataccttttcaccaagctctcttgctttcaactcagccaatttcattcccccttcagctttcataaactttccctctgtctcttttactttttcaccaagctctcttgctttctccttagccaatttcattccctcttcagccaccttcactctctccctcatgatctcataattctctcttgaaattctactctcactactcactatcctcagcctcttgacctcaagatcaaattggataatctcagactccaactgagtgatttgtttcttcatcttgttttctctattgatcagaatctcctcaacccggtcaaactcagagatcctgaatgccgatctgagattacaaatgagctcagaaacgctcagttcttcgtcatcactttggtccacactaaaattaggcggagactcaacctccataatcactgtcacaccaaaacccacaaaaaaatttaaaaaaaaaaaaagctttgagtgttctatctaagcaaatgaaaaggcaaatgatatagaaaaccatgatttttagatcatttcctaagtttaaaaacatgaatttctcaaaaatcagatcaaatcttcactacaaagtatcaaataaaaagcaacaactatgattgtttgagcatttcctaagtttaacaacatgaatttctcaaaaatcagagcaaatattgagtatcaaatacaacaatgtaatgcaactcaaataaatttagtataattgttgtgaaaaagttagggaatgataccaaaggattaggagatgggatcggagtggaggtggcgtcggtcgtactcgtcggagt

SEQ ID NO: 108788 - DNA, 620 bp, Cannabis sativa
aaaatctctctcttaattccttatagctctcttaattattattattatattggttgctgaaaacctgggtcaacagaacttaaaatattattttaaaaaaataatataccgtgtaacaaaaaatacatataccattcactaaaatatatatactaaaaataataataataaaaatattttttactaatatatatagatgtatactatactaaccaaattatataccacaattaaaaaatatatatatatatatcatgacaacaaaattatataccaccattgtatataatagaatataaattaattaaatattatttaaaataaataatcatacaatcaaaatatataaaaataataattaaaaatatgtatatgccaataaaattatatacacacattaaaatatctttattatgttaacaaaattatataccactattatacatatcaaaatataaaaagtgaatatatcatctaagaataataatatatcatacaacaaaacagaaatatactgtacaataaaatctatataccaacaacacgacaacaatacataaaaaattaaaaaaaaatcgacataacttataaataaaaaagattttaacaaaactaatata

SEQ ID NO: 108789 - DNA, 563 bp, Cannabis sativa
taaccctctcatttgaaattcaacctctctctcttcctcactcttctctcggtatcccctaaaaaacccaaaacccagcccagcccgtcgaaccaccgagcaaccgagcacacagtcggacgatttcccacccgagcacacagtcggaccaactcccaacccgaacgctcgcaaccccgacccactccgacgaactcccaaccccgacccactccgaaaatgtcaaaggtatgtgtttttttgttgattttttagaaagagtttagattgtatctgaaatattattgtttagctttaagaattttgttgtgaaaatgggattcgggtccgtgatcggactgtgaaaatggtgaaaatgggactgtgtggccattcggatctggggaagatgcttgtccgatggtccgatggttcatttggctcgggtccgatggttagatgatagggaccgatggggctgggttttgggggtgatggggaagggtccgattggactgataggtccgatgggtaccctatcgggccaatcggacccatcggaccaaagttgtttttggtttttc

SEQ ID NO: 108790 - DNA, 1242 bp, Cannabis sativa
gaaataaagaaatatagggtgtaaatttcccaaaattaaaaggtttaaagaataaataatataactatcttcagttaaagataaatacttaagtttaaatttttacggtaatagtacttaaattatacttctataatttcggtaggcacttgatcattaagtgtcaaattaaatcaatatatctacgtgccattattgaaaattttaaataaatttttaaataaaataaaaatttaataaccttaatcaattaaaaaatttctataattattaacttaacacataatattaaatacttacaaattttttaaaatataacttaattatattttattataaaaaattaaatttaaatatttataccataaattactcttaaaatatccaatataatttagacctgggtaaactaaccttacaagacaaggttcagataagtataaaatcacttaattcctatattcttacactgtgtacccaataattcaatgtagaaaacaaatttggcattttgcatccaaatcataataatattctagaaagaaactactactgatcttataatttgttcaaattgtttgttgttttgcctttgtatagacaaaaaacagagccattaaatagttttgtctgcacaagtctaatctaataattataacttaaacttcatacaagtggactacataacataacatgtacacaagactcttctagcataatattattaaaatattatatattaaataataatgctaattttttgtttaaaaaaaaatcagctatatatagtttgccacgtatatatgttctcataattatattgtatccatatatattaaaccatatattgcatgacacatgcaggctatagactgcataatatatatttatagtttacttcttgtcttagctttgaaaattaaattaataataaataaaaatatgtcactcattagtttggctagtcactaatccaaataattaaacaatagattggtatgttaataatataattaaaaggagaattatatatgtgtatgtgtatatatagtatgagattgcattagtatataataaaccattttaattagcaaaacataaccaaaattgactttattataaattaatgcagaatcactacaccaacgtttgatccactacttataactttgaacatttgagtcactactattagtgacaaatctccaaatgtaattagcaaaaggaattatgtataaaaaa

SEQ ID NO: 108791 - DNA, 587 bp, Cannabis sativa
tctataatttacaagtggaagctcaggaagtgaagtaaagtagagctatttggaacaagcttattattccaaaacatagattcatcttatggcaggcttgtaatgttcaactcctcacacgagatcacttgagcaaatttctaatcattccctctactctctgtccagtttgtgagaatgacatagaaacacatacacacctcttctttgattgtgtgtttgctaggaaaacttttgttgagattggaaaatggttgggagttgtagactggccaaaggaagctgagcaaatccagcagtggtgcactagggggccccttgatttcaagaaccgagtgatcaactcagtgtttgcagctttgctttacctgctttggaaaaatagaaatagttgcatatttgatttggtttgttcctctcctcttaaattgagcatggagataaggaagctctctcattatagaatcttgagcttaacttgtaatacctctaaaaagcaagataagtatataattgatgtaattaggggctggtagtttcgggttggggctgctgctgttttcttttgctggtttgttggctgttgt

SEQ ID NO: 108792 - DNA, 3798 bp, Cannabis sativa
aatgtcacttttaccagcatatttttatgctgacaaaagtttggtattgcgctggtaaaatagaatttacttctgatgtgttggcaaaaggaattggcaaatcaacgttcgtattagaacttgtgccagcacaaaatgaaaagcgctggcaaaaataaattttcccagcgcgtaaatgcgctggtaaaagttagattctagccactgcaaatgtgcactagtaaaactttgacctttttgccagcacagtttgcaaaatgcgctagtaaaagttacttaattttaccagcgcagtagcaaactgtgctggtaaaagtgacatttcttgtagtgccaagacgtttatttttgtgactggaactctctggatccggaagggcatcctacccgaataagagtcaactactgagaccatctgaatgagcatatgtgatacaaccagaatagcattcgaagagtcaccccagagaccaagtatacaagatggcgtggtggccctctgacaatgaagaaaacaataagaataataaaactcaggaagcaagtaaattaataggtaaattaacaatgaataaaagttaaggctttcgatttcaattgtacctattgactacggcctaatatgattatctacctattactaatttctatgcaataggaggtttactaaggtaatttatagtcttcttagatatataaatctcaattacatgcaaattttctactctcatgataaattaaatatgaaacaggcattaaatacaagaaccctataagctatctaaaccatatatgggtactctcatcctatatcgaaattcagttctatttctctatagcataatctacactcacttctcagatctcacatcgaaatcataaaatcttcaattgatggtcaggcaattaaaagtaattaagtacgaataaaataaatacatagaaattgagagaaaattaaatcatattagaaccataaatcaatgtcaaacaatctccatctagaccctaattaattgtttagctactcatgttcattgtagcaaattcgcacattaatcttagaaaagagaagaaaacagagaagaaaatgctaaaaaccctcaaaaaatgcctccagtattggcttcgatcttcgaaattcatacccagttgactgctttgatttcctactgaactgcctcttcaaaactattgaaggccacttcttttataacaaaaaaaatgattaaaaaaaataagaaacgctggaaatcctattctgcttaggattagaagggacggtaatttttctgctgcatcgactaatagtattttggccattactctctcgatattactcggaataggacgattcaagatgttctgaaaagataaagagagatctaaaacttttatgttttgactttctctgaaatctgatcagatcatagttgaattgaaacttgaagtttcagctttattattttttttttttgcacaattttctctattttgtagttcatctttttgaaagatcttttatctttttttccatcttattcttttgatattttctaatcttattctattttaaatctgcaaaaaataaaagataaaaagcataaaattgctccaaacaatagtagaattaaattaaaaacacactaaaaattaacttaaaaataatactaaaaacaacctaacaatcaaaaatattaaaaaattatatatatatgtattaattatatttgtagtggatttttttgtgttgaatttgtaatacttagttgttttgtgtatctattttcatgatattttgttctattttatcacttaataatgttattgttttatttatttcaaattgttatctgcgtttctgcaaagcatgacaagtggcattttatgaggaagattaatttaatccttccctaatcaaagccctttgatacaattctatcacagagaagcctcctgaagccgagaacaactcgagatggaagaacacacagaagcctacttaagcttgacttagcttcgcggatgcagaaggcgaatttcttctcccagagttggaggggtctaaaaagggaagctcacacagacgatacccagaaaggtatttgaagggtctaacgcagacatcgaccattatggaatgtcatggatgttgaacttttatgcatgctaagtcatcaatgtgatggttatgttttttctgacgaagatcagatcttgtctcctatgcccaagcatggtagtgcgcgtattcctaccacatttttcccaaatgggtattatagacctttactcataaaggagcaagctttaggtgacatgtagcctctacttttaaaagttgaacctttgcatgccacgtgtccatatggtacaaaatgttcctattatctaactattttacgcacgggcttaaagttttccataggatcattcaatcagctctaatatcgcatgtaaattaccccaacaatgaaattttggcagaaaccttaggcgtgtcatgggcctattcatacctgccacttagtctatcaatacccctcaattctcatatgaaaggaggatcacaatttatgtagctaaaactctaccaatattactctaggtcttcttcttctttaagagacacttagggtatagagttgggatttcctgctaaaatattgtatacacatcaaactcgccctaagaggctaataatctgactcatggactaagatttattaacacctgaaccacgtaaaaaatcttcatctctttatttttgtaagactttatttctttagctcttaaatatttagttttcaaaaatcttggtaaacttttttgtacttttattgagaggtaaagaaaggtgtaaaccacttccactactatggtgttcacacgaaacacgattcctaagaagattcttcaaggtgggctagaaatagtcacggtagaagtaaagcccctctcgccagagcacgcccaattaggttgataggcctatcttgcaatttttctcatctatttggaatcgtctacagggccagcccatcttattttatagggcctggctgacctatgctctcctattgcgggtcaggtattgttcctgcaacctcaatttgtgcctgccagctttctatgtgtctgccagcctttctatgtgcctgccagcctttctatgtgcctgctagccttcctagcttttttgtaaaactttccttgcaaaggtcaggcctctttggtcaaagaggcctttctcgatctattagtcacttcttgtgccggccaacttgtgcttaaaacttggctgcctacaagatttttttggccagcctacacacttcccttggttggcaagacattgttggtcaaggtcttgatggcatgcttaactccttttgcttattgcttaatagttttgcttgattgctttagaacccttgacggatgacatgttgtgtaaggagactatatcctgttattgacaagttgtatctcacgtgtcctcagtcttgactatgtggacatgtcatgtcaaatggaccaacccaatatttggcccccttgtttagctggtaatgacctactccccttttagttgtattcactcttgagataataccatgtagatcacaggttagaaccttgtgatttctagctatgtctctcttcagtattacaattgtgagaataatgtgttacaaaccaagaactaataagttcttatgaaggacttatagagagaacttgacttagtgtctaggaggcgtagatggaatatgaggtttgagagagagagagaga

SEQ ID NO: 108793 - DNA, 609 bp, Cannabis sativa
gtttggtacgcaggattagattggtctaaaaagaattggattagactggacaatattagattacgctgaaagtaatcctgtgtttggtttaaaaatagactggactattttatttatttccttttagaaaaaaaaaaacttaaattaaaataaaaatgtataatattaaattaaaattagaatatataataataaacaaaaaaaataaatgattcgtgacaaaaaaataaaattaaaaataaaaaataattaaattataaattataaattagataaaataatatgtcatatataatcaagtatatatcataaatatataataacatattttagcatatttttttatttaataaatgattaaaatagtgaaatattgaataatataaaattatttacgttaaacactaatttaattactaatttaatataaatattaattttttaaaaatatttatctaaattttctagtcatttaaaaataatatataattgtattgtcatacagtttctcttagaatcaatttaagtaactaatattgtttaatttacaatattttaaattttgaaaacttatgtataataatttaaaattatacattttcactaatt

SEQ ID NO: 108794 - DNA, 648 bp, Cannabis sativa
  modified_base (286)..(290): a, c, t, g, unknown or other
  modified_base (335)..(340): a, c, t, g, unknown or other
  modified_base (596)..(597): a, c, t, g, unknown or other
aattaatttagaaaaacacacttaatttaaagaaaagattctggatagtgatttttagtaactaatttatattttctaatatttaattaaagtagagaaatatagttaagttgaaaattaatttgttaattaattttagaccaacttaaattaggatatttttcttagaacttaaaattagaattaataattaagtttattttattcaagatacttaattgtttatttctatttaagaaatttaattaattagaaattatacttaagttgaaaattaatttattannnnnttttagaccaacttaaattggaatattttcttagatattaaattnnnnnnaataattaagttgattttattcaagatacttaattatttgtttctattttaatgaatttaattaaattagaaaattatatttaagctggaaatttttgaatttcagatcaacttaaattagaataattcttagagtatattttattttaataattatttcccacttaaatttcgaattacattatttttaatgtagatatttcaaaatttttcatttttaaaaattatattaagttgaaaattaattttagatcannttaaatcaagtaatttttattaatgatttatttaaaataaatagactaaaa

SEQ ID NO: 108795 - DNA, 525 bp, Cannabis sativa
aagtcagggaagtttttgggcttcatcgtcagtcagaggggaattgaggcaaatccagaaaaaattcaagctctcctgagcatgcattccccaaagaaacacaaggatgaccagagcttaactgggaaggttgccgcaataagccgttttatctcccggtccacagacaaatgcattcccttcttcaacatcttgaagaagtgtcagaaattttaatggtccgacgagtgcaaggaggcattcaaaaaactgaaatagcacatggccaagccaccaatcctatcgaaacccgttctcagagaagacttgttcctatacttagccgtctccgagctacaaaccaagctttattacaagaagcgctagatcaagttgaagaactccaggacgagtcacaaatacgaatggcagtttatcaaaagaaggtgaccaaatattttaactccaaagttaaaaataaaaaattcacttataagcaaaaaaggatggatggaatcattgtgccacccaagaacccggagtggg

SEQ ID NO: 108796 - DNA, 653 bp, Cannabis sativa
gaaacctatggtgtttgaaggtttcctggtttgagggttttctttctctttgaaaaattcgaagaaatttggtgaaaggctgaaagtaaccaaaatgaaagaagaatagtggcttttataggcaaaagtgcatgtggaacaggcacgatcacctaccaatcgtacggttgggaaggcacacgatttgcattcccaagatccaacggctagattgatttgtaatcaaggcggtggaaacgcttgagtgtccgtctgacacccattaatgcgttgtataattaatggacgtgaaacgaatcgacgcctgcaaaaagtgaatcgctgcagtaatggctatcattaattacaccttcacgcgcccaaagcacgtgccaggaaaccgagaagccaaccggaggcatctggacaagccttgttcatttcgcaattaaacaaggcttgggggataaatgttgcccctgattttgcccaatatatgtggaccaaccaggcagggacacgtggacacgaaggtcttaacactcaaattattagctaagtctttataaagaaaggtgtcatctgggatctgcctcccagagaaggcattcgaagtcctctatgctcccggaggcctaagcggtatcaaagcatctccgggagatgtcaggctt

SEQ ID NO: 108797 - DNA, 794 bp, Cannabis sativa
atgttctgctgaataagataaaattcggttgtttcatggctgggtcgagaggcccagcgatacgttgcgatacattttctttacgctcttcttgttgttccgcaggaggatctcttcgagtaggcggttgaccatggggatgtggtggtttaaatctaaacatcgtggccatgtcaatactgcgttgtggtgcatcctttgtatcataggagtattttagtactccatgcgcctcacacaaagtggtgataatgtcagcaagcccgagtccacccccacaagatcctttaaccatagtatcaatactctatttaattatatcccccacatttaggttaaagcccttcatgatggcatagacgaatttcagcatgtctatttgagcatcagagtagtgcttatagggtaccagcctagcactcacgaaatatagccatgccttggccaccaggtttaattcacacctatacaactggtaaggttctccatcgtattcatgaaacctgagacctgggtaacctaaagtttcagctatttcatcataattcaacctcttttcttgaataagctttttcagtggttgctcctcccaggtgaaggttggcaagtcatatacgacatggatagctgttgtggaaacctgcactttaacacccttaacttttactttttcatcctctctttctggccaattggcgaagaattctacagctagagtttggttattccttcagtaatatccacaaattttgtccaacccctattgattacttgctctctaatgggctcaaata

SEQ ID NO: 108798 - DNA, 1143 bp, Cannabis sativa
  modified_base (773)..(775): a, c, t, g, unknown or other
ggtgctcctgaccaggtgtcggtaatcctaattacaatactaagatttcacaaatagggttaacccctgatttcacatttataaaatatttacatggaatttcacatagagctcggaacgagctttccaacgatataaagaactcccaaaacagagtcccgagtcaaaagttatggtcaaaacaaaattcaacattttccccgatatagtccaaccggaattccggttggaacagccctgaaccaactggaattcctgttgtctgggcagtaacaacacaaaaaatctcaatttttaaggccctataacccactcaaatcttccccacacaccaccaaacttttcagagcatcaacatatgtcatattaaacatattccacagctcaaacacaataatttcactaaaaatcaaaaagttccattaaagctccaagcttgagttccatgaactcaagcttgctttacacaactaaaattagagtttacaatcaaactttaaactcaatgaaactctaaaaacgcctctaaatttaccaaaaataagtcccacaatttaacacaaaatcatgactttaactcataaaatccaagctcttgaacttgagcttaaattccaacaaacccaagtattttcaagaaacaaactcaaacaaaagctgaattcaggacatgaaaataaacctagaaaataccctaaaatctcagcaccaactcaacaattaaaatctacaacaaattcatgttattcacacccaatttaccaagatcaaannncaaactcaacaacatgcataatcaagaacaccacacccttttcatgctcttcttacaattaaattcagttaaaaaccaaagattaaaccaaagaaagttacctcaaatctcaattcaaggctaaactcaaacaatcaccaagtatcaagctccaagccaagcaaaatcacaccaattttctccaaaaatcaaaattgagaagaatagggtttagagagagagagaggggtcgggtgagaggggaagcaaaccagaatttctattacattttccaaaattaatttcttaaattaaatgaaacataaaaggtcaaaagaccattttgcccctagggcgataaagcatgcatatacactcacatgggcaat

SEQ ID NO: 108799 - DNA, 918 bp, Cannabis sativa
  modified_base (851)..(852): a, c, t, g, unknown or other
taccaccaatgaaactgagaatgatgacctcgccttacccatttgcaatatgggggattgattttattggggcacttcccacagggcgaggatgaccaaaatacgcagtggtggctgtcgatttctttacaaaatgcatggaggctgaacctctagtttccataacctgtaaaaaagttatcgactttgtggtcaaaaacataatttgtaagtttggaatcccattaagatagtatcagataacgggactctatttgatggtgaattattcactgagttctgcgagaggaacaagataatcaaaagcttctcgtcagtatccaggtctcaggcaaatggacaagtagaagttgttaataagaccttgaaggataatatcaagaagaaactagacgttgccaaaggtagatgggtcaatgaactacctcaattactttgggctcacaggacaactgagaagagagtagcgggttatactccattctcgctagcatttggctcagaggcaatgttgccagtataagtaaatatctcgaatcaaagacgagagttttataatcaagaagaaaacccagaaagtttaaaattatccttggatctacttgatgaaaaacgtactaagtcgcaaattattaatgcaacataccaacaccgagtgacaatatacttcaacaagaaggtgaaaaagaggctcttcaatgttggagacttggtgctaaggtgagtatttgcaaatatgagagatgcatctgcaggagtattcaacccaaactgggagggtccttatgtgatcgaagcgatagtaggaaccaaggtttttaaattggcttggctgaatggctcgctgatanngaactactagaacgtggaatatttacgaccctactaccagtgaactgatgttgtaactcatatttc

SEQ ID NO: 108800 - DNA, 547 bp, Cannabis sativa
  modified_base (319)..(330): a, c, t, g, unknown or other
tcctttcttctcttaatttcgaaacaccatagctattcttcggaaaccaaaattcagccattagtgatttagtgcatgcccacacataacaagttggtcctcaatcgtagtatgtaagactgtgaagaatccaaacaacaagaaggagagttgggctcagatcttggtgatactctgctacataaaagaaacaagggttagagatcttagtggaaggagtcatttaattccgatgcaaccagtgtaaggtgtctcataccttttatgtgtttattttcatcgtttagaaattcatattaggatgttaaaaacatacttnnnnnnnnnnnnagatcctggtaaaatatattccaaaagatgaatacatagtgtatcttcaagaacatgaggatgacattggaacgatggaagatgatccaatcctctttcatcaagccatgacaagtcttaactctcaaaagtggaatgatgtcatgaatgaagagaataagtctgtgcaagacaataaagtttgggaagttgtcccattaccagaaggtgtaaaacc

SEQ ID NO: 108801 - DNA, 500 bp, Cannabis sativa
gaatagcaatttgcatagtcacttatttgattcacttgaaccacattatgagctccctttgtatacctgaacactacacaacacaaaaatatacaaaataaatattaatcaatattatatatttatgtgtgatttatgtgtatacatattatttatatttaccgagcgagtcgcgaactgtaaaagtcttgcttgcggcccaagcattgtaattaacaccaggattccatccagctgaatcaccaacagtgtaatcaactgcatagcaaacattcacaaccattgcaaaaacaaaaattgctacaagtggaaatgactttgccatttttcttttttgaataattataatttatatatatatataaatgaatataagaaagttgtgtaagaactgattaatattgctttgtaaattcttcatgtttgcacatatatttatagtgctttgcatggagacagtagtaatgtagtgatccagcaaatcaaatcttttgcaataa

SEQ ID NO: 108802 - DNA, 540 bp, Cannabis sativa
  modified_base (258)..(260): a, c, t, g, unknown or other
  modified_base (318)..(324): a, c, t, g, unknown or other
tgaatgttaaagttacaagaaagatacttattcagtctaaggagagttttatacatttttggcattgttcagccatttattaactactagtgttacttcctgattaacgcaaaagtagtagccaaaaagtaaagaatccagtatccctagaggagtagacatatagagagaggaatatcacaatataggattttttttcttaaggaatgtaatggtggatgaaagcttgtattgaatacaacctgtcaaatcctattnnngggagaatactacatactacacttgatttggatgtcaaggtgttgagattatttgaannnnnnnttttgttttatattagtgcaactgagagtttgttgggttttgtgtgctaaatcaaacccctttcaatataatcagattaactaattaataaagatctgaaatcattttatgttgcatgattcacatgactaaattcattattatatttaatgtataaattctattaagttcagaacatatgtatttgttcattattatagtgttgtcagcatagtg

SEQ ID NO: 108803 - DNA, 1748 bp, Cannabis sativa
  modified_base (32)..(58): a, c, t, g, unknown or other
  modified_base (126)..(126): a, c, t, g, unknown or other
  modified_base (390)..(396): a, c, t, g, unknown or other
gtacttgtacgaattggatgttgattgacatnnnnnnnnnnnnnnnnnnnnnnnnnnnacacatatttataaaaaaaaataaaaaattatatatataaattacattttaatgtaaagaaaatagtnatttaaaagtctaatacatatataatacacttaaatttcaaaacttaataaatcaaatgtgtattctgttcttaaatttttttttctacatacaatttaaaataaaattaaatatttctatacatacaatttttttttcttttgaatttgttatttattattttatttattttaatgtgttgttgaagacataaaataactataatttgttttattttgttgctagttatgtgaagaacaattttttttcataaatattaaatnnnnnnntattaaaaagtaaccaatccaaaataaccgatatcggatttgagctattgtgcggattggattggatctaaaaattgaaatccgcacttagtgtagatcagatgcactatgaggaaaatagtgcggattggattagatgaacacccctatacatgagtactgccaccaagagagtgtcagtattcgtgtgagctaatttttccccttaagggacttttctcatttgttgtgtgaccattgattttagaaagaaccattgaccaccaaaccccttcattcttcttcgtggcgagtattgacaccttgggagtgttagtactctatgttatgcgattaatgccacttggggagtgtcaagggttgtgtaccaccatttttttccttttcttgtgcaatcttgactttagggttccaagtcttagtgcatcatgagtaattttactcgaagggcaattccctttggggtttccttaatacgcaattgttgacactagggaagtgtcatgagtcgtgtatgactatttcccttagcatttggtgatggcatcttgttctttgtacacttgcaatcccaacaagttaagcattttagccccttattggattttcttttcagagtagagtttcagaatgagtaactctttctcggatttgttcaaaagataaacccaaaggatgactactgacaccttgggagtgtcagtactcgcatgtttcccttttgtgcacatagtacttcgttttatcttttgtcgcttgggcaaattttcttcagttgacttcatatcctcaatgtgtaatattgtcttatggaccctcatgggagaatgataatatatatttattattactttatttttttgtgaaaattgggtatgacaaactaatataaattaaaggtatactttttgttatactcaaaattcggctacacttcagagagtgacacgtgtcttgcagtagaatatgaaccacctaatataatgtaattatatcatttaatgcagaaaaagaataactcgttaataaatgattaataaaaaatattcataactcactgactatatagtcttaagcgagacaaggatagaagactattaaaactcatattgaagagacacatacttgcctcggagtacacaagcccaagaagataattcatttattcaaaggagtgaatacagttatgcaaagcaacctcgggttacgaatagcgagacaacaacctcactattctaaagaaagttgacgaggcaaggataacaactcgtagataagcgagataaaattgtctaaatcagcattaaccatctataaggataagaaaaaaaaaagcagttaagaagttattt

SEQ ID NO: 108804 - DNA, 831 bp, Cannabis sativa
agtaagtatggacttggaccttgcacgtaacaaataaatatgaacatgcgtatattataaataatatgggtttaagtatgacaggaacgataaatatattacataaaaacaggcacataactacgaaataaaaataaaaaactaaatctacaaatattttttttaattaataattcgtatatattcttttgaaaaatatatataagtattcttctaaaaaatttaaaatcatataaataaaattacaaaaatattatcatttatgctccaaaattaaaaacctgtttaaaatattgaaaaaacaaataaaaattccatgagtccctataatgacccatataaaaaaataaattggttagacccacttaaaaaaacagttaaaccatttaacaaaaatttataaagcattgcacaggagcgagcctgacattaacaattcatatatatggttcatgcagggcttgaccctcaaaatatgggtcaattcttgcatattgttatatggacaatgtcacgtttccgttataaaaaagtgattttgtaaatacagatcgggtaaggctatttgtacactaacttttcattctttaaagaaaagatatatgaaaaattagtaaggttaaaattttatataattttatgacttaattatcattaaataaaagatataatttatttcatacgtataatttaattttatttttaaacaatcgtcgcgaaacgcggaaagcaccaaagagtttaagtggcattccctacattttttattctattttttttaatttttaagagcttgacattttctccaacaaaataaaataaaagcatatg

SEQ ID NO: 108805 - DNA, 1577 bp, Cannabis sativa
cttttcaccaaaaactactatcttctatattacaactctacttttgattactacagttccacaatcaaaagcagctttaaacgccaattattacagccaaacatgtccacaagctgagaaaatcattctacagacagtctataacgcctccatattcgatcccaaagttccagctcgactccttaggatgttcttccacgactgtttcattagggtagctaatagtactatatttttcacttatacacaaatatttatatggtttcctttttgtattaatatggtgccttgtatgtagggatgtgacgcgtctgtattactagactcaacagcagagaaccaagcagagaaagatggacctcccaatctttctcttgcagcattttatgtcatcgatgatgctaaagctaaacttgaagttgcatgtcctcaaaccgtttcctgtgctgatgtagttgccattgctgccagagatgtagtaaccatagtacgtataatcctattttataacataacatgcatattaataacaagtgtatacatcataattcttattaataatatgtttaaatttttatagtctgggggcccttactggaatgtcctaaagggaagaaaagatggaagagtttcgaaagcttcagaaaccgtaaacttaccagctccaaccttcaacatgtctcagctagttcaaagcttttctaacagaggtttaggaattaaagatttggttgctctgtctgggggacacactctcggcttttcgcactgttcttccttcgaatcacggctacgtaactttagcgtgtcccatgatattgatcctagtttgagcgttgaattcgctcaacagctcaggcagaaatgtccaaagccaaacaatgacataaccgcaggacagtttttggactcaacttcgtccagcttcgacaacgattattacaagagattgatccaaggcaaagctgtgtttggttcggatcaagctttgggtggtgatctgaggactaagtcgattgttgaatcgtttgccagtgaccaaagtttgttctttagagagttcgcggcttccatggtcaaacttggaaatgttggggtcattgaaaacggagaagttagagtgaaatgccgtgtggccaattagagattgagtataagagaaggggactgctcttacgaaaaacaaggtttctttttgttgtgggagagactaataagagtggttttattaattaataatcggattattgtttgtttatatgattaattgatgttgatgtataagaagttcggaattgaataagaatgtgataataacatatgtttattatgaggaagagaatttgtataaactataactgataagaattaatacaaagaaaataacattgataaaataatattacaactttatagcataaatatacataaaatagagaatagtaaaaataaagagaagattacagtcagaaaataagaaaagacgcagaaggtatttctcagctcaattagagactgaggaggagagattcatttatagaagtgaaaattacatgaaatatgggatttcataacaa

SEQ ID NO: 108806 - DNA, 2123 bp, Cannabis sativa
aaattaattaataaatcaattttcaacttaaatatatttttctacttaattaaatattagaaaatattaattagttactagaaatcactatctaggttcttctcttttaacttgttatacccgaagttcggtaagcacatcaaaggaggacacgtgtcgagctgggaagaactcaaacatgcaaacgacaagtatgcttagcatggaataactcgttggaaatataattcgcaaggtatgttcataactcggcaagctggatagccttctgctagacagaaacgtacgaactgctaacttatgtattgacgagaaaccatatggtgcacatgttaacaatgatgcctcaacctcgctgcgtgaaaaagaaagcgacaacactaaaaatacttagcatatattatacgatatacaaattgaatatagatagtatgacgagccaagataatagacagcgagacgtttatctcgcttgaagatggtgtgcatgcgaggaagatcctctcgataccagagagtatagttatcagagttaagacaatattattctcaagaagccaaaatgacatgcagctactcgctatcaaagtgatcttggctcccttcttggtgaggcatccctgtgagataaggcttaccgtatatctttaattacacgttcatcttggcccaataaaagtgggatattcacagttgtgtaagaacctcatttatttagcttgatttgtaattagattttacaattttagagataatggctgtaaatgtatttcggtcaactttgtaattaatgccactatgcaattataaatggtggcagataagatcaaagagggagaacaaaaaaaaaaactcttatacaagaggccctaaaaatatactcaaaaatctgaataagattgactcgtggactatgcaaaattttaactgcaaaaccacgtagaaaactcggtgttcttattttatttttctatagcttttatattttctgtgttgaatcataattgtgagactcaaatttggttaacaaaaatctgcgttaacagtttggtgcttccattgagaatctctgtgaaaaagctcagaaaaaagcctcctgacataaaagtcatggatgacaccaaagataataacccttaagaaggaatcaatcatcgtcccgaaaagaaccattgagtccttaaggatctatcgagtcattgcatgaacagattgcaagtcccaggaagacccaatattggggccccttgcttgacgggccttggatgagcagcaatcggccacttgccaaccaggttgatgaggatggcgcttacgacccaaccagatacatacaaatcatagaactggaaaatcgccatcttaggcatcgattgaaggatgtaaatcgaggaaatgccaagttggagcgtgaaatagctaccataaaggcagcactaggacatggtacccaaaattaacctgaccttgggaaaaaagatttacgaggcaaacctcgtggctcacaagtcaaggggaaggagatgacccaaagatatactcagaactctcaggagatgcaacctgaagaaagtgaggaaagtctgggggtacagcctgggattcgtggaacattgaaaaaaaattgccaacccactattcaggctcatgagaatgaaactcgtgcaagcccttgtaggaagaaaaaaagtgagtcaaaccttgagaggaagggcaaggttcgaccacaatcatgacaagggcgatctatgaaaacatcttattctgaaaaagcctgacctccgtcaacgactcggttcaagacagaaggattcattccatttgcgaatgagcgagttggagaataagtccagagtgcatcaaatcacgaaacccaggagacaactggggcacgatactgctggaaaacttgatccagaggcctcaggatcaaagaaaaaagatgattccaaaaggctgcctaatgacaagaaacccaacaagtacatccctctttatactgaatacaccgagctcaatgaaattcaggaaaagatctacttcgcacatgtacaagaagccatttttggcgagccaagacctatgaaacatgtgaggcacaagagggatccaagtaagcagtg

SEQ ID NO: 108807 - DNA, 1061 bp, Cannabis sativa
  modified_base (529)..(529): a, c, t, g, unknown or other
atcggcgggccttctcgctgacaaagagtacacttgcgattacaagattcccaaatatacttcttggcatcaaataattgttccacctaaagaccaggcctgggagcgcctagcccaagcacaataccttcaaagcactgcccctcgagaatccagtgaaggagcatcccgaggtaatcaatgaggctggtcacctactgtacttagggctgagcgtaatacattaatttttatacttggaattccattctcgtggactgtatttctcataagtttgatagttggtaccctagattccatgtccagatcaactgtcacgagtcattttatggtataaccgagcaacatggtaccatagaagatagagcaggtcacatagatgcgagctggaatttagaaccactcgagccttttgatatattcaaaattacagactctagggattttagcgaatattatggtccttctaccccctcatctagtgataactcgccttttagtgattttggtaaatcccttaggaggaaanttatactcctcccctttttaattgtcttttataatgattgtaacgcctcgtctcgttttgcagacatgtgttacgaagttataaacctaccctgaaaattatatttccaacaagtcgttccatgctacacatacttgtcgtttgtgtgtttgagttcttcgcagctcgacacatgtcctcctctaatgtgcttaccaaactttgggtataacaaagttataatattattacttttatttttaactatattaaaattttattattcaaaaaaaattatattattattttaacattaattacaaaattatttattaataattatattattaacattcattatttaattaattatatattattatattattaatttattaatgttttattttttatttttaaagaaatattatttataaatattttcatatattaaatcttaaaaattatttaattctttacatgaaaataatttttttatttttaaagtaattattacaataaatttctcatttattaaatttttttattcaaa

SEQ ID NO: 108808 - DNA, 1055 bp, Cannabis sativa
  modified_base (183)..(183): a, c, t, g, unknown or other
  modified_base (550)..(555): a, c, t, g, unknown or other
  modified_base (993)..(1007): a, c, t, g, unknown or other
aactagccaagtgtcacaacctagcacagccatctatccttcactaaaagaaatgactcaaatgccctccaagttacaacttaagtatttctcaaaactaggggtaaaatggtaaaattccataaccccactcaacctcgttattttattttctgtaaaatatttcccactaaaaaataaggntctaaacttacccatgtaatcaaactagccatccatcgcatttttcattgtcgccgagcaaaaattacaaaaacgacataattcatatataagtcaaataatacccctagagtttaataaaatcgctggaattgagaaattaaaactctaatgcccatttctaaaaatggggcccaaaaataattaatttcataaataatcataaaaataaaaaaaattagtgctaattgcctttactaatccaagttactaaagcggtcattacaccagccataaagggactattctctagttacaattttgcaactttatttcaaaaaattatttttctttcaataataccatattttcaaattcaatcctatannnnnnaaaactatttatttaataaatataattaattatccaataaaatttctattaatatttttaattaattagaccatacaaagtctcttaattaataaattgacagcaaaactttttttcttcacaattaagcccttagtgaaaattcataaataaaacatactctaattttagaatgaaatttgattaattaaaatcaattgactgagtctgcaagcagtattatctcaacttacgaggggaccatgggcctatataactgagctttcaataagtagatgtagaatttaccaattaaattctctaacttataaatgtcgccttgcaccactatagatttcaaattgaatacactctcaattatatataatgctctatatatatacaacaatatagataagctatgactatctattgttacaatcttaatagtcaaagatnnnnnnnnnnnnnnntacactgaatagggataaatttatcgttctacacttcaatgtatttta

SEQ ID NO: 108809 - DNA, 1658 bp, Cannabis sativa
atctaggtttgggacctaggtccaggtctgagtctccaatcccgatctgggtcctgagtctgggtctggtccaagtctgtgtttgggtttgggtttgtgtcccaagtcccgatccgagttttgattcgggtctgggtcagggtcctagtcagattctaattcaaggactgagagcggaaactaggtccctggtcttgtttccgggtcgcgatctgctttcggttccgcttctagtttgggatcacgggatacgggtccaagtctgggtccgggtttgggtctgagtctggatctaagtttgagtccgggtataggtccaaatccaaacatcgactatggtttaggtcgaagccacgagtccatattagggtccagtctcgagtcctagtctagttccactttgggtcccaggtcttggtcggggtcctagttcagggttcgggttttggttcgggttcaggtcctgggtctgagtgctagttttaaagcctggtcctaggtccaggtccgggtcttaggtcccagttcgagtctaggacccggtctgggttcaagtccttgtctaagtttaggttcgggtttcgagtccagatccaagttcgggtcagagtctcgggtttcgatctgagtctgggtttcgaagtcgcgtccatgcctactatctagatctgggtcctaggtcccagtccaggtccatgtttgtgttcaggtcctagtccttgttcttatatcgattctgtgtccaggttcgggttcgggtcggggtctaggtctaggtctaagtcctggtccgagtctaggattgggtctggttccaagtttggatcccggtgtgggtctaggtttgggtccatgtccgagtccaagtcttgggtacgggtccaggttttggtcttggtctcggtccggatacaggtgccaagtttcgatcctggtctgggtatgggtctaggattgggttcgattccaggtttgtatccagatccatgtctaggtccgcgtctaggtttgggatcgggtcccaggttcaggtccaactcgatcccgaacccagaaccagaatcggaccaggactgggactagaacccaggcatggactgtaacaaaacccaaacctaaaccaaaactcaaaccaaaacccataccacgacttggacccagaccgagaccttagacctgggacctaaaccaagactcggacctggacccagaccgagatgcagacccagacccagacccaaaaactattgcccaacccaggacccataaaccagactcaggcatgggaccaaaaacccgaacccaaactgggactaggacccgaacttggactcaaacccaaaccgagacctggactcggaccggaccagaacccgaacctgaacacgaacttgggcccaaattgggacctaggacccgaacatagataggggacccagacttaggaaatgagaacccgaactaggatcagaacttgggccacagaacttggatcgggattcgggacctaacctcaaacccaaacttggacctaggacccacctcgggaccaccagggatccaggactcgatgctgcttagacctgactcgtagtcagtgtcatgatctaggacttagactagaacctaaatcgaaactcgatctcaaaccaggtctc

SEQ ID NO: 108810 - DNA, 798 bp, Cannabis sativa
tccacctccgccctcatggtgttgaacagagccgcgttcttggaagcagcagacttagcccaggagtatgtgttggccaacttcagacagacctgcacagagaaaaacctttagaatttgagccaagtaaagaggattaaaggaaattgtcaagaaagacttacccttgtgaattccttcaagactctacccatcagcagccccagagaagagtcgttgttagcgctggccagttgctcactaacctcaggaattaactggttcatatagtgggcgagcatctccttgcctttcttggcccctggaagcactagcaaaggtggagtaggggcccgcatctgctcgggtccactcttgatcagctaaggcccaccttttggttattcaggcctgtccaaacttcctcctcgagactccttagacttagcaacttttggagtagaggggtttgcaactgttagctcctcagaaagatcaatgacctccccgacagacatcttttccttagaagaggtcccctcaccgcctctagatttcttggtcggaggagatgcgatggagcttctgccaatcctcttcttcagagcatcaagcatcttcttagacatgtctgcacgaaacaaaaacaacatggttagagaaaacagacatcagaaacataaagcataatagtcaagaagcttaaaaacaagacgtagtagtatgtaagatgattgcctgagcaaggcttgaaagtccatcatcacctgacaagcctcttatttcagacataaaagctttcccttttctgagcacggg

SEQ ID NO: 108811 - DNA, 569 bp, Cannabis sativa
ttccattctttaatatcccaacagccccaaacctccttctttttttgatttacacaatgtttcccacgctacactacccgaaccattcatatagctttgacccttccataaaaagcacctacaaatcttctcaatttcagatattaccttctttgggaggatcaatatttggctccaataagtgtggatagtcaataaaacagcattgatgagcaccactcgacctgcaaaggacagattccttgagctccatgtgtgaattcttgctgtcatcttttgaataagacttgtacattcatcagctgagattttcttagcacaaataggtatgccaaggtacctaaaaggcacattctgcctactgaaacacgaacaatccaacacccttttgacctctgaatctggcattccacaacagtatatagcagattttgagttattaggctgcaaacctgatgtctcagagaaaagtttcagcccttggagcatgtagtaaatactcttgaaatcacccttgcaaaataataagacatcttctgcaaaagtaaggtgattgagttgtagatcag

SEQ ID NO: 108812 - DNA, 594 bp, Cannabis sativa
gctttcaaatatggtggcagcccctcctaggaacgagtgtaagtgaagcccaacggggcgattagtatccaaagagaaccagtcaagccacccttcccagcagttaatgtgtgaataatccgttcttatctgccaccggctaccgaaccacactgctcgcgcaaagtcacattaccagaacagatggagggaggattcaacctcaatatggcataaataacaccttggatctgtgattgggattatgatactaagcttttccttggtgagaaggcaattggccattattctccaccaaaccattttgagtctctcatgaatttttgaaccccaaatgaccctccacttgttgtcactattggctctaacatccacattcttgatcaccttatatgctgatttgacagaaaaattaccgttgctctcgggaagcctaaccaggtatcttcccttggtgtagtagggagcgagatgtttaaaatccgttttgcatccgattcaagaaaccacgttcggataagcgattcattccaaccatcttgggtgatgaagttgtgaaccatgctcaatcccgccgaagcatctaatcttggg

SEQ ID NO: 108813 - DNA, 831 bp, Cannabis sativa
gcttttagtaatttcataaaaggttaaacaaacaactaaatctaaaaacactcaataagatttaatagaataaatgaaatgaggagtgaagtgaatgagtaataaatgagtgattagagaatagaaaaagacgaaactcaagaaagaacaataaatgcagagagagagagagagaaactgatggaaaagcaaatcgatgagaagacaaatatgaacggcaaaaaaaacaaagggaaggacaagatcaaaacgacaccattaaggcgagaagttttttaattgagagtacatttttgtagcaaaactattttgtttggcttaattagagaaaaaatttaggtaaatacatttttaaatgttagttttatgtgaaatgttcaaatggtcaaatcaattacatgagtaaatacatgaactttaccaaattagtctttctttcactacgaaaagaaaaaggaaaaaaaagactacaagaaatagacatgaatacatctgattggaggtgtggaaaacatatatgaaaagaagagaatctacgacaaaaatgagtaaactggtcctacatattacttcactgaaatcatcattatatagtgaattacgaaaaggtcttattatttagtggtgcacaacattatatgtataatcacgataccatccaatatattaatataaaaattattagtattggacaacttaatgtctcccaatacgacataaggatatattagcacaattcaacttatccaatatatttcaatttaataaatcacataataaatatatatatatatatatttttttcatttttacagtttaaaatagtttttt

SEQ ID NO: 108814 - DNA, 532 bp, Cannabis sativa
tagaattgtctacaaaagttggccacccaaccctattttgtagggcctggccagcctatacactcccatggtcagccaagtattgctcatgcatccccgggatgtgcctgccaactttctatgtgccttccagcctttttatgtgttgtcagctttcccatgttcctactagctttttcttgtgcataaaagttatggtacgtgctggccagccttagtatgtgttggccacccttagtatcttctttgttcaactttccttgcaaaggtcagtctttcttggttgaatattaggcccttcttggtctaatagtcaccttattggttggccagcctattctcaagacccagttggcctatatccttcctctggctagcttatgttctccccttggtcagctagacatagttttatagttttttggcggcttgcttaactcctttggcatgttgcttaacagttgccatgccttgtaagatgactttgtcctgctcttgacaaggttgtattccacgtatctttagtctttac

SEQ ID NO: 108815 - DNA, 536 bp, Cannabis sativa
tatcaatacgtaataattctaactccattctttattttggcatttaatttattatttgcttgctcgaaaactagaattgatttaagcatacaatatatgcagcaaatgtaacaaagagaatcaaaaattaaaatcaaaaagaaaaaaagaaacaaagaaaattaaagagacaaaaatgcaataaaaaccataaaagaataacaaaaaaaaaatagtggaatgtgagaaaccagttagtaaaacaatcaaaataaaaataaacaaataaaaaccagtttcttaaaataatcaaataaaaaaagtgaaaattaaaactcaattatgaacaacaataaaaaaaatcagttatgaaaactagttacttaaaaaaacaagttacaaaaattataaaataatatgtgtatcagaaactgattatttaaaataaaataaaaattgttgttcaaatatcatacaataataaaactgattttatacaaactaaaaaatatacaattacatcataaaaatggagcaatccattacagaatagttaa

SEQ ID NO: 108816 - DNA, 2404 bp, Cannabis sativa
accgatgatccaatccgcactattgtggatactggatttgatgattagatttaaactgttatgcggatcgaattggatttaaaatatgaaatcagcacttagtgcggattggatgttgtttgaccaaaaaagtacggattggatcggatgaacacccctactatattgtaagggtgtagttacgatccgttgaagttccttttttttttcgaagagattggctagatccgagtttgtagaattcagtttgagatatttatagaagcttgttgaaggagaaatcaaggctcgtttaaccttattcgatacgcctgatattatttcctctggctagcatactggtcacccagccaggcccttctcaagacttatctttcttatggaattacttatggaatcattcttgcaaggtgtcaccctcctcttctttggccggcacgttgatgggtcggccagatgcttcaaggaaagcaatttacagcttatggatgttagcgctatatgggacctgccagacacatttctgctcggaagttccttgtcatgtttaagagttggctggattatgtcacgtttaagtaccacgtcagatgtgcaaattttgggataacagtctccaacttcataaaatgacagtactagcccccaaggtcacccttttcgttaattcgctagtcttttttcctaacgaatttgtatactgattcaaaatgccgcgtgttgacaaataacttgttcaaatcataattttgattttaaaaaattaaatatattattttagaagttaattgtttttaagggactacaaaatggtggctttaatattattaccattattttttgaaattaaagacttatttgcatcaaattaaatttttccaatttgtaatttgtttggtcaattatttattagaaaacctaaaacgacagactttttggttatggtatttgtagcttggaaaccctagccttcatttcactctctttcttaggcagtcgtctctctcactatcacattctcatcctcacagcctccctctccttcaccaggtttatcttctctctaagcctctttctggatttctattgtttcgttctatcttctcatacagagatttctgcccaccttcatttgacaactgttttttttttttttgacagaatgaagattattgctgcttacttgttggctgttttgggaggaaacgcttctccctctgccgctgatttgaaggccattctctcttcaggtatgcaattaggtgttttttattctctaaaattcattaaccaattctttatttttcttcttgatttattaagtgtgaatctttggctgtgctttaaagaacttcaaatgagctagtgaaaacttttgttgatacaaaatttgagtattatttgtcattagcttatgtaattcaaaatctgcattttttttaatagtagattgtgcatatgattttgattactagcataggaggaaaaatgcttcaagttatggtgggtggttttgtctagatttaatgtttgaagaagttttaatctttgctgaaggaacgaatatttgaataatgttgtagaaacttgaaatgaacagagaaatgtattgagagggttctctaaaaaattgggatctttttcatctttcattatgatttgagtgttttggatttgttgctgaaatgaaatattgtgaagtcattatttttttgtttattttctataatttttggttggaagtcttgtcctggatgtgaattaagattattgttagtgttaatttcttttagcagattctttccctgcaatgaatgaatattgttttttctttgaattgagtaaatatattgttttggttacagttggaattgaggcagaggatgagaaggttaacttccttttgactgaggtcaagggcaaagatctcactgagctaattgcttccggaagggagaagctagcatcagttccgtcaggtggtggtggtggtgcagttgcttactctgcaccatcaggtggagcaggcgccgccccagctgctgctgccgagtcaaagaaggaagagaaagtagaagagaaagaagagtcagatgatgtaagtttcatatagttgttagtttttaaagtctctggttttggctgtttttaactcattgaatttgctctaatggtatgctgtttattctttgtttcaggatatgggtttcagtctcttcgactaaaaatcttaacaagaaggccatcaagttgttatatctgttttttcttatttgatgtttagaagaggaagcaaaatttgagacatttgagggagaatttttttgtcagtgtttgaaatttcgttttacatgtgccaatatctgtttcaaatattgtaacatgacaacaaactcactttctg

SEQ ID NO: 108817 - DNA, 515 bp, Cannabis sativa
tattgactaagattaagaaaaaaagctaactaattagtatatgattagtattatgagtaatctaatggtgtttttgattttcgaaataacgaaaaaaatatatgttttcctcatcttacaatgttcacattgaagcgtagatcacaataatatttttttaaggctcaattgagtaacaacgtgaccatcaattctttttaaaatttaaagataagagagagaaagagggaaagagaaaaagataaagagaggggaagatggtaaatataaactggatctatctatgcttaattccacatgttatacaaataaataaataaacaaaaggaaaaaagaaaaaaaataaagaaagaaagaaataaaaaggcatcagcttagtatatcatgcattcagttttggtaatacaattaaaataaaaacggtataaaacacacggtaaaattattaattaaatgctgtacaatattaccgataataagatgtaaaaaaggactgcacatgtaaatttcccaat

SEQ ID NO: 108818 - DNA, 603 bp, Cannabis sativa
ggtgaagaggcagagttagatggcagagaaggggaaatatattgctgagaattgttttgatcgcattcatattgatatatggggaccttttaatactttgacaactgagggttttaaatatttcattactattgttgatgattgttcaagatatacttggatacatctcatcaaaaaaaaatccgaagctcaagttgttatccctcaattcattaggttggtttaaaatcagtttaataagaccattaaaggggtaagatttgataatgcaaaagaactacagttcaaaaccttgtttggtgagcttgggattatgcattatcattcttgtgttcaaagacctcaacaaaattcaattgttgaaagaaaacatcaacatttactcaatgtggctagagctcttctttttcaatcctatgttcctttagtttattggggggaatgtgtgtcaactgctgcataccttattaataggacaccaacacccaatctaaagaacaaatcacctttccacatacttcattccaaaccacctgcttatgagcatttaaaagcctttggttgtttagcttatgcctctactttgagtcaatctaggtctaa

SEQ ID NO: 108819 - DNA, 666 bp, Cannabis sativa
acattaacaggaaaatcactcacataaaaataaattttctctcagaaattataataataataatagatttttttttggattggagtcttcccttatcttttttgtaaaagaaagaaaaaaacattcattcacgatcataattattttaatttgctggacatttattcttaattcaatttttgaatgtatatattactaatgaaagagaaacctttactaaatcacatgcacaagactgttaatatttgagaaccttgctttaaagctctcactctagatatagtttacttctaatgtgatcatggagaactcgttcaagaaaaagaaaatgaaaagatgacttcttcaagttctagattagattttttatggggtgtacgatatattcaagaaaaaattgtagattgtttaagacctatatttggaattgaatggggtgtaattataaaatgataacaatttaataaaaaaatatggggtgcatttagtttggggtgtggtgatcaattatgagggtgcaaatatactttctctatattaatttaaatagtatttttgaattaataaataaatttaaataccattaatattacgatttgttataaacaaaatattatgatatatatttagtcagtgagatcggttttttttttaactgagttattt

SEQ ID NO: 108820 - DNA, 549 bp, Cannabis sativa
tctattagtttatgaaaagtgaggtttaattaaaaactttttgattaaattagaataaaatttctttataaaataccattaaagtatggggatccctatttataaaaatttttatatatcaaatctcaaaaccgttattataaaatcaaagttacatttccaacataaaagaaaagaaatcgatcctgctttccagaagccatgacaccacgactgatatgtacattactggtagacctctaattcatggccgaatgtagctttaactttcttacttgcaccatgaagcacccgtcagtcacaatgactcagcaagaaaagttattaaatcagaagcattgtaaacgtagatattcacatctcaatatacatatatattggtgattcacgcaagtccatcatacacatctatatggttttaatatttatacaattacatatatgttacacaataagaaaactacaacatcttagtcaacatcttcatcattatactaaatgaatatttaatcaatacataaccatatattctcagtgcttcataaagca

SEQ ID NO: 108821 - DNA, 639 bp, Cannabis sativa
actgtttggaaacatgggcaatgagaatatatcctctagtagcgctataatctcataaattattcgttatgtatagttattctcttcgtttttattttaaatttttgtcgagtaagagagatcgaatagattgttaattaattaaagaataattaatatttttgctcttcaatttttcacactattatatattgtattctttatagtatcttaattattaataatatattttttaaaatataacatttacaataatataatttttttatcacattttatttaattttatcgtgaaattagtaaactatgaagtaaatgatagttcttaaaatggatataaattaaatattgttcacctttgaataatagaatatttttttttcttttttataattatttatattttgtttttaattttttaattattaaagtaaaaaaaaatgtatttaatttatattcatttaattatcaattgtacgccatctactgtatcactagttaaacgataaattaatttaataaaatatgatagaagaactaaaatttggtaatgtaaaaattttaaagaccgaaaatattaatcataattatttttaattaaatttgtttgacaatggttgagttttagaataaaataat

SEQ ID NO: 108822 - DNA, 1192 bp, Cannabis sativa
tggtaatttcccctttagttgtattgacttatgagaagatgaacaagaagaccatgatctctctctaaagctcttataatgatctctgagtaatttactcttagatcgtggtttctctcttgagtgttctctctgaatgaaatttgtatccttgaatagtgagatgagtccacatttataaggattaattatatgaaattggtttccctaaatcaataagaaataaaaatggaaaattagtttattttccataattacaatgagcaaaaagaaaacttatcagattgtcttttcttctctgaagatacgaatctatcccataaatttagggattatgacgtgacttgcaagcttgagaatacataagatatatctctgaaattggtaactcgcatctcttggtcggtgcatgcgagccacctgctcgatggaagttggtcggctattatgcatactctgcttggatgtcacaactcctttttgtgatcttgaggatcaaccattcctgtatggcttactaagagtaggattgccaatccatgttacaaaatatgctccacgtgttacttagacaaatgtcatgtcattgtgcaaaaatttgaataacactaggatttaccttggattgcttggggaagaccagagctttcttcctatgattattcctggctggaatgagctacaaaaggtaggtttctttctagtttttgagttttagctcaagaggtagaagaaggagaaggtgaaagtgttgtaatttgactttcttttaaaggttgactaacctttccttcacttaaaggttttgaccctaaaacgcctcaccaataaaagaaagagtcaccagccacctcaggcaaactaagtgactaaacctctatggcaaaattaccattttgccccttgcttgctacttaagtaaactagtaaccctaagggtaaaatagtacaattttattttctcgctaaaccccaatattctaaaatgttcaataattttcctcgtcaaataattgatacaaacccgtatatagtgactctaatggccatcagtcgtatttctactattactaggcataaaaatatgaaaatattaaaattcatatatatatcatataagatacgtctaaaattcaataaaatctccgaaattgataaattataatataaatatctatttcttaagaatagg

SEQ ID NO: 108823 - DNA, 1108 bp, Cannabis sativa
ttttttaagattatttatcagttatttttgaatttgttttgagttaatgcgatgtgttgttaactaattaatttatgtattaatatgaagttgaatctagttattttatttcttcatatttaattgttcaatcaagagaaaaatagtttatgttttagtttttcatggttcatactttttgttgtttgttggtttctttcatattttctacactattagttgatgtacaattaattttcatattaaaatagaattgttattgtgttgtttattcgttgctattaggttgttttaacaaaaagaaaaataagtatatatttacttttttaatgtataagttggtgtacaagtgttatgtagttgtttttaaatttattttatagattatttgtgtattttttcttggatctattgtaatttatgaaattattttcatgcctatttaacttgtatattatagtaagttgttagacaattatttatttcttgttatttagttattcaatcaaataaaaatgaatatatatatatatatatacattcttattttattttaacattagtggtgtttttttttttattttttttagagttgttttcatgcttatgtaatttgcatattgcagtggaatttatgcagttattttttgttgttatttagttatttaactaagtgaaataaatgtgtatatatatatattttatttgtgtgttgtttttattttatttttttaagttgacataagtgttgatgctcaattaatttttatattaaaatagaattgttatcgtgttgtttattcattactattaagttatttcagtattgtattttttgaagtttttgtcttataaatttatttttgtttgcataatatgataaactttaattgatttatatgtaatggttaagttgttttttaattgtttttgtgttgttgtttagttattttgcgctgagaaaagaagccctacacgttaaaatccactttgtccgaatttgccacatggcaaccactgctgcattctgacgctacagtttgtgagcgtcaggcaactctgaaggctttgtccttcactcctgtgtgagtctcactcgcccacatag

SEQ ID NO: 108824 - DNA, 526 bp, Cannabis sativa
caccttggtttcaagttaaagttcttgataaatcattattttaaatgctattgtctcctcagcccctcaaggctcagctaactctaaccagcttcaggcaatgctcaaacttactatttggcactaccttggttatcatatcagaaggattgtcttcatttggaactttggcgatcatcgcagcttctttctccacaacctctcgtatgaaatgaagcttgatatcaatgtgctttatacgtacatggtgcacacaagggctacacataaatttttgtaaactgcccaacctgaataatccacccaaaccaaaaccaagataacccaatgaaaaatataaaccgaaaaacccaacgaaaatataactcgcctaatcaactcgaactaacccgattaagatggttttttatatatatttatatatttttttattatatatatttatatatcatgtaatttagatgactatttcaaaaataaagagttgaaactaatatgtttttttatggtggttgatttgaacttt

SEQ ID NO: 108825 - DNA, 695 bp, Cannabis sativa
ctgttctgttttgtcactgcaaaacggggttctatagtagcagaattactttctgcttctgcagacgcatacagtttatattttcttaaatataattgacatttgcaacaatacggtttttcatattatatatcatatttttatatattactatgttaaactttaatttatactaaaatattatatatttaagtgtctataaaagttaataccacaaatagttttacataaaaatattacataaaatacaattcaatataatacaatacaatacaatacaatgcaacctaatacggcgttccaaacgagccctttaataatcaaataataccccaagcaaacacaaaaccctctaaaaatattagagtagaatggaaagatagagaaataaaaaccctaaaatgtaaatgtaaaataaactaaaaaataaagataaaaccaattgggctagaaacaaaaacaatgaaatatgagtttggatatgagtttggattcttcacaatcttccacactatgattgcatatcaaataccataaaaatcataaatgtgaaaaaaaataccataggagagtgacaaacttatatatgccatatttttgtaactttagtatcaaatctcatatttcatgtaatttttggattctataatagagtattactttttggaatctttgcaactcaactttaacatgta

SEQ ID NO: 108826 - DNA, 2644 bp, Cannabis sativa
ggttgtgagtgagtatatacatatgtattattctctagttttatatatattatattacatgtgttgtatcttcttcttttacctttcatatatatatatatatatgtgtgtgtgtgtgatatatatatatagtgcatatatatgtgtattataacatatatttaatcaatctctttcattgtccttgtattatttttacaattgagttgtatatatcttgatttatcttccattgtaataatatctctaacatgttctatctgctactgcaaggtctagttctgctcttgcagaattgcatgaggtcaagtaagaattggttgagatgagcttaaggttggctgctatggaggaagttcagcaagaaatgtctaagaaattatcctctttcgttcaaatttatgaaccccaagcttagttctctttcttttgctttattttttgtttcttttcttttgttggattatggttgaactttattttttttttattttgtctttgaccctcaaagataaacaaaaagggggagtaatatggtttaattttttcaattgtatactcaactctagagcctttttccatggggagttgagtttggtgttttgtgttgaacttttgttaatgttagcatcttattttagtttatttgtgtgcttctgaggggagtttgttttcgtatcattgttaactttatgttttagattgttgaaaattaaatgattatttaaagtaccaaaagtggagattgttaggtcctttttgacaatattagttgtcaaaatattcttaattgaatattttattctcataaaatatttttttttgcgtatatcagtctttttatttaggaaactttgcataaaagagaagaaattatgtttatgaaaagtatgtctaagttgctctttttaggtataattgactctaattgtatgttgattgatctgatcagtttttctatatatatatagcatattttctaacctttttatggtagaaaataaagtttaaatcgtgatcttagacctatttggaaagtttcctattttagcccaatctgccactacaaattccaatcttgtctctacaaatcagagattattttaggaaagtattgtataactgtgaaaatgtatttgtggttgtctctagagaatctatatgatttataaataggaccgagagagcagtcaaacgttctcactcttctaagtttcattttgcatatttttatctttgtgataagagaatttcttttgtgaaaacctaaagtgtttagctaggttctagaatttgtttattgttcttatattatattattagaataggttgaagaacttcattgaacacaagaagggtcttcgggagaagacttgttaaagacttactttgggagtaagtaagcactcacacatcaaaagaccaaagaagtttgctatttggtggtgttcagaattttgattggcaaagtaaattataaaggattacggtaaagttttagagggagtctaaacatgtttaagtcaattgtattttataaatgtttgaaactttactaattgatttcattctctaggcgtggccccgtatcaaggagtgtttgaaagaatattgataccacgtataattctcttgcgtcaagtttttatattttgcactgttatttctgttatgttactgcaaatttatgtttcggagtaataaatttctggtctattgtcgtagatctttacagtcatgtttttctttattattattaaaaaaaattattggtatatgcaaaaatacggttttttaaatccaaaataatcaattggattaatttaaattattatgcggatataatttgatcaaaatatgaaattcacacttaatacaaatcaaatgtattatgaccaaaatagtgtagattgaattagacaacacatttacatcttgttatttaattattgtgaatactacatgttggtagttgaaagcacgtttaatgtgaggacccttttggtccagcattggctaggttttcaattctagcaatgaaaaaatatataaacataaactatatgatataattatgtgtatatatattaaattttttttctttgataaaaactatgtgatattactaaggatgctatttttgttttaatatatacacaaaagactaattattttatttattatgtgtaatattaataattaatcttagtaggtatgtttaattttcaaacaaataatgaaaattgtttgttgtaattaaaaatattagttaaatatttctaaatggagagagattcgattttggaatctttttgttaggtggatatgattttttgttattaacttaatagagtcaattgatactattttttgtttgaatctttataagaaactgtgtttctcacttaagagaaaatgacagtttaaatatatttgtgttaaaatttcatgtagttgcgaatgatatattttttattaaatatatgtattatataattacttactctacttttattgataattctttgtaaaaggatttcatttatcaaaattactgattggtggtctaaaatctcttactagatttctgaaaaatttcaattaaattgtttaagagtgtagtgatgcgcaatatgacttccat

SEQ ID NO: 108827 - DNA, 965 bp, Cannabis sativa
  modified_base (934)..(939): a, c, t, g, unknown or other
aatgataatttgaaaagaatatcagagtaaaaacagtttccaattattcagagtcaaacataatgtcaacattatgactggcaaaacaaaaagaaaaacattatttaaccaaaagcagaagcgaaattgaattcttcttaaaagtaggaacatagaaggtattgttcaaaacaatctaaacactaaactgtaattcaagaattaatgtgccaacataaataacgtcaactccaatataagtgtccactttaagctttgactccctctgatttatcttcttgagatcccttagcccatggttgtgcttgcttcttttaatattttctttatcctttgttgggcttaggttgagaaacaagtgagaagatgcattattttctttttacagcttgctttccttagctatatactgagaaataaggttaacactccatgttatattataagtgttgtaagttgtcttcataaggcaaaaagagacgggaagtgcatgaaaagctcgatgaatgatgtaagagtcaggaagaggaatattatgatctttcaacttgtactgaacattcacaattttcgaaataaaatctcgcactcctttgatttatcatactgaatgattgtcatttcatccataaaaagtcaaactgcagccttttcaccagtgtcaaatagtttttctactgctttgaaaaaaactcattagcatttctggtgtttggaaaaccactaaatgaatgttatggaattgagctttcatagcaatgagactaagatgatttgaattttttcattgtgcctaaagtaattttaacatctcgtttccatgtcttaaagttggaagcattcagaatttagatggaaacgttattgttgttcgcagaaaggagaccaaaaagaaaaaatccaaaaattgaaacttgatcaagctatatgagcnnnnnnattagaaaatattgtagagtcaactg

SEQ ID NO: 108828 - DNA, 1041 bp, Cannabis sativa
tatatttcttcattaactatatatacccttctttgttgaaatatataccaaataattacctaattgttatggttttcaggggatggaactgaaacagtgtgtgaattcaactttgtgtttggagaaaaagcccaagttagttgtgggacttaggggttcaacatccaatatttttgtggataatgcagcttatagggacttccttttccaaacatttcaggtttcatcttcagacatggaaagttttgctgtggttatggtaattacttaaaactaatttctctttatgaaaattacaaggtttagtaagatgatcatacaatatttatgaataataatataattgggtgtgtgtttttttgcagacaagcttgtccaatggattccctgtgcttgtaattagagggctttctgatatagctggtggacaagaaggaacaaataccattgagctgtttggttctctggcagctcttaatacagccaactctgttattcgtttcttgaaggaattaaaagcttttgatgattccaattatagttatatgtagttttccacgatgagttactactagtactactacagtactcagatatggaatgaaagttcttgtattgtttatacatttgctaattaaaaatttcataaataaaacaaaagttaatgcatatcgccgtctgtgggaatcgaacccacgaccacgtggttaaaagccacgcgctctaccggctgagctaagacggcttcttgtaacgtaatgaagtattgtaaattataattctttgcctccttccaaaaacaaatcttaattatctaaacacacataaataaatttttatccactttgtaacatgtttcttttactatacatatatttcttaatattttttttttggattctttactaaatttaaaaggttaaatggaccttgtagtatatagtgatagtgtgttaaatttgtttaaaaaagaagagtaagcattatatttagtactactttgagcaatttgcggcgaaacccccttatgttttgattttt

SEQ ID NO: 108829 - DNA, 1697 bp, Cannabis sativa
  modified_base (134)..(140): a, c, t, g, unknown or other
ttgtgagttttggaaaattctcatagacacataaaaattctgttatcactggcaggaatgctgaggtaatgctataacatctgggaaaaatcagcataggcagaattagttattcaagccactttttaccatannnnnnnttttgaaagcatttttctagcaacaatagcattaattctagcaagtttatttattttcattttaattttgaatcattgctcaaccatttttatttttttccttttactttatgttgtaattagttgatcttacttgtcactttattacttgtttgactacgtatacttgcgtacataattttcacaacaaaattcttatcgggacttttattttcataccaaattcattgttttcataccaaattcattgatgttactttccaaaacaactcgattgaagtttcccaattgtattttgactcgtaggtagagtggaggagagtagggcctctattatcattattacaacaaacccatttattttatataaaagaaggggaagaactattcttctgtttttttcttcctataagtccactttattgttcaaaaactcaattttggtatctgatatctgttaattcttttcatcctctttgttcctcttgtgtgattggctgtataaaattgtcatcatcagtaaatgaatatctttcattgcatagaagatcttagaccattaattctattttagtttgttacttaagtctgttactttctgttacacattgtaatcttagaccgttaattctgttttagtctgttacttaagtctgttacattctgttacacattgtaatactatatcaagaccaagtgccatctgttctaattcaattcattctttcattttctcaataaataaatatgatttcttctctttgtttttgctaagcctcttcactaatatggtatcagtagaaacaacttcaagaaaccagttcaagcttcttcaagatcattcgaaagcttcaaccaggatccaacaatggtgagaacatgagcgaattcttctgctacttctattgatgatcaccagtagtcgatgcatccgccgctcctccaccaccatcaaaaacttccgttggcactctaccttgttctgcaccacctgtaccaggtcctcgattagatgtcatcgaccggcctgcatatgaagatatcagatctccatactatctcagcaatgctgatcatctaggtttggcccttgcaactcctttacttactgatcgtaattttcaaccttggaaaagagattttaaactctcaatcggtgcaagaaacaaaaccccttttcttgaaggcaatttaccccaaccttccccaactaatgcactttatagttcttggacaagatgcaacctaaaggttatgtcttggatattgcattatgtttcccctaaaatcaaaagctgcatcatgtaccttgatagcgctgctgagatgtggtccgttctcaataattggttcaaccaaggaaatggccctaggatctttaaattcaatgagacattgacttaccttcatcaaggtgatgactcagtcagctcatatttcactaagttgacagctatgtgggatgaaatcaaccaactaaggcctaggatcaattgcacatgtgtagctgccatacttaagctaaaagatcagattagatcaaatagctctgatgta

SEQ ID NO: 108830 - DNA, 3040 bp, Cannabis sativa
gtattcttctacaacatagtcttcaccagcctctagaacctcgccagcctcaaacacaggtttttcttatttattgtagccaccaaatggcagcacccgagctactccctcttcttcatctccttcagcctcaggaggggtagcaggacagatctcgccttggtcctcaatctcttggacttcaacgtccctagatgtgtcctcctcttcagtagcaagtcgggcctattctgccctagataaggtggcaagacgggcaatgtgtgggtcgaacagtgaagattctcgtacaattttcttggtttgcgccatcattttatgtttggatgaaattttatttgtgtgcctaccaatagtcacaacaaaagtggcaataggtttacctgtagcgacagggtttgggcggccctcgggcagagtgtcaactatgtttggacggactatgtatgtctagttggactgaaggtagcgtctccaccccttcttgagttcccaaatgaagcgaccgtacccctgaccttagatttagtcgggattcaagttgtgatgcaccgtgggttctggggaaggcgtgtgctcactacttatttcccagtcttcaaatctagagttagagaggttatcactggacgaagatgggttggcacagagacgaggatgatcctcgtacaatagttgaagcagatcctggtcgatatggtgttttcctccccaaaactcaccaggatacatctacaaaaggtaggagacaagaagatgagaattggtcggggcaacgaataataaacaggttgaatgtaccgaccaggttcgattaaggaatcaaaaacataaattttacttagaactagaattttccaccagaagtttaaaattttgaattagaatctgattctcactaaacccctaatggataagtgaaaatggatatcatggggttaaaatcaaagcgtagttagaatcacatgtcgtggttaagcataatcgagatttctaaatcctaaacctaggatttctatggttgtcctagaacaagttcaagagcagtcaagattcgcagaaagaaacctagaaaattaagcatgcaagtgtataaaagaaagaaataaagaacttactcactagtatgaagatttttgttctgctcggatggagttgacaagggtttcctacgaattcttcaaagaatttgagagagaaatcgcttgaaaatttatttgcactggttttttgagaataaagatgactaaaaggattaattaaggttttctatcctgtttctaagcaacctaagaagagaagtaatcatttcaaaatataaatgtctcgaattcccccccaaaagtgtatgttatgtactcattgctagcagagtaactgtcttcacgcgcggacatcaagtcgcaattcgaggcaaaactgtcgatcagcattaatgatccgaaattgaagagactcttggtcagggtcacgttggttcgtcattcgacgcctaagacatgcgtcacccgtctgaagaagaatccagatcgagtgaagtccacgtgcaaccaggaaggtcccgcatagacttaggggcaaatgttatccaattttttgcacattgacgtggcaaaaggatcgagcgacatgtgtcctatatttatgatacctgggcggaggtaaatgtccgtagcagcctacgcataatttgtcagcatctataattgtcgattactcgagtagagctgcagagaagacatccgacctggtagaagtctgttatgccgagctacttacaagagataattacttcagaatgatcttgttatgtccatacacgaagagaattcctataatcgtttgagtcaaagaaatatggcaacttgttctagtttcctatttcatatattgtaattatgtaatcattgtaattttctatataatgcattgtaagcaaaagggaaaccatccctcatgcattaagcccctataaatagtgacctagcctcactatgaaagggatcgaaagaattgcttcagagagagattttagagagaaaatagtgatctaagagaattactcagagagcagttgtaagagctttcaagggggaagaacactttgttccttctcctaagtcaatacaacacaaagggagtaggctattaccacactcacggggtcgaacctctttaaaatctggtatttattttactttatcgtttttgttctcttttaattatattattcaatacttattatttgactcattgtcgttaattaaaaacgaggtcaacaccagtatttttgaaagatttgggtatttttctaatatatgtgtaagttcctaaaaattaaggggttgattggtttgtgattgaaaatttgtgtttttttaaaaatgtgttttggaaacaaaaatttaaattttataagtgaaaaattgtttctaaaatgtaattggttgtagtgtgatttaatatttttgagttttaaaaaattgaatatataattggttgagaatttcaaaataaaaaaataagaaaatatttaaagagtttttgaattccataatttgaaaacatagaaaacatacaaatgtgtttttatattttagcctaaaactcaaaataatattcaaattttatttttgaaaacactcaactaattaagaattcttatatggatcccaccattttaattttcaaaatcataaaactgttttcaattctatattagcaaactgttgtgtattattattaaggggatggatgcaattgctccgccctttcatgcaatgttttactaataaaggaatgacacgaaagaaaaatatcaataaaaggaaaatgaaagcttatgtattaatcagagttctaagaaaacaaaagggtcagttggctaaatatttcacgctctagttttggtgagtgctgtatggctatcaaaacatatggctgacataatatgtgtaaacttataagattggctcgctttggccgaccctcatttaaactaatttctatctatgcacgttttttagtttcaaaaaaaaaa

SEQ ID NO: 108831 - DNA, 524 bp, Cannabis sativa
ttaattaatgatattaatgtatatatagtggcagtgacggactcacatggaaacgaggggcagttgcctcttaaaaaaagagaaaagatgaatataattttagttagttaggaaatatatatttgtaataaaagatatacatacttatagggccgattctaaaatttagtggacaatagggaaaaaatatagttttctactcttatttagaataatataaaatgtggtatttttcaaaatcaataaaacaaaattttaattttaaaagggagatttttttgggccctagataggaccggcccaaatattttgggcaccttgtgcaaaagattaaaatttggctttttataaaaaaaaaatatgtacattaagacctccattactagttttttacttttttttttacttttttcaaaaatatgtttccaaacttttaaatataagtttttttaatgtatttataataataataaaaaaaaaaactttttctataaaaaaaataggcctttaaaaatgggaggtct

SEQ ID NO: 108832 - DNA, 741 bp, Cannabis sativa
  modified_base (461)..(462): a, c, t, g, unknown or other
ttagtgtagttgttggtcaaaaatagtaagttttctgctgtactataagagtacgaattttaatattaggaccttgacccaggtcttattataggtagtagtgttgagataacaagtcttaagcaatagggctttgaggtaaggaaattagatagttttgtatatgtttatctacataaatttaaattctttatgtattggaatatgatttatgatttgttattaagaatatgtatatggtactgagaatgtgtggtatggacacaatatgagtttgtgaattgatatatatattatggttattttgacttgtatatgttgtatgttgtattcagatattgtatgttgtatgctgtaagttgtatgctaacgtctcaggtaaagtgagggaccatggtggggtatgatacggagtaaggccgttgaatgtagagataccctaccctgcatttttctgagtnngtatgaaattgttatggtggggtatgatacgggataaggccgttgaatggagagataccctaccctacatttgtccgatttgtgtatgacattgttatggtaaggtatgatacaacggcagtgctgttgagtatagagataccttattccatagcaatggtagggctaaatgtgccaatgttattgtacggccagttaagcccaagttgtgtatggagtggctatgatacgccacattatggtaaagacatgatatgattgaaataattactatatgtt

SEQ ID NO: 108833 - DNA, 944 bp, Cannabis sativa
aaacagccatcagaaaacacaaggcatgaaagtcaagaagctcaaaagtaaagtaaaatgcaaggtgaccgcccgcacagagactcagaaatctgtcatcacctgacattgatcttatctcagacatgacggccttccctttcccggcaaagggggagatggccgaacaggtgaagtgggctcccttatgcgaatttcatgttcaacaggcctgggcgtggctgggagtttcttcttcctcttcaacggggtcacctgctcgtcctcagcctcatctttaggattgaaaggctcctgagcatactacttggccctggcacctcctttcaacttagcctcgcgcttaagttgaatgagctcatcctccttattagctcgttcaggccatccagcaccaaacttcctcttcttccccgccacagacttaggagaaaagtcctcggggtaaagcccatacttcaccagattatcaccggaggtcaactggataatattcatgtcttcccccagcaaccgggtaagtttctgagctctatccctgagagcaagagtgaggggaggacggtgatatgtcggaatctgctgaaacgaagtccgggtaatgctcggatccttcaccatgaagtactcatcagcaaaacgccctattttgctgatggccttgtcatccgtgccggtcaaccacttgaagcctggctgagagaagaagtaccccgacctgccttgcttgggggtagacttcaggtcaaagaatcaggcgacctcgtggggagaaggagcatcccatccttgggaaccatagaggatgaagagggcggataaatacttgatgcccgtaggagtgatctgggctgggcagagatcaaagaagtctgccacatccctgaagtacttgtgcaagggcatcagcgctccctgcgggccgtgagcccccgaccaagcac

SEQ ID NO: 108834 - DNA, 718 bp, Cannabis sativa
agggcattctcaagaaattttgcattgtttgattccacaattcttgtgctatgagatggacaataaaacttgtaacctttagacttttcagcgtgccctataaaaaatccacttatggtccttgggtccaatttcttctgctgtggattatatattctgacttcagatggacatccccaaatgcgtacatggtttaaacttggtttccaacctttccataattcaaaaggagttttttagactgcctttgttggaactcggtttaatatgtacatggaagtctttaaagcttcattccacaagaatttaggaaggttagagttgctactaagcatactccgcaccatgtccattaatgttcggtttctcctttctacaacaccattttgctcgggtgtactgggcaaggtgtaatgggcaacaatcccattttcttcaagaaacttcgcaaatggaccaggtgcttgtccatcttctgtgcatctaccatagtactcacctcctctatctatttgaattaatatataattttatataattaaagatgatgtggctactccttaattatttaaaattataatttcacttagacattaggtattgagctctatctaaaagtaattttgttattaacataatagacaatcattgagattagtgctccaagtgtggtcgtccaaaaatcattaaaaactgttctacatatgagcatttgtcc

SEQ ID NO: 108835 - DNA, 726 bp, Cannabis sativa
agagaatgatcttgtcaaaaccactatgaacaagatgcaaatgccatagatataaagaatgtggttgtcgtcttttgatggctcaggtctagttacattaaagagttcttaatattgtccaagtggattctagtcacagaataaaaaactcatattccatacattaacatacagtttgtatccattgacagaaaatagatattaataacttgtgaaagtcatactgtattgttcaatgtattctaggaaactgaaattgaaatttttatttagaatctaaaatttaaattcaaagacttaaatttataccaaatatacatgagtaattattctagctttgaccaccactactaatctaactctaagtttaggttgcctaaagtaagcatacacaagtaggagattctataagatcgaggattcatatcatttcgggatagaatgtcgggaatacagtcatctgcgccattcaatttcatagaagaaaatagaatgacatcataaacagaagatttataaaccattcatccaatgatatactatttaagcaaattctaaatgaaaaagctaagaggaaatattaaaagataatttcgaataaaacaagaatctaacgatgtcttattttggcgagagttaaaatcattcttattttataaatctcttcattgtttcatattgtaaatactaatctaagttgtcatctttggatgtacaactagatgt

SEQ ID NO: 108836 - DNA, 2486 bp, Cannabis sativa
atcaaatgtaaatattatataaaatattaaatcaatgtgtccaggtgcatagtaaaacctattaataattaatatatttttttaaaacaaaataattaaagatataaaataataaatattgaatatgattggatggacattggatgatattggattggatcggttcggttatccattggatcgaatgtctcaccaaacatccgatccgatccaattggatttttaagatttgcatccgatccaattatggttggatatctgattttattggatcggttgggattggatcgatcggttgcgattggatcagatgactttctgcacacccctaatgcacacccaaacactttcaggtaatctagattaaaaacttgacatgtccacatttattgtagagttttgaatccaattgaagcagatgggcttctattgactaagtagcagaatgttgtaacaacttcttcccagaattttctttctaaaccaacacccttttacatacatctaacccttttcaattagagttctgttcatcctctctgctaaaaaattatgttgaggagtccttggtgctgatttgtgtcttccaatcacagcttctttgcagtagtttaagaattttttagagcgaaattccaaatcattgtatgtcctcagtttcttaactttctttccagattgattctctaccaaatgtttccaatccttgaaagtcttgaaagcttcatctttggttttgagcaagtgcacccataccttccttgagtaatcatctacaatgctcagaaaatagttttctcctcccaaggttgacacctttgagggacccaagagatctaaatgtatgtaccctagtggttcttggtggtgtgtttgtcagtattgaatttctacctacaacattttccataaacacattcttcacagaaatttagctcaccaccaagtttacctttaagaattccttatctttctaactctaacaagccctttggctcacatgaccaagccttaggtgacatagtttagttttatcaagttcttgattagatgaaacaatattgacacaactagttactgtttcaccaatcaagatgtagagaccattcatgaattcccctttcataaccattttagagtctttcaataccttaagaggcttatcatcaatttcaaccttacaacccctctcagttaatacactaatagataataagtttcttttgagatttggaacataccttacattttgaatctttcttttgactccatcatgcaatttaagcatgattgaaccagtttcgtgaatttgacaggcattgttatcacccaagaacactattccacctttgctttcttcaagatcattgaacagctcttcgctgaggcacatatgaaatgaacatcctaaaatatgaacccacgcatgacttgaatctacatttgaggccactaaaacatctgcagactcatagccatttgttacaacaccagcttctcctttttctctgtattttttgttatctctcttgagtttggctttcaaagctaaaaaatcatatcgaaaatgatcctccttcttacagtaaaaacacttcttgtttgtaattcctcttaattcatcttttgactttaatttctagctctcctttaggttcccttctggttcttgatatctttcttttgtgaatttcctctagcaaacaaaccttcaccattatcaccttgattttcttaattcagggatacttttacttcagatattgtatggggtttctttaccatagagcattgtatcaataaaagtgctcataggatcttggcaagaaacttagcaatataatagcttgatcttcttcttctaatttcatcctaattaatgtttttgagattgagagtgattttgttgaatttatctaagtggttcctcaagtcttttccctcatccattctaagagtatacatcctcttcttcaagtatagcttattagccaaggacttcttcatgtatatggaactgagtttgttccataatcctagagccttgtcttcaatagaaacttaattagaacttcatctcctaagctgaataaaattacactgtgtgccttagtttcaatcatcttcaacttcttcttgtcatctccaatctccttaatgccctcttcataaattgcttctgagatttcattgtgaacaagcaatgccttcatcttgatcctccatagcccaaaattgtttgtcccattgaacttatcaatctcaaatcttgcagcaaacatcttcttgatgattcttaaagtcttcgaattttaatcttgattgaactaatcccttgctctgataccatttgttgcgatcgaacctcactccttaacaatcaagatcagaagctcacaagagctatgaacaagaacaattacaacaacaaaaaactcagcttaagagattgaataattctgtaacgtccccgcttcaagcctcca

SEQ ID NO: 108837 - DNA, 636 bp, Cannabis sativa
tgcaaatgggttcatcgtgtaaaattgaacaaagatgggtctctagacaggtacaagtctcgattggtagctaaaggatatcttcaagaggcaggcattgactttgaagagacattcagcccagttgtaaagcctacaacagttagaacagttctctccttagctgtctcaaacaattggctggttacacagctagatgttatgaatgcatttctaaatggaccactaaaagaagttgtttatatgaagcaacccccaggttttgaagataaacagtgtcccactcatgtgtgcaaattgcacaaggctatatatggtcttagacaagcgcctcgagcatggaatgacttgttaagacaaaccttgctcaattggagatttcacgggtctagatctgacagttccttatttgtctatggtactggccaaagtttagtgatctttctcgtctatgtagacgatattttggtcactggacccaatgcagacctcattacaaaacttgttactgatctgaataaaagtttttctctcaaagaccttggtccggttcattacttccttggagttgagattttcagggatgactcggggatgtacttaagtcagtccaagtatattgctgatttattaaac

SEQ ID NO: 108838 - DNA, 596 bp, Cannabis sativa
gagcatgtgatataatatatatattagtgagattaaatatgtagaaataattattatttgtatgtatttatatgagacatacatatataatatatattatatgtgtataatatatatcacgcatgtatattaaaatttatatatattatatatgtgtgagatatgtaacataatagttgtataataattaatatattatgtgtatgttacatatgagatgttgataataacatacatagtatattaattagcataagattacaatttgagagttataattttatgtatgagagttatatattattttatattaatatatgagttacatagcatgataataatattaatattgatagtaataaaatagtgttaattattattgtgagaattattatcatttattttgtgaataaagaatagttttgaattcttttttaatttagtggtgaagatcgagataataaaagataaattttaaaaagttacatctttgattagattataagagataatcatctcatattatgagataacaaaagtgaactatgagagttacacttatgagaattgtcttgtcatagcaagaacaaatagat

SEQ ID NO: 108839 - DNA, 615 bp, Cannabis sativa
agacactcaaagtgcgttcatccctggacgccttatctcagataatatcatggtggcttttgaagtcatgcactatctcaaacgtaaaacaaaaggcaagaaaggctatatggctcttaaactggacatgagtaaggcctatgaccgggttgaatggagttatcttcaggctgtgatgcttcaaatgggttttgctgaaagatgggtcaacttgattatgttttgtgtatcatctgtcagctattctattttgcataatggtcatcgaatgggccctatccttccttctcgtggtattcgtcagggagatccattatctacttacctctttattatatgcgctgaaggcttctctgctcttatcaagaaattcgaatctcagcagcttcttcaaggttgtcgtgtggctcatggggcaccatccattacacatatgctcttcgctgatgacagttatctgttttgtcaagcaacaactggtgcagctgtggggatttctaatctcctccaagtctttgagaatgcgtcaggacagaaaataaatttccacaagtcaaccatctttttcagtccaaacactagtgctgaaactcgaactcaaatttgcaatagact

SEQ ID NO: 108840 - DNA, 966 bp, Cannabis sativa
  modified_base (748)..(752): a, c, t, g, unknown or other
tagaagagattgagatcgatcaagctatcccggccagaaagctaaaaattagaaagtgtttgttgctcaaagtaaaatcgaaattgatagaatttctaagagcaaatttggatgtttttgcctggtcacatgcggatatggtcgggatcgatccttctattattttgcatgtcctgaatatcgatcctaacatccggccagtttagcaaaaacgaagattgctagataaagaacgagcagtagccctgaaagatgaagttgaaaagctgggcaacaacaacttcatcattgaagccttttacctggcttgggtcgcgaaccccgtactcgtgcctaagccgaataagaaatggcgagtctgtattgacttcacagacctcaataaagcatgccctaaagactgtttcccacttccaagaatcgaccagctcgttgatgcgacagccgggcacgaaatattaagcttcatggatggttgttcgggctacaatcaaatcaagatgcatacaccagaccaagaacatacaagcttccagaaagtgtacgtcggagctacataccaaacattggtcaacaagatgtttaaagaccagattggtagaaatatggaagtgtacgtggatgatatgttcgtcaatccagaaaggctgcggtgcacgtagacgacctggatgaatgtttcattgtcctcaagaaatataacatgaaactaaatcccctaaaatgctcctttggagtcagctcgggnnnnnttctaggcttcatcgtcaatgctcaaggaattgaagccaatccagaagaaatccaagccctcctggatatgaactcaccaacaaaaacaaaagaggtgcaaagcctaactagtcgaatcgtcggacttagcagattcgtgtcaaaatcaacggataaatgtgtcccattcttcaacatcctgggaggaaacaaaaagttcgaatggacagaaga

SEQ ID NO: 108841 - DNA, 604 bp, Cannabis sativa
  modified_base (556)..(558): a, c, t, g, unknown or other
actgtaggagaagaaataaaatgggggtgaggcttggcatggggacgatgttgtgatcttggggtagtctagctcgaacaaatctgagaaaagtggagctccaagtgtggtgatgtgatgatggctgggttgaagagaaatgaagaagatgaacaagaaaagaggatagctgggttcatgaagaagaagacgaaggggagagagaaaagcaagggtcgactatggaggttttatgggacgacagttggagcttcagaccatggtggctatggaggttttggcacagaatgaagaacacgagggggaaagagaaaagtaagggtcagttttgtgaaaaaataaaaataaattacttaattaattttaaaataatttatttgtttttattttttagagaaaaaaaataaatttatgattttaaaatatttattttaagtttttattttattttaaaattttaattaaaattattatttggaccaattaaaaattgacacgtggcaatttatttgggtttaacggatcaattagaaagagtgttgggttttgtgccctnnntaaaacccatttcaatataatctgatttactaattaataaagatca

SEQ ID NO: 108842 - DNA, 666 bp, Cannabis sativa
gttgccaaaacttgtaagattttcgtttgttgattgcaatcccgtgaggagatttttgcaatccacttctacatggtggatgttgactcctttatcacgacaccatttaagagcttccaacaaagcccagccttccgctacttgaggatgcaattgtccaattcgattgaaggctgttgctgctagaacttttcctgtgtgatcacgaactaatgccccacctcctattctattctggtgagaagagattgcagcatccgtattgagcttgaaagatcccactggtggaggctcccaatccaggaggtctctgtctgtggtaagctgggtctgtatccctcgcttgtcttgagcagcttgataaaaatccaaatagtcctgagcttcttgttcaatggccctcgatcttgaatcttggttcctgaaaacagttgcatttcttgcattccaacacttccataacatacaaagaaataggttaaaatcatctttggaaaaattaagctgtattaataaaaggatatcgaatatgttcatgtgtttggtctctttaaggacagagctgaaaatcgtacctgaccaagccttcttcataaccctgcactcaaacaaagcatgctgcaccgactcgaaacagagagaacatctaggacaaataggggaact

SEQ ID NO: 108843 - DNA, 545 bp, Cannabis sativa
aaacatgttttgcatagtgatgcagttaggtcgaatgtgaccttttctcccacaaaaatggcaaatagggatgaaacgtcttccattccctttggaattgtcaaactcaccatgttgcttctaatgtgtaacagcagagtgttttgttgaagtgacagaatcctgcgaggtagaaacagttcttctagaaacaaaaatatcagatttaacaaaagtggtattgaaatcaaattgagtagaaccataacctagacaaatatgattactttggccagatttttgaatcttttcaaaaatgttggaacctggattttacattttgacattctttttaatgttttcaagttccttagtcaaagaaataatttcaaactcttttaaagacaattcatattcacaacatttaatttttttcttccagatcattaatgttgttacacaagtctttattatctttaaccagggaacgattttcagcacatatttccaaccacttaccttataagattcagccataaagttctcattaatttctgactcatctg

SEQ ID NO: 108844 - DNA, 1193 bp, Cannabis sativa
atattgttatacgtaaaatttatacatataaaaattaacattaaaattttacttttttttattggatggatccagtcgaatccaatacatgatacttgacctaaaattttagatgaatccgatctgattcaaaaataatagatttaaaatattgggtaaacccaaattcaaataaatatatatgctagatcgattagatgactgaaattaaccgaatcggattggatggtaaaatttaatatctaatatataattagatcggatctggataggcctaaaaatattgaatgtggtccaatgaacactcctagatgtaattatttttataataataaaagtaattatgttatattcaaatattgtgatgcttaacaaagtggtacagagctaaattaagttgtttgttgagttttcttaaaagagttgaatgtttataatactataaagcttattctagaataaaaaatatttaaaaaagatggagttttagccaaagttatgatgagtgattttcaagtggttagttgaaaatatcaaaattatattaatgggcactcaatgcatatgaagtaaatatatatctctatgagaatacacactagcttctctaaaatagaggctttaaaatttttaaagaattgcactaaaaattaatacgcttcaacatatattctaaactctttctttattttaaagtttctttaaaatacattatttatgtttcatatttatagaatattatttattgctctaaatatatatatttttaagtattttaagtttaataattatttttgtatgaaaatatatgtgtatgtatcaatattttatatttgaaatgaataaaatataataaaaattttaaaaagaattttgatgatatattttaaagaaattgatatatgatgtatgatgtatgtaaaaatgtgttgtaaattaaaaaaagtaaaattttagtgatatgttttaaaaaatataataaaaaaactgttggaattgctttaatgcgaaaattaatttataataatttgtaggtagtggaatatggttgattatgtggacacatagccactagagaaatattgtaatgatagtgaaagtaataggcaatgatatacatactataattacttattactagattaatcaatgtatatcgataaaaataaatgaataaaaatcatcaaagtcaa

SEQ ID NO: 108845 - DNA, 656 bp, Cannabis sativa
  modified_base (574)..(581): a, c, t, g, unknown or other
gtagtgtttataattttcgtaataggtgtaaatgggattaaatgggtgatttggaggttatgggagttgttaagagccatccctatagtaaaaaacgttatactattaatgctagaaaaaatagtaaattagttactagttacaaaatttttcagcttttgcaaataacactccaaactattctcactttattttatatcactgatacacattataaatgacaaaattcaatccccaacaactatatttgaattatagttttgaatttcaaaaaattaagttgtgtaaccactctttacacacttaattagtgatcatgtggaagttacaaaatataaataattccacctcttatgttacaactattacatatatgtaactcccaattacattatattgtgattattacatgtatataactcccaattacattatatattatatccataataatatgtataatatatcaaaattttaattttaaatattatattatttaataaataatataacattcttccactagattaaaatttggcatacttcatcgtaacactttatttaatcaatcaannnnnnnntatatctcccactttgattgaataaatcaacactctctatagagtccttgcttaagtgcataaagttaagtgttt

SEQ ID NO: 108846 - DNA, 699 bp, Cannabis sativa
ttgtacttatagcaaaatataccactttcagatagagtattaacttgacataacattggctctgatattacttgtttgattttccctataattttcacaacttgcctccaataccaactgctactctctttggattcatactcctaccaattttgattctttaaatagatattgtggaatagtttctctaaataaaaagggtctcctaaaattatttttggaaagttatctatctttcagaagtatgttcccaaacaactaacctgttaatttggaagaagtctcgtgaaatgacggttgccatctgaaagggagttcctagatgactatcttgtccactccggatgtagtcctcagaaaaactagtcttcctccggaaatgagttttagattgctagttgttcctcctggaagagagtctcgaatagttaactctacgtggctcttctttatttgggaagttccttcagcgagtgccttcgtctgtgattctggaagccctcttacacgttcctggatgcactcatacttatgctaacgtggagacctcgctcaaatgggagttagttaagctggttattacttaactaacttaacaacctcgcttctttcagccaccgattttaagatcttgatcctaagcctttaattaccaccaacactaattatttcatacacaaagatcagattgagtttcga

SEQ ID NO: 108847 - DNA, 1345 bp, Cannabis sativa
gaatatatttctcatccctaatttctagaacctaaaaagaaccaatcattttaggcccatttctcttttcaatatgatgtataaggttatttccaaaatcattgcaaatagaatcaaacctattttaccttctctcatttgcctaaccaaagttgcttttgtgcttgggaggaatatccaagataacaatgtgattgtgaagagattatccactcattcaacatgaagaaaggtaaagagggtttcttttccataaaaattgacctggttaaagcttatgatcgactgagctggagattaattgaccatgtgctttcttgttatgggatcccttagaagttttgcaagtggctctcccagtgtatctccaccaccactctcaatatctgtcttaatggaggtaaggttggtttgactaagccctcttgcggcttatatcagggtgaccctctctccctctatctctttatttgggttgccgaggttttatcaaggcttctaaaggatgctctttgcaagggcattattcagggtataagacttagtaggggcggtccggttctctctcatatcttttttgcgaatgacctaattctggttggtagagccaatatgaatgaagcgaaaggtgtttggcactatcttgagagattcttcgcttggtctggccaacaagttaataagctcaaaaccacaattttctttagcaaaaatactcctcctagtatgaaaagagggatcagggaagctttgagaattggatctcctgtaggttttatcaagtacttgggcctcccattgtttagatcaagacagaaggatgttgattacaacttcatcctggataatctcacttctaagttacaaggctggaaggcaaaaaccttgtcgcaggcggggcgtgataccctcatcaaatatgtgggcctgtctctgcctatgtatgttatgcaaactagcaaactatcaaattgccttgttagtaaaattgatggcttggtgcgtgatttttggtggggttttgaaagagggaaccatgggcttcacttaagagcttgggataagttgtgtcttcctaaatctcttgggggtcttggtttccggaagactagagaaatgaactaggattttttggcaaaatgggggtggaacatgctgattgggtgtaagtctctgtgttgcccaattttggaagctaaatatctaaaagggatggattttcttaattgtagatataagaatttggattcttggttttagaaaaatgttgtaaaagccaattctatcctaaggaaaggagcttataaattggtggctgatggtagagatacgagtatttgggggg

SEQ ID NO: 108848 - DNA, 1063 bp, Cannabis sativa
aaaaaattatgtaaaaaaaaaaaaaaaaggcataattaagaaaaaaatttatttcataactaatagtatgattcgtttcggattttttttattaagtaagaaacttacattttagtttcaacaaattaattatgaaaagaaaaattttaggaaaaaaaaatcatgttccattagaagaacattatttatgtatgttaaaaaaatattgcttatgtaataataaataaataataaaataaattctttcaaaataataataaaaatatgtataagtaaaatatgtaagtaatgatttttttagtgaaatttctatatataaaatatttcaataaaattaaataaaataagaaaaaaaaatagaagaacatctaattttaaatttcttaactttgttgtcaataattaaaattttggatacataaattactgtgactttattaggttccgtgacttttttatatttgcaaagttttttttgacatcaagatatttgatttaatgcaatgaattatacaataattatcttgtactttcaaaagtcatttttataaatggtcaaaaaaatatcactatgctataaggacaaaataaatgtacctactatagaattttcatgtgaaatattactttgtctgtttaggggactatgctgaaataatcttatgattggtttaagagtagactggactattttatttatttatttttttaaaaaaaaaataaattaaaataaaaaacataataataaataaataaataaaaatgaataattcttaaaaacaataaaaacgaataataaaaataattaaattataaaataaaataataacatcaaatatatatcataaaataatttattatagttttatttaataaataattaaaaatagtaaaaaaatatacttaaagaatacaaaattatttatgctaaatattaatttaaccactaatttaatataaatattaattttctaaaatattaatataaattttttaataatttaagaagaatgatcatattgttttcttataaacaatttaagtaattattgtttaattaata

SEQ ID NO: 108849 - DNA, 678 bp, Cannabis sativa
atcaacgactggaaaaaagaaatcgtttaagacgtcagccatctcatcatcaccttcattgtcctcgtgaataccgtcgacaagaggtccatctgattccccgtgccaaatccacttttgataaccactttcaaagcccttgtcaaaaatatgtgcctccacggttaatagatcatgtcgtctcgtatttcggcatctcacgcatggacataaaaattttccactagagtctatatgtttcgatacaaattcaataaaggcttgaacaccttcccaataagcatcatcacaacgattttttgttatccaacttttatcaatcgccatctaaaaaaaaatttaaatgacgaagattattatgatgaattttaaacaacttatgctcacttattatgataaattatctttagtattatgaattcattaattattcacttattatgataaattattttaattactaataattagttttttatttaaattatttttaaaaattatttaaaattatgaaacttttcaattgaataaaatgactattatgatgaattattttttttaatgagtgaattatttaattattcctatttttagaaatcataaattatttttatgatcatttacttatgataatggaacttttagaaatattttattaatttgtatctcacatctcac

SEQ ID NO: 108850 - DNA, 633 bp, Cannabis sativa
  modified_base (44)..(64): a, c, t, g, unknown or other
taaatgttatttctgatctacattaataagtaaatctgattatnnnnnnnnnnnnnnnnnnnnnggcataaaacccaacagagtttcccctctagtgacaatgcgtataaacagaaagatcgtgggatcaatgctgaatgcaaggatcgtgggattgaggctaaatacactgatagcgggattgtgtgtatgccatatccacgtaaattgatccctgagttatagggattgtgctgatgagtcacgatgcgaaagttgaattcgctaagtgtttggccattctgtgcagattactgaatactttgatctgggcatgccagtgaggcatcctgctcggactgtgctttccgagcagatgttccaagtagactccacgtgccaccaattgcaaaaattgggataacacccttatccacatcttccctcccaaagaagtgattcgtaatatatgtatgtatggtaatgaaatgttctgttttgctgtatttttggttttgtttctttttttaggatattttcttattgaccaaataagattgagtgaataaaatggacaaggcacatgcctttgctgatttttttcgatgaaaaggatagttaatttgaaattgaaactgtgagtttctttcttct

SEQ ID NO: 108851 - DNA, 536 bp, Cannabis sativa
gacgctttgatgtatgaacgttgcctttgcggtggtatgacttattatcttaatttggtattaatattcttcattttgcattttgttgatgttttatgttattcagttggtataaatttagcattgatccatgtactatatcccctagtctaagtcttagtgagtgtccctaaaacttaggctttggaacaggttgactgagtacatcgagtttggctgaccgtaacattgttgagtaaattttatatttagttacgattgaacgtaattctgaagacttgatttatgatttgaaaagtcagactaaatatagctcttgcaatttgatctatggttgagtatgactcttgtccttgagttttttaaatgaacagatgggttgggcatagcccttatcacttagtttgtaagtgaatatttgggttgagtgtaattccgatcacttactttataagtgaatagttaggttgagcgtagcttatcacttatttcataagtgaatagttgggttgagcgtagctcctattacttacttt

SEQ ID NO: 108852 - DNA, 1672 bp, Cannabis sativa
aacagtagcttgaaaggaaaatttcgatttctttgttttccaactcacaaagtttgacagcacatcctatttaatttacacttagttggactttaatcccttagagatttttttaatgatctgttttttattaataaatatataaacattcattattaaaatgttggtgagtaatatacgggtaaattgatcatttgtcataaatatataaataataatgaataaaaaaaaaggcaaaaatacaagttctctaaatgcatatttcccttgcacatgcagaaagttcatgctttattatctcacattccttatacatttagtaggagtaagtttgatttcatcaacacaccgaatattaatatttagtcacctaacaaagcccaattatcacacaaaaggaatgagagactcaactattcaaaacctgcaactcaccctctttgtaatggcttttttttgttaaatattatttcctcaaccttcaccaaaaacataattttcactaaagaaaaaaccattccaaactaaacttgtatataaatgaagaactaggcttaatccccaaaacaaggaaaatcccatattccctttctcatttctccaaatatattttcgcgtgcattagaaaaagagaagtcaaagcaacacaccaataagaaagaaaaaaaaaattaagagaaaaaaaaaacaacacatatggagagagccaaaactagtacgctaaggttcctcctcatcttcatcctcattgttgtactgaaaattgagggaaagctatcgggaccccagacggggatcactccccgtccagtatgtgcatcgcagtttgctctagcaaactacgcatgctccatgataccctatagtccactcccaccaccagccccatctacgccttccttggatgcaaatcaccaccatggtaggcacagaaggggcggtcgtggtgggcacagacacaggcacaggcaccatggcacgcaagaagaggacgattgctgcagatggttgtacgaaatagacactgattgtgtgtgtgacatgttggttcacttgccaaacttcttgtcaaggccagttcatgagtacaccctcgtagttggagatacctgcaatgtcacctacacctgcggaggaagggtcataagaaaataattaagatcataataatttgagtttggtttggtttaattattagtcaagttattattattattattattgttgttattattaagtgtgtgctacttttattgtttttttttatatgtttcgtatgttatttgtgttttctctagtggttttgtttgttgtgggggtacgtacacgtttgatcatcatcaatacgtctatggataattatgctaattaatttagcataatgttgaaatatctctcttgcttcaattattgtaatacatgccttcttactagttatgtggtattatctttcttatgatcattctaataattttgagccttcgaaataaacgttaattatctttaatatattatatatattgtatgtaactatgtatgcaaatatgagtatttatataataaatttttgtatggcataataatggaatagctttcaccttaatttttaccacaattttaaaattgcgaaaacttgatcagatctacgtaatcaataataagggaatattag

SEQ ID NO: 108853 - DNA, 705 bp, Cannabis sativa
  modified_base (32)..(38): a, c, t, g, unknown or other
  modified_base (65)..(65): a, c, t, g, unknown or other
ataatagtaataatataatattaataatattnnnnnnnataatataataatattaataaaaactntattattaatagttattttattatttcttacctgctaagaaaattatattttagggtattcggccgactacaagtaccctaaaatactttggtattcctaaaatcaatttatcataataattccatcaataattctaaactaaaaccattgtgacatttttggcctccaatcgggtctccagagtcgtcgaacatgaaaataattttatttcacaaataactcatattatatctatgtatttcaattaaatctccgtaattaataaattacgcttatatatctccttatcgagtcttcagggtccccaaacctgaaaatatttttgttccacatatagctcatattacattcacacatgctatataaatcttcgtaattaacaaattacgcttatttgctcacttatagcaaaatttaaattttatgctgaaataaatttgtaggatcataatcccacttattacatgattaacccatattataaatataaaccttaattatttaccattaggcttatcgggatattacagtttctctcttttttctttggcatatcgctcttggaactttttggaatctccaccaatatgtggtcctccaataatagttaagataatgcaaagagttcgtgaaccactc

SEQ ID NO: 108854 - DNA, 611 bp, Cannabis sativa
tttttcaaatattctagttctgctatattttaaaaaatgtgtgtattatttaataaaaaacaaatctctattaatccaatcattaatatttgaattcaatgtcgtatctaattagtctaaaagtcatataaagtatgtaaacacattattaacattaatttttaatagtaatagaaaaataataaaatttgtatgtaagttcttttctttagtatcttatgctccaatacatgttcaattttcctccgttgttctactacaattttttagttattctggttcttttcattgttgatgttttctcttgcatgttctcttgttgtacccctgctcctcacatttgctgcatttgttaagttgtttctttttctagccagctccttcctctttttttttttttggtcttccaaatttcaccatttcaatgggaggtaatacgtctttcacattttttggtacatcccactcactttagtgtcccattgtgtacattgttcattcataagttgctagccaattttttgtagtgtagtattctgaacagagcttgtgtagtaatctgttgcatgtatatgttctctctttggggtctaatttccatgattctttga

SEQ ID NO: 108855 - DNA, 703 bp, Cannabis sativa
cgtgtattaaacacgtctttagtcgttgtatctggagatgtctcgacagaaactttgttccagtgatctcaatagcgagctgggaccatttttccttctgaggtcaacgatgtatgtctagtgtcgaacatggttcttatcctcaaagaattcttcgaggctcatttgaatgctatcttctagctcgccaggattgtaagcctcgctaacgctaatgggatgaagttatatgaagtcttcccataatgagacggtcacctcgcttacttgctcttgagctgatctgacttttacacttagtttgttcattgtgcgctaaggactttcacaattgatatgtgtcgctttcttttgtgcctcgctattcgcattttgcgacatatggtttctcactaatatattaaatgccaatttgtacattgatttctcgcctaagaccttacagtcaatgggttacaaatatatactctgatacttacgtaattaatgagttattccacaagagcaatatcatcaattcacattctctttatcttcacacgtgtcctttagctaaattttgggtacaacagattatttatcccatctagtagggtcggataagtaatcccatgcaagagagattttttttatcgttttttaaattttgattttattaatatatttaaatttaataagaatttaaatgaaaaaaattatcaca

SEQ ID NO: 108856 - DNA, 7100 bp, Cannabis sativa
  modified_base (219)..(222): a, c, t, g, unknown or other
  modified_base (6168)..(6175): a, c, t, g, unknown or other
tactatttcagtgattgtttatgtactaaaccatgctccctagactttcatatctatgaaatcataccactcgaactttgacatgtactaaattatggcccctgaacttttatcaatgttagtctttcttactaaaattagaaaaaagtccttaaatctaacaatctaaatagttcagggggcatttttaacgactttaaaagtttagggggcatgatnnnntacatgtcaaagtttagggggtaagaatcttaattagccatagaagaaataccacatgaggaaaagcacgatctggaccctagggacctcgattatacaaacactgcacaagctactgaagaaacaattgagataccaatcaattctctttataattccaaagttctaaaaattgtttctaaactaactttacaacagcaagaaaggttggtgacctttctcaaataaaatctagatgtcttcgcgtggaagcatttagatatgattggaattatacctgaggtcatgtgtaatctcttgaacatagatccagatgtgcgaggagtacgatagaagcactacaaaatggaactcgcgaggtaataagcacttaaacaagaagtagattgtttgcttgcatgcagcttcgtaaaagagtcgttctacctaaactggttagccaatcctatcttagtttcaaagcctaatggttcatggtgcacttgcattgattttatagatttaaataaagattgtccaaaagacaactttccctcacctagcattgaccagcttgtcgatgtaaccacatgtcattagcttctcagcttcatgaatatgtagatggggtataatcaaatctcaatgtacagcccagacaaggagcatacctccttcattacatattaaggtttgtatcgttataaagtaatgacttttgggctcataaatgcaagtgcaacatatcaaagattagttaatataatgtttgcagaattgctaggaaaaacaatggaagtaaatgttgacaatatgctccaaaaatatcaacatgtgactgaccatatcacccgtctaagctcgatgttcaaattcttgcgctaatacaagatgtggctcaacccgctaaaatgcgtctttagcgtaggaacaggaaaatttcacagcttcatggtgaactagcaaggaattgaagctaaccccagaaaaatcaaagccttagtagagatgtgatctcctactaatcccaaagaagtgcagagcctcactggcaaggtccctgccttaaatcattttgttttgcgttcctttgacaaatttagagaattctttcagattctaaaaggtaatgaaaaatttcaatggagtgacatatgtgaagaagcttttcaagctctaaaaaagcacttggggcaacccccaatactttccaagccgctgcctagagaaatacaatcaatctacctcacagtgtctaataatgtaattagttcagtgcttatttgcaaagaccagggcaggtaacaccccatatattatgtaagtaagtacttactagatgcaaaatcacataactcgcaggtggaacgtttggcattcgccttagtcatagcttcacgaaagttgtgaccttgttttcaggcccacaaaattgaggtactaactaattatcccctgcgacaagtattgcccaagtccaatacatctagataccttctttagtggtcaatcaaactaagtcaattcgatatacggtacaaactaggatcagtaattcaagcccaagcccttgctgacattaaccttaaatttccacatgaacaggtagctgccataactaaagagcgagttgatccagatgtactagaaggtgaaggttggaccttgtatgcaatggggcctcaaacaataaagggtcaggtcgaggaataatgcttatcagtactaataagttcaaagttcatgcatccttaagattcaggttcaatgcctctagtaatgaagtcgagtatgaagctttaattgcaaaattaaaacttgcacttgaaatgaaagtcaaatacttagaagcttttagtgactcatagatcatggtttgtcaggttaatcgagaatacttggctcgaggaaggcgaatagccaaatacctcacttatacttgtgagttactatctaaatttaagaaaattattgttagtataatacctcgtgcttataactcccatgtagatgttttggcccaaaagtcctcaactagagaagtagaattactcgatgtaattcttgtagacatactcgaccaacccaccatcaatcgagaagaagttatgtagatagatgttgttgaacaaaccacatggatcactccaatcatcagttatctaaaaactgacaaacttcctaaaaataagcttgaggccaaaagataacgatataaagttgcttgatgcgttatctatgatgacaaattataccacagaagttttaatcaacaactttcgaagtgcatcgatgttaatgaatgcaactatatcctcccaaagatgtatgggggtgtatgcggtaacaatactggtggaaactctttagccctaaagttcatgcaacaagtgtattatttgcaaactctgcatgtagacgcaagtagttttgtaaaaagctgcgataaatgtcagtgcactactacatatgttaatagtccgccaaacaatatgagttccatcaccagctcatggctattggtagtctatggcatagatttaattggtgaactaccaaaggatagaggagtgaagtatgcaatagtcgtcgtggactattttactaaatgggtagaggctgaggcacttgctaccatcacagcttcaaactccacgagttagtgtatcgggctatcatatgcaggtttggtataccataaaaaataattttagacaatggtaagcaggtagattgtaaggagatctggtcattattagatgacttttggatacaaaagccttttctgcagtcgcatatccctagagtaattggcagaccgatgtagtcaacaaaatcaccaagcacaccatcaaagggaggcttgaagagaaaaaaggcatttggccagaggaataatggtcatacaatactacaccgtgatgaactactagcgatatccctttctcgctctcttatgggtgcgaagccatgttcccaattgaggtaggagcaggttcccttcatcgcaatatttttaacattgaggacaatgagcaaggacaacttctccattcagatttattggaaggatggcgcaaccaagatcaggtaaaaaatgcagcctatcaatagcatacaacgcgctactttaattcaaaggttaaagaaagaagcctacaagtaggagatttagtatgacacaaagtcatgcctaataccgcaattcgactcaaagagtttttggcgataactgggagggaccctacctcatcactaaaaaaattaggaatgcaacataccgactctctgatcgcatgtgcatactttgtcaatttcagttttcaattatctaagtatgggggatacatgtattattattatcattaataaattgtactactaattgctcatgattattgcataaattttaaatgtagaggcaacatttcatttatttacttagaaattctatttaaattatgaactctgagatgttcataaatcgcatcgtaaattgcaactataattagttgtaccaagctgcaataataaatcgcataaataaagatcacacaaggctacaataataattgtgaaaaatgctcagttataaatgcagcaagttgcatttataatagcatgaaaagcatcaaccgaatataaaatacttagaaaatattttagataattatccccaaaggatatattgttcaaatattgcaaaaaaatgcaaaaggtgcaaagtacaatagtctcaaaactgattataaaatgcgagtacccatctactgctataaaaaatattctaaggagaaggggcattaacgttctctctgaccttctcgatggcatcaacaactttagctgctgcagggccatcttcaggaaaatgattgttggccaggacttaagtctcatttggagacatggtgcgaaaattgtaagccatcttgatcccttctggaccaaaaatggtgaaataaaactcaagcagtatggttagggtggtgtagatgtaatctctgatagtcaggtcttaagccttctacttctcctctctttcaatgttcaagtgacgaaataaagtgacgatttgttcctccaactttttgaccatctcacctgcttgacttttggcattgccgagatcctcgatttcattatccttactagctagatcaagcttagcatttttttagaccttcttgaaggggagagttttgtttcttcaaaatcttaagttctttgagagcctgtttattcgtagtaatagcccaagaatatatagtcatcccctagatcatgaatttagaggaacgggaacaaatgtcttcgacaggtggtataaagtcatcacttacgtagttcttgcaaagtaatcaggtcgcgagccttagtcaccggctccatcatttgtttcttccccttctattgtgaaactttctaatgtctcttagataagtcaatgaccgaaggattgacagaatcatttttcctcttctggggaggattcacagaagaaggactcacgagctctttgttagtcttcgacttgcaattaaggaccggagcactcttcagaaaagtcatgtctacaaaagaacaaaatatatgcactaactataagttatcgtatgaatttgcagaatattattagctaaaataaaaagcatcatacctgcgattttctttaggtctgtttgaaaagatgtttttcaatcttaatattctacttctcagaaggctctttgtaaacttgctatcgttgaagtctagtgtaggctcaaatcaatttttattctcacagtttagcagaagtacaaagaagatgctaatcttgatctctggctggaagactgctcagaagctctataatttccacacgatcttgagttaacttagaacaagctggtctacctacgagtgtaaatgaatgttagtgttcataaaataaaatgaataaaaaaagccactaagtataaaagtatgcattgcacgaggatagcgattaaagtctattctaactccagggagtgtgaacgcataaaaccatttcgacttccaatctcccatattggaaaccgtgccttctactccattgacttcagaattggcccatttactaaagaagtaaaaatcattgtcatgaacaatgttctttatgtcgtagagtagcaaaaatcctcgatcgtaggttccccttgcgtatattctatatacatcgcatagaatccaaggacaatcctataactattaggagtaatctagaaaggagaaacatcatatcatgaagagaattgcgagtccacattgaataatgggaatcgagagcatcgtgacttgattcagaataattcataggattggcaaaaggaagatgaggacactggattgatattgtttttgtacaacaagtaataactaattttaatatttggaaccttgtcaaaccagactttctaacccatgagactaagtccttgcaggaaaatggctaatcaaaaggagcattttctatggagtttgcgtcatcttcctcatcgtgtccttcatctctgcaggtgggcaattgaaattcttcccccatttctttaacctctacatctagagcagcccatggatgaatgaagctcccttgagcagatatagtggactcgcttcctcgtatctttatagcaattggtgccttcaactcttggaccatgcgacttatctcaccggtaaaccacgagtcttgtcaatctacccttgctggaactttgtcctccgataaagacgtggggataaagctattactgtaaagaccgcttagctttagtttgggaattagcagataattagggcttaataataaaaattatttatttatgattatttatatgaattccgaatgcattttatgtgtctttaatagaaatttcataattttgcatgttttgtgttcggcaatattggaacgcggtgtatggctattagaatcacatnnnnnnnnttttagtatagcgggacaatatagttagacattggaaatgtggagaatagtcaggattttaggatttcccaaaatacccctaagtgcccttttatgttgttttagtgtggggagggcaaaatggtcatttttcccatttatgttttgtcttatatggtttttaatttaagcttatattcagatttttataattatccttagctgattttatttcaaataaaatcatttattttattcattttacaaaaataagaaaaaaaaggcaaaattttcacaactttctctccttcaactctctctctctctccaaaattcctagagcagctagggttgatattttcttcagcatttcaagtagaattcaggaagttctaagtgatttcaagctctaggtaagttcccaacactttgcctttttgtttcttgaattttaagttagagatttttgtatgaatttgagatagttgttgttgttgttgctgtagttgtttgatgttattttctgaggttaaaatatgtttagaaatgttgttttgagcatgaattaagggctgttagtaagtttaaccaagctttaagttttagaactcaaacttggagctttaatggtgattttggagtttgagcttgggtaactgttttgttgcttggaaatggtttattggggtaaaatatgcaggtctggaaggtttgagttggtttggaatcgatttggttgagctttgaaattttttgggtttcctacagaaaattggctaaccagttttacaagtacctttaaaatcgggtaaccggctttgcaatagggttccccaaaaatttcacctcgtcgattcgtcctagtttcaggtttctggttggttgattccctgctagtttagggtatttccatattaagttgttgtagataggtttttggtttaaa

SEQ ID NO: 108857 - DNA, 516 bp, Cannabis sativa
agtagcctgtcgagatgcttgataatcccctaaatatgaaatggcagatacaaggagcacttcatttggcttaggcttggttccatgatattctttatttctttctgtccatatactccatagaatacaagcaaattgttccaattcttgttgaggccatgtttccgaagctttaaagaaaaggtccttgaaatttgaggattcatgtattattctatccaacgaaaaggaggatcctctccaaactttcttagctcttttacaaaggaaaagagcatggaaaatggattcattgttgccacggcatagggaacaaatagctgagcctgcaatatggcatttctgcagaatggcagccactggaaggcattcctgaacagctttccataaaaatattctgaccttagaaggtatattcagcttccaaaattgtttccataaatgagtcgaatgagatgaaacagagggagcttcttggtctgcaaacttggaagccaatatataacctgacttgac

SEQ ID NO: 108858 - DNA, 717 bp, Cannabis sativa
  modified_base (158)..(159): a, c, t, g, unknown or other
aatttattaattatttaattcatcatataaggtgattttaatataatattttaaattaaaaaggtaaagatatctttaatttaaaatatatataatatacaaatatctaaccttaaaaaataaataatatataaatattaaagaaattaacaaatttnnaaatctgaccataatttaaaaaattaaaataatcaatttttaattttaaacctcaaaatatcaataaataataataatctattaaaaaataaatattattaatttagaatattgatatttaggtttaaataataaaaataatattttaattagatattagggtttgaaaattgaaaaatctaaaatttggaaaaaaatcccacaatttttgcactttgtgcgtgtgctgcccaggaggctgcacctgacgcccacgagaggctgctagcaggcctcagcgcgcgtggaacacaggggcatcggcgagaatcctcggtgccagtagggttccacacgggcggatgcaggcttcatgtgcctgagcgagggacgtgcgagcgctttagacaggaatttgtctgaagatgtgcgcgcatgtagggtgccttgtccgagcgcctggtgcacctgatgtacctactcaacagccatgacatccaatctttcaaaattcataacttcctcaatttttataagtttcgagttccgtaaaaaataaaattgcttaatttttcacaa

SEQ ID NO: 108859 - DNA, 755 bp, Cannabis sativa
ggaaaatttttgggctttatcctctgccctagctgaaccccctctccctcttttcttcatatttttattttgctaagtgttggaaaattcatcttgaaagcttggattcttggtaggttttgtgctcagctttgtttggagattgaggtagttcttaaccccttttatttgttgatttttcttgctgaaatttattgttcaaaatcatgaaaatagtgtatgatgtttttggtttgcttgtttggagatttgttctgtaatggattatgttggttgggttctagatgagcttttagggtaattttcatgtttgaattcaggtcttgtttcatgtgttgttgctggaacaaaattaagtttgaagcttgcttgaagttcaagttcttgattaggaccttatgatgaattttgctctacgttaggagctttgatttcatgttgttgaatctaaatttctatgcatgtggattgaaattttaagcttaataatttgtggtttaacttccttttgtggttgtttaattatataagaggttatgttagatttaagcatgttttggttgaaatggatgagtttagggggctgaaattctctgttaaatactgatttttatgttgctggttttttgtgttgttggagagtgaattaggtgtaattcctctttaattacttgatttatgttaggtgaaagtttggtatgattgtggattgatatagcatgaaaattggcatttttggatgcattttcatggct

SEQ ID NO: 108860 - DNA, 829 bp, Cannabis sativa
acatagccaacggttttaggaaccgttgggaaatcatataaaagacagttataaaccgttgggaatagccctttttgtagtagtgtttgcttaataattatcttattttttaaaattgattattttaccttatttttaaatttaaggttagatatttaatattttaaattatttaatttttttttataaaatgaccttatgtaaaatttaaaataagattattttaatcatgaaattttaaattgaaataagacattttgctaacttttaaatttttttattttatttaaaaattaaattataaaatcataaaaaaaatgatgtttatttataattttattttattgaatatttaattttttttttgaaatatatatttgggttagttaaacctaatttttcaaatttataggtttaaattttaaattaattttttttaattttttttcaaaaaataaataactaaataattaatttatttattttcgaaattaaaaaattaattaatttatcaaaatttaaataaatcctatatccaactatccaacttgttacatgtttgtgtgttatattgtttgattatgaaaacaagttttataaaacttattattgtttgatctaaattgccatggttaacttgttgacaggttcaatgatctgattttaacccatggttcaattatcaataggtcaaacaaataatttgtaacatgcaaattttgtattcttctttcatatgtgtataaaactagtaacatgataggatccatcgaaatcagtgtgctttgggcttagatgcatataggtagcccatttaattttgtaatta

SEQ ID NO: 108861 - DNA, 707 bp, Cannabis sativa
ctagtgatgcatctgacaaatcggtccttatttctgctgatgaattcgccaagttctcaaggtatcaggaaacacttaagtcttcatctccttctgtcattgcgattgccgatttaggtaactttaatgcatgtcttctttccaaatcctcaaaatgggtcattgattctggtgccacagatcatatgacaggtaattccagtctattttcaacttttcagtctcatagtcccacttctattgttaccttagctgatgggtcaccattttctgtttttggatctggcactgttattcctacacctctgctcactttctcatcagtcttacatttatctaatttatattttaatttgctttttgttagtcaactcactcactcttaatctaaattgttgcatctcattctttcctgatcattgtgtgtttcgggatcttatgacgaagaagattattggcaaagggcatgaatctggtggcttgcatgttcttgactcacttccaccaacctctattgcttgttcgagtgttgtttccgcttttgaggctcattgccgtttgggtcattcatctcttcctttgctcaagaaactttgtccccaatatagtacgttaccttcattagattgtgagtcatgtcagtttgccaaacatcatcgtgttagtttgagtcctcgagtcaataaacgtgctagtgttccttttga

SEQ ID NO: 108862 - DNA, 941 bp, Cannabis sativa
aaactcggcactatataagtccattaactaacacatatcctataatggtcatgtgtatatatatgtttgaattaatcacgacaccactaataaactatatagataaacacaatattctcttttatattattaggaaatacactcatcaaattttttaatttaaggatctaataatttaaaatgaataatgatacatttcatttacttaaaatacattttcacaaagagcaagtcttcaagggaacatcttcaatgggcaacttatcttgaggatatgggcaatcaatattcttggagttatgaggcaacaaatcccaagtctcaactttgaatgaagttttgaaatctgggaacaatgtcatggttgtgttggagatgcaaataccagtgaaggtgtttccggggagcacttcgtactcggccgggaccgtaacgttttcggccaccatatcacggcagttgatgttggaaacatccgacaagagagtggggtcataaccctctgcatgtgtcttgtaaaattcattcactcggaacacatattgcatggttttaaggataaatcttcgtgtgaagatgtccttgatgtagccaccacgacccggtgccgttttgatcctcagtgcagcttgagtgtcgatggcagtgacatcttcagctctaacgtctttgattccacctgacatttcactgcccaaagctatggttgcactatctggagaaatgcatgtcagccgtcggattatgatgtgttcgcttggcattgccatcttaattccgtgttgatcaaaaccactctttatagctatgcaatcatcacccgacacaataaagcaatcctcaattcgagtgttggtacatgagtcttcatcggcaacatatgaaatgttgttaatattttgaatattatgtgggaaataataatttaagatatttgtgtt

SEQ ID NO: 108863 - DNA, 573 bp, Cannabis sativa
attgatcacatgttaaacataatttcttgccacactactagacttattgaccatgtcgatttaatactttgatatttgtgattatgaatgttttttgttaatttaaaaatattatgattgtcatagttcaatatcaaaagttaaattagactagtatattgagatgctatcaaagaactatctttttaaaagtggccagatttttttattttttttttgtttcacccatgagccatttttaaacaaaactatttttatatataaaatatatgtattaaaattaatgtagttcaagtggaagaatgttagactttttatttagggttacactaataacaatatatagatattataacataactaatatatagaatatgtttaaaattaaattaatcgatttcctatcattctctgcggggaatgatactcatttgaatatgttaagttttttatttgtacacataacactaattcaataaatatgaatagatcactaaattaatttattctctctctctataaatatatttttaagaatattctatattttgatattttgatgcaattttctta

SEQ ID NO: 108864 - DNA, 716 bp, Cannabis sativa
gatccatcaagattttcaagctttaaaagcaaggaaagtggctttgtcacttttagagactgttcaaaagggaaaatcttaggaattggtgatgtcggtaacgtataccctccatgtataaaaaatgagcttcttgttgataatcttaaacatgaattgcttagtattagtcaattatgtgatacaggttttcgtgttatgtttgaatcctcaaactgctccattgaaaatgtttcaaccaatgaagttattttccttggagtaaggaaggataatgtgtatgttattgatgttgattcatttgatagtaaaaataaatgtttaaccgttagtattagtcaattatgtcctaatctttgttattgcatagaaaattaggacatgctagtatggattctatctcaaaattagttagaaaagatcttgttactggtttccatctattcctttgtcaaagataaactttgttatgcaagcccatttggaaaacaaattaaaacatcttttcattctaagaaagagatttcaactactacacctttgcaattgcttcatattgatttatttggaccttctacaatttctagtcttggttgtaaatactttgcatttgtaatttttgatgacttttcaagatttacttggtttattttcttgacacttaaaagtgatgttttggaaaatcttgtcaaattttgtaagagtgtgcaaaatga

SEQ ID NO: 108865 - DNA, 753 bp, Cannabis sativa
  modified_base (363)..(370): a, c, t, g, unknown or other
  modified_base (500)..(531): a, c, t, g, unknown or other
gataaatagttgaaaaatggaaaaattgtaagtggtgggcccacatcctatggccagccacttaagcttctttttacaatttatttatcaattttttaatatcaaataattcaaacataaaccttgaaggattccgataaatagatagcgatagactcaaaactgacagttgatgcaacttaagccttcagttaaatttgagccttctctcttctctctctattttgaatccttcctctctctttttcttcaattttcatcccttatagtgatagagtacatgcccacacatagcaagtaagtactcaatcatagtgtgtaagactatgaagaatccaacacctgaaggagaatcgggctcannnnnnnntaatactctgtgacagaaaggaacaacggttagagatctgagtggaaggagtcattcaattctgctgaaaccaatgtaaggtttcttgaactttatatgtgtttgaattccattgttttagaaattcatnnnnnnnnnnnnnnnnnnnnnnnnnnnnnnnnaatctagatcttggtaaaataatccccaatagtgggcccacatcctatggacggccacttaagcttctttttaccatttattatcaattttttaatgttaaattattcgaacctaaacttagaaggattccgataaatagatagtgatagactcaaaactaacaattgatgcaacttacgcctttagtgaaatttgagcgttctctcttctctctctatttc

SEQ ID NO: 108866 - DNA, 976 bp, Cannabis sativa
gcatcccttaaagttgtatttttagctcctggagttctgttagagccattcgataagatgcctttgaaataggctctgctctatgtgccaaatcgatgatgaaatcaattttttgttacggtggtaatcatggtaactcctcgggaaatacatccaagaacctttttaccaccctaacatgcttaggcccaaatgttttgggtctgctggagttaatcacaacagctgaaaattctacacatccattgtgtagtaaatccttagcctttaatactaaaatgattggaattgagaaccttgaacagacccaacaaatataaatgattccttgccctccggtcgttgccatagaaagactagcgacaacatctgcctaagcgatggcaaacacccaagctagagtgggtttcgcctcttgttccaattaatctttcttaaattaagggcaatccttcttaaagtgaaccaccattccacactggaaacatgtcttccaattacattcccctagatcatgtttcttacaacgaggacactcagaattagaatagttctaacatccgtctctaccttgattcccatagaatctcttattttctatctgccgtgtatttttagttactactgcatatagtcattttgtaaaaattttgtaacaggaatcctccgaataaaattttagtgttgttatgttgtttattattaggattttatttttcgtgaagtttttaatattagcaaagattttaataattaattaacctattattactaaattagtttataaaactacacacgtggtgtccccatagattagggtgttataacttggtatcagagcaactatggttctaaaaattctgaagactattcgaatatgtagattgttgcgaagataggttgactcatggtatggtaattgtttgtattaattactattggaatacctgcttagattattataaagcatgttgga

SEQ ID NO: 108867 - DNA, 586 bp, Cannabis sativa
ttctaaatctatagtggtgtaaggagaaattaataacttagaaaacttgcttggtaaattctatatctacttattggaagctaagttatatataggcccatggtcccgtactaatggagacaatacttcttgtaagactcaattaattaattttaattaatcaaatataattctaaaattagactatgtcttatttaagaattttcactaaacaatgacttaattataaagaaaagaggttttatgatttatttattaattaagagacattattaagtcttattaataaataaattagaagaaattttatttgataattaattttaattattaaataaatacgtttgacatttaaatggttaaatttgaaaatatggtatttgtgaaataaaaggataaatagttgagtaaaatgacaaagctgtaattggtgggcccacatcctaattgtcggccacttaagctaaatttagccatttatttatcaatttttaatgccatataattcaaacctaaacctagaaggagtcctataaatagatagtgatagactcaaattgatagatgatgcaaattagcctttcag

SEQ ID NO: 108868 - DNA, 523 bp, Cannabis sativa
cgggcatggtcttgaaacataaagaccgcacaattcactctctttgttcccgtcacctccatattatcgaggatataggtaacagtgctcatccactgatcgaccttattaatatcaataactcctagaaaagtcggaggttgaagcttcacaaaccgctcgaacacagagtcccggtgcggcatacccttggttacccaccaatggcacaggagcaagttgcctaaaacattgcaactcttcctcttgacaaagtatgacacttcgcatttcatgaaacatatgctgctagtcggtaggaggattagcattaacagcccccgcattatctcccggattcttcgaaggtggaggcagtgctggtggatcggttcgggtagccccgggctctacttgctcgccctgtggtctggataattgcagagggtgttggaaattatttcactaggatcttagatctactcacaagtatgttgttcaacaccctaaatatgaactgtctaaaacgataaattaaacacat

SEQ ID NO: 108869 - DNA, 4512 bp, Cannabis sativa
attctgtgttgcccctttgaagggtggaacaagagataatgtgagattttaatttaggtaaatgtaatgcttgaaatggtatcttggattaaaaacaaggttctagtttgatctgctcaaacaaatctctagaaatgcaaattacagtttctgctcttatgatccccaacaaaaggcttcttcttcatttacttatagttgtggttctattaagggctttgaggtaaaacaattagtgaagaagaaaaaaactcatcattacggttccttcaatgagaaattgtgtgtttgtttataatttgattggcatttaaacaatggtttcatgaatcatacaatgagctctggttacaagtatgaaaattgaacttatgcgcatctcatgtgtattgcttattcttcgtttgattgcttgaaatagatattaagtcaccaattcaatatatagacattgtaagttgagaataatagtaatagttatgagattaattattcattgccttttgattatattttgcaggcatgtatcaaagtttttacagaagatagtgagccaaatttcatgtagacgccaagaagcgcacatgtgtctcgatcttcggcctcaaaatgacgattatggcaaggactatctcaacctcttgctaactgcaatgtcagatgatgttcttgttataggcctacacggaacaaataatttaggaaagacaaacattgcgaaagcggcgtataataaaaattttcttagctttcagggtagctgttacttggcaaatgtgagtgcagtttctaaaaaaccaaatggacttgtacatttacaagaacgattactttctgatatcttaattgagaatgatgatgatattcaactagatgatgtcagcgaaggaattaggatgattcaaactgaattacgacaaagaagagttcttgtagttctcgaagatgtggatacgctgcagcaattaaatgctttagccaggaagcgggattggtttggtccaggaagtagagttatcattacagcaagagatgcaaagttgttgagcattcttgaagcagatgatgtatatgggccacaaggcattcaggtgaactttgtttgtgtgtttttgatgaaaacaagaaatttccctatgttttacaacaatgtatttctgattatgcaggttataagagacaaatatgaaaataatcttgaaacaattaaggaacttgaggaacttattcaaaagataacttttcaggtatacaacaaaaatttggtctcatctaaacagttggaattcttgttagctattaccagttaaaacatagtacaaaacagaataaacagtttcctttttccaaatcaggatccaaccttttttaccttttaatccaggctaaaagaaaagagagattccttttggctgaaatagaaaaagagaggaggaagaatgcatgtcaggtatgatttaaatctccattatcaaaaagaaaaaaaaaagtttggattttacatactcaggatcaattcagattaataaaatactaaaactcacttgttctgcttcttagcctcaaattctagacgacttacagcacagccgaaatgagcttcttccttcatccacactcaccacaacaagggatgtagttctgaatggaactgaaagttatgattgtgatgtcggtactaattatgggatgtggatggatactgagcttcaaaaagaaattgcaaaatgggattgctagagttttgtgtatgttgatgattgatgagataggaaaatagtttttgtcaaaaatggaggatttgcaagaaacaaaagatgagacaaggcaggaaataacagccttctccttattgccaagatataactaaagcaattaacattgtatcctctacctatgaagtcagagagtgaagattcaggaaattaggaggcttgtctcacttcatgttcttatactaggagtgaataataaaaaaaaacctcagtatcttcacataattaatgatctataacttttcctctttaaaaaaaattgttcaaaaaataacttgtatacagctattaatggtctgtaaacaactattaatttctaaatgcacaacttgatctactttaagcagaaacaacaaagaacatggctaaacgtgccattagactcttttggagtgtttcttgaattgtcaactgacattacttcttccacttcttcatgatccactgcgacggcattagtatcgacatcgttgtgtgaaacctgtcctatgtctgggtttgaatctgtgatggtttcgtttaaacctgtcgatgtgtagtattggaaaattaaactcctgctcttcagctaaatcttcatgtgcaatattcatacttttactatttttcatggacttcaataactagccagactttctcttacctttattctctgagtcacttgatagagatctcaacaaggattttggtgaagactctacaaaggaagaactcattgcaacctgaaaaaccaaattaaggtagcaaaataagttataatataatatctgcactatatattggaattgaagacctataataaagtactgataacgttaaaactatttcaagtgaaaaacctctatagccaaccatgtcatttccaatatttatccatatcaatatactgcaagaattatattgaagtttaagtgaagtttagaaatagttacacttgatggggttccaacttcctccaacttcgtgcatgaattgaaggcttgtctatcttcctggccatactgcaactcatatatgtacacattattattttatgttgaatgtaaaattctagttggtactagttcaaagcatgagaaacaacacctgaatagttccatttcgacgctctctggtcctacattcttcaagatacttcaccttcttataagtctacattcaagattaaaaagctcttattacaatgagatcaatccagttgcaaattacacaagcttgttttattctgttgctgaccaagtaagggagcctctttatatactcttttagtccaggaatcttcggacaactttgttggaacggctcgcagatttcctaaccgaaaaaggaaatgatttaggttaaagaggcagcatgaaaaaatatttcactatccaaaaccaatggtgattacttgtatatcaaatggtagaggaaggccttgggccaaaaacagctgatccacttcaaagatacaaagcagaggcaaatcagtagatgttatgatgattttgcttcccaaaccaaaccattttcttcttccaactaaagcaagcaattgggataagtcatccacatcatcgagaacaattagaaccttcttttgacatattctttctcttatcgcagtcacaccttgtgtttcactggctaagctaattttctctccaagtatatcaaaaagaagcttctcttgtaactgaaccataccatttggctcttttgatttctttccaacacctataagaaagctaccaccatcaaaagcctcaacaagtccatcataaatggctttcgccatcatcatcttccccattttagcctctccaacaatccccaccatcacaacatcatctgatcctaagatgcttacatattcatggaaaacatcgtgtcgaagcggatagattgaaacattcagattcaacggaattctcatttgtaaaacatcatctataatcattttgacaagtttagattcaggcctaaaatttgtcaacataacagaatgttaacaaacacaaattgaaatgataatcaatacaagaagaaaaccaaatgataatcaacacatgctgagatgacgttaccttatgccacatgaatcccatccagatagactggtgatcacttttaaagctgcactccatgcctgcaccttattatccatcctacctttgaatctgtttttgagttgagaaaatgcagtgtcataactttcagacgacgatgatggtgttttgagaaaaattggtacaacaatctgtctatttatttccctgcattggagtgtatgtacaagttcattcaaacaccatttggaagatacataattttgtgataaaacaataattgccatctttgatgattgaatcactctcatgagttgagatccaatttcgtcactactacttctttcatgtgattccttatcaaagtaggatttgatgtgttcacggcataaaccagcatgaagatctcctgtaatggtatcatttccgcctccaaaactaagaaagacatcgtttgtttcgatcaaattagagggattagaacaggaagtggaagaggaactgaaagtgggattattcaccatattcatttcctgcataaatgattgatgagaacaacaatgtataagaatttacaacaacatcaacaatagcagcagcaacaacaaaaatcaacatgtatcattcatacacacattgcacgtacccctttcctcaacggcgcgcatccacagattgcaaatcaa

SEQ ID NO: 108870 - DNA, 851 bp, Cannabis sativa
cgttttctttggaggcaccgtccacgaaaactttccacgctggggttcgtggtgttggtatgttcgtgctagcttctacttcattgcactgtgttatgaagtccgctagcgcttgtcgttttatggaagtgtgtggtatgtagtgtatgtcgaactagcttaactccatagcccacttgaggagtcttctggacgcctctggcttctgcaaaacttgccggagcagatggtttgttagtactttgatggggtgagcgtgaaagtaggttcttaactttcttgaagccatcaggaggcaaaaaactagtttttcaatcactggatatcgtgtctccgcccctatcatgtgcttgctgacatagtacacggggttttgagttttttcctcttcccggactagggctgtgctgactgcattctcggagacggctaagtacagtaacaagtcctttccaagaacgggttttgataggattggaggtttagccatgtgttcttttaatcttttgaacgcttcttggcattcttcggtccattcaaatttttaacatttcttcagaatgttgaagaagggaaagcacttgtttgtggatcgggaaataaaccggttcagggcggcaacctttccggttaggctttgtacgtctttgtgcttcttgggagaaggcatgttcaggagggcttgaattttctccgggtttgcctctatccctcgctggctgacaataaatcccagaaattttcccgattttaccccaaaagtgcacttcttcgagttaagtttccttccatatcttcgaaccacttcaaagcattcctcgaggtcatctacatgacttgcacatgccttc

SEQ ID NO: 108871 - DNA, 654 bp, Cannabis sativa
ccattctttgttagcttttaaaaaaattctatttagtattgcccacggttctccactgttggcattggtttttcccaatggtttctttgtttcgtttctaaacttttggaaaaaacctccacttactttttccaacgatttttatatttgaccctcttattaaccgttggaaaaagtcaattttgtagtagtgaaaattaaagatttttacctattttcaagcttcaaatttctctaatatcttaaattaatttaaaaaatactaattaatttaattttgataattagatttgaaatatgaaaataaaaatctaaatacaaaattatacaaaaaattcgaaattaattccatgaaaaatcatgaaaaaatgaagaaaattgaaagaattggatttgatgcggatggtatgcagtgtataccattcgcgtgcgcaggaatgggtgcatggtcgagaaacctcagccaaagaggatgccagcagcctcatctgcgcgcggaggtccaccattcagaaaaaaatggggcttcagaccgagaaaactcggacaaccccaagtccaagacgcgcgtgaccaagtgatcactcggatccgcgcgcgtatggggtgacaccacccctatcttttttcaaaacttcaaaaaatcataactca

SEQ ID NO: 108872 - DNA, 778 bp, Cannabis sativa
atgtgggaaaaaattgagataacacatattctattgtagcgctcacctcaatagtgattgcttagaattgggtttacaagtatgaaacaatggtagaatctcataaaataagattaccttgcatcctgcccaatacaggacaactttatattcttattttgatgaaataaaaggttactaaaatggtgtcaattttagaagagctcaatacctatttaactggtgatatctttgcatcccgcccaatacgtgacattgtatatcatttggttaaaaaccttggaaaacttgagatatgtttgtttttttagtattttctcatatcttccatattttgttatgtacttacagttttccaaatatatgtgattagaatttatattgaacatagcattactttttgttattgattatgtagtatcaattttgaatcttcattgttggtctaacttaattttttatttttaatggaatcatccccaatagattgtcatccgttaaacaacataatagtgtataagataagtattttgtaaatgcaaaatttaattgactcattcccaatagatgacaacttagactagggtttacaataacaaaacaatgaagaactttaaatcgaaattattctttagatttcctctatagattttttatttagaaatttctataatcatacatcattggataatattgatgattataatcatttgtttatgatgtttttctattttcttccaagaaaatgagtaacgcggatgaacatattcaagatatt

SEQ ID NO: 108873 - DNA, 657 bp, Cannabis sativa
  modified_base (58)..(74): a, c, t, g, unknown or other
ctctaatgattacttaatcttaagcaagtattgtacattaatgttaatactagattgnnnnnnnnnnnnnnnnntctagaaggaacttatagtttcagactaagataatatgtcacaacatgatgtcactgagtaccaatagtaagaggctaagtgtacactagtgtacgaacttaaccaaactcctactgttgagtgggagtcatctaagatgtaatcaaacaaggaacattaggagacagtcgaggaagaatctctgaaagtgacctatatgttagatgataggggtgtacattagaatccttatatctacaccaactcataaccgattcgagatggtggttactctcggggtggaggaattattctagaaggatgtaaaaacctatctataataatttaagctccatcagtgaagctacacaactttgttgcttttgtaaagcattgtaaaagttgttcaactaaagaaagttcttaattgtgttatctctattttattttggatagaattagagatatgtcttctgtatatgcagatgcacttaataagcggtaaagaattcagtatccctagatgagtaatgtgttggaatttatttttaccaggatcctagatctactcacaagtatgttatttttgttggaattatttta

SEQ ID NO: 108874 - DNA, 737 bp, Cannabis sativa
aaaaataaatagttgaatataataattaatatgtcagatacgtacttacttatttactatagagtaatttgcggcgaaaatacctaagttttgtatattgtagcagttaaatacctaagtttttttttgcggtaaaaataccttctattacatttttggtgcagccgtaggtaccttggcgttaactgccacatagattgccaattgtgaacatcttattagcccaactcattaaaactaatccacatcattaacattaagccacgtcactcaataatattaaaattatataaactaattaaatttaaatttaaatgaaatttgtataaaataataattataaaaaaaaatattgaaccctaaagacattcattctcccgtactctctcttgtttgctttcttctctacgcctcctctgtgtccaggccgacgaagctcactccggccgccaatggtccaaacggaccacgaaatcctaatccccatgcccataaacctgcaagcccagtctcctccatccctctcatccccttctgatttctctcttgccggcattaatgaagatctgcgactgagagtaagttcgacgacggtctcctcccctcgattcctccctctcgatttctctatttcttgcatgaatgaagatctgcgactaggcaagcttcaacggagatctgtgggtgacgaagacaaagacgaagacgaagaagaagatgatgaagtgggtgatgac

SEQ ID NO: 108875 - DNA, 692 bp, Cannabis sativa
ttttatttgataaaactatattatttgataaaactatattaatgataaaactatattaattatttaaacataatattattcttaaataatattaaatagagaaatatattattgtgatatttgaattaaaatagtatttaattgtttttcttgcgatattaattgtgcgagaataattatctcatttatttgtgttgttagtgagttaagattattgcttagagtaattgtaccaatttttttaaagagagttaaagttgtattaactacgaaaataaaatattatagtatttttacaaggtaggcaatcgtttaattaaagcctgatatgaaggtcaattaggattttataatatatttagtaggtttaattaattgtataagtgatatcaaataacattattatagaattaatgttaaaaaattcgtaggtttggataaattcgtaggactaaaaactgttttactaaaacgatcatatctagagttctagagtttggattgagctgatttcagtgacgttggaaagatagttcaaaaatatagaaattttgtagagttatatcataatttggaagtttcttaggtcaaaactaagcctaaaattacgatgtagagggcttacttttaaaatttaaaaaattagatatttgttgatttaataatatttaagcattttattattattatta

SEQ ID NO: 108876 - DNA, 622 bp, Cannabis sativa
atcgtaactactaagaatcacttaactaacatcacacaatccataagatcattataaaataaaaagttttaccaaatctttggggatgaaagatacggaggcgattttgacagatagattagcagcattgagaacgatgaatctggtttcagagagaacagtgaggtcgacggagacggagccggtgaatttgcaggagttgagattgggtttgagatggatacggtatcgttttgggaggatgaatttgggtaagcgaggctggcctttgaattgctccattttttctttttagtgagtgtgtttgggaagtgggaaaatgaaggaaaatgagtttgttatttagcgggaaaatgagaggggtatttatagtgtggaaatggaaaggcttcacaataacgccgtttgtattcttgaattctttttatttattttttaaagataatcctcccaaacggctactacaataacgacgtgtcattcttgctctttctagtgagcattttttttttttgagcaaggtgtctaacactatcgtcgctctataattgattagcaatattctataaatagtaaatattgcgcgcttcgcgacagttatataaaatattttaaattaaat

SEQ ID NO: 108877 - DNA, 617 bp, Cannabis sativa
  modified_base (26)..(49): a, c, t, g, unknown or other
cttgatttttttataacaaattagannnnnnnnnnnnnnnnnnnnnnnntaaatagaggttctactgtactaagtttttaataatacttagagcattttcatcagcttctttattctatcatttaaaatatattttcaaaatctcatcgttattcgtttctattttacttcaaacttttatattatatcatatattaatttttttaaaaaaatatgttactgtaatctatttttttttttaattttaaatattttattcattttaaacatataatattaatatttatacatatcttcatatattaaaagtaaaactaaaattcaaatgattaataaaatatatttacaataataaatagtagagtatgaatagtaaatttaaaaaaaactataaaataaaaaataaataaataaaaaaaaaaagtttaaaacttctaatgtaatgtgttttaaatttagttctttaaatattttaaagcatttgatgtgaatatttaaaatcaaatttgatcaatttaactaaactattcatcgttatatatgattaaatttaaatttagtagacaaattttatggatcaaatttgagttcggaatactaaatatgcacaacatcaa

SEQ ID NO: 108878 - DNA, 539 bp, Cannabis sativa
catactgagtcatacattcctatggttatgagcaaactaaccacgaagtgcattataatatcctcccacttccaatgaggaagtgctaatggttgcagtaaccctgctggcctctggtgttcaactttgatttgctaacatgttagacatttagacacgtaatccattacatctttcttcattccacaccaccagtaataggccaacctagctccctatacaagaaaaacatcgccaagagatactttatgctctttggcatgagctgtgttgggcacatcccaaagtaagcagcaatgtctagaaaatactggtggagcggcggcactgccccatgttcaatgtggcgcccacaccatgccaaccaatccaaagggggcctgtgcgccctacagtttctccaggaatctcacaatggacaccccatattaagccactagtaaggatcttatgaaaggcctcatcggagagagtataagtaggcgaaacccaccttgctttacgcagtttcccatccagtatctccagctcaggagatt

SEQ ID NO: 108879 - DNA, 573 bp, Cannabis sativa
gataatcaatgtatttttcaaggagttcgatccaatgataattgttataccctaactcctgtgtttacttgtcattcaaccatcaacaacaccacagatttgtggcatgccaagcttggtcaaattaattataagaatttgaaaaaattgtcaaatgcaggtattgttcgaggtctacccaagcttggtaaagatagtgttggtaagtgtgaaccatgtcaacttggtaaacaattaaaaatcactcataatcgtgtgtctgatatcaatacctcaaaagtattggaattgcttcacatggatcttataggtccaattcaagttgaaagtctaaatgataagcgatacatttttgtttgtgttgatgatttctcttgttttacttgggtagattttttaagagaaaagtttgacacttttgatgcctttaaaactctttgtttgagattgagagttggaaaaggatgtaacattgggaaaattgttcgaattcgaagtgatcatggtaaggagtttgagaagtcagtgtatgatgatttttgtaagtcgacaggtatatctcatgaattctct

SEQ ID NO: 108880 - DNA, 872 bp, Cannabis sativa
ttattatttatgtatgtgtaaaatcttaaaataaattttttaatagaaaagtaagtaattgatatcttattcacatcaaaagtaattaaatggttacttttatcaaaactcaatttttggaaacgagaattttctaatttttactattttcggtatctatgctgatatggaacaccgatatttgtgtaaataattttcttaaaggtgtttttgtaaataaaattaattttaggtataatattgaaaaattcctattaaataagttaaagaaatatgtagtcacatatttttgagctagcacttaacgggcttaatcgacacttaacaactaaaaaaatatatgactgcaacaaaatcgtaaaatgaagtatttttactgtcattttttttaattatgattatatatataataattataaatattaagagaattttgttacaaatatctcttttgttttattttattttttggacaattatcgttatttatataaatatttatgatcttatgatttgttataaatatataatttttctataaatataagttatttttaaataaataaataaatgataaacagtttaatatataataaacatactttttttttttttttttataatagtgtacatgtttattttttattttaatataactattataaatatatatttattttaataaatatttaataaaaataataaacaataacgtattgataatttacaaatttgtttgattaaaattaagaagaaaaacaaacatacaaggtataaatatattttatatctacaattaatttatattttttttaccaatatatatatatatatatattattaataatattacatgtttattaaaaaaaata

SEQ ID NO: 108881 - DNA, 2560 bp, Cannabis sativa
aataaatttccaacactatgtactataaaccgtaggactttatttaattacttaatcttgattactttccactgtgttgacaacagagttttcaagaatatcaatgtgataagaatttagatgaatttataaatcaaacaaatgatcatgaaataaatatgtgaaacaaataatacattaaataagtaatgaaataaatttgtttctttattgataaatgaatattcaagagtacattgaaatagagttttagttagggcacaaaacccaacagctacaataatgtgtatttataataaatatacacattatagatagctcatacggtctgaacaatactaaaactcacaagaaacttccctaaaaaatattcaatcagccaaaaagtttttgattttgtacctatagaatcgtgagcagtaagtgcgaatttgcttttatagaaaatgaaagttttatttcgattttctttacacaagatttgataaaatcaattagaaaatgaatattagattagaataaaatggaaaatatggatggaagaaccacaataaagaatcaatttttcttaccaattgtgtccgactttcctaatttagaaagcttgacacttaattcacatttaatgaaataattcaataaaatatgtacatggtaagttacacaacaactcagccgaaatatataaaaataaaataaaatcattttgtcaattatatatgccaaaattggtactttgattgaaaaacattttataagaagaaaatatgcatgatgtgttagaaacaaaacaaagggtataaaaagtactcccttacatgaaaacatactaacaaataaaagaagacaactttttaaatgtaaaatttcacacaccacaaacaaacaattgccccgaaaatgaggattcagaattgtaatcaaaaaataaatactactcccctttttgtctatcacgaagccaaagacaaccaaaacataaaataagaatcataatagttcaaaaaaacatagatattaagaaaaaataaatgaaccacttaagtatcaccattggattgaaagaacataatgatgttgtccattctcttgaggagtaaagcttgacttgtctccattctgtccaaacgtaagctgaattctatcatttgtataggtgtagaagtagaagttgaaacagtagtgtcatttggagcaccatgggatgcatatcgagcctttttctttaaactcttaccttgaggagatttctttggtactttaaaggttgtaaaaacaaaaagtgcttcaatggacccattttcaagaatcaattccctttggtcagacaaaatcttataaatcatgtgaggaaaaacgagattaagccttagtttcttgccttttcgaagtgacaatttgatcccaaatcatatcagccaaatcaacttttacaccagtagaaactttatataaaaagaaagcaagttcattggaaatatttatcgggttagagcatggaaaccagttggacaaggcaaacatgagacttgtgcatagagtccaagagctcaatatcattatgatcagtgagataccgaaacactttttgctgatcaaactccactttatttggttcaactccagtaagtaattaaagagcatcaaccacatctttcacggtaaaggaataccagtgtcctttagaaaatacgtccccaaacatgaaggagttctcatcaatattctctttggatatgttagcataaaattctctgacaatcaaaactgatcaaagtatccaaccattgtctttctttcaatagattaagaaccccgaatggctgatgagaaagcacattaaattttttctcaatagtaaaactcattctcttataaaattccgtacctctagcatgatcattataacaaaataatgagaatgaggcttgaagctttcaagagtcatactagaaggcctttttctctttggaggaggagcactttttggagaaaccgtgggacgtttgccttgggctttctattgaggagcaacagtgatagtttcggcagtagtaggttcatatgcttgttcctcactttcagagcctgaatcatcaacatatggctcttttgcttgatactcctcacttatatcagacccagcctctgattcttaatcaattatttaagattcttcttttggtttagatttggatgaagaacgtgatggaggatggtcttttaggttcttttaccgagatgagaaggtacaaatttcttttcttttgacaacccaagatgatggagcacctcaggtttcttcaatctagaggtcctataccttgttcaagagttcatagttggcaatggaagaatcactctttcagtattggaaacacctttgagagaaaaataagattttgacaaggtgtggtcaaatgaatgggattcatcatgaccattaaggccaagagttggggaagctattggagaagcaaccaatggaggcgagttcacataaatagttaatttccttgcctaggattttggatttctggtcgaaatagtgttgggttgt

SEQ ID NO: 108882 - DNA, 515 bp, Cannabis sativa
atggtactgaaagttctggaaaaacaaaatttgtgaaatctagtgttccagtgaatttacctgcttctgcaaatttaaatctgctgctactaaaatatcttttgcagaagcaacgtctccagtaagttcataaaggataagatctcaggtaagaatgtttgttccaatttgtcatttttgtggtattaaggggcatattcaacataaatgtttcaccatgcaaaatttgcacaaaacaaattatttcagtaatttgaaaaattttaaaaagaaacataaacaaaagtagattgaaaaagaaaaatgtctagatggtttttttgataaaagtgttgctcctcaaatgtggtattttgacagtggttgttctagacatatcataggtgacaatgattttttagtgaatattagaccaatgcaatgtggtgaggtcacatttggtaatggtgtaacaggaaatgtcattagtatgggaactctcaattttgaagggttaccaaggttgaaaaatgtta

SEQ ID NO: 108883 - DNA, 1307 bp, Cannabis sativa
aaggcattgtgatgcctcgtttagcactttcctagcttgcgagaaccgttagtattcagttttatacgtgagttataacttttgatttttctttcccgatagataggtttttaataaaaaaattatagttgtttgatcccttcttcgtcaaaatggttcgatcaagatgttataacaattcgacccctctctcgtaaaaaaggtttggtcaggaagttataacagttcaactcctctttcatcaaagaggtttagtcgagaacctttaaatttcaaacaaatttttgaaatggcgagtttgcattataccatgtatttccagatgaattctggttaatcatacataaatgtcccttaagtaattttaaagaataagactttgtaattacttaatataaatgattctctttattcataactgaagtttaaaatttacatcagaaatgcgagttacatcatttacttattagtagtaaggtcgcaaatgctccacattccagcagttctttattaatgagtctttgagtcgagccaatttataaactccaactcacactacaactttgatgacatatggaccctcccaatttgggttgaacactcctgtagatgcatctctcgtatttacaaatacttgccttagcaccaagtctccaacattgaatagtcttttcttgacttttttgttgaagtatcttataactcggtgttggtatggtgcattggtgatttgtgactcagtttgtttttcctcaagtagatccaaggacaactttagaagttccttgttttcttcttgataataaaactctcttctgtgagtcgatatgttcatctcaacaggcagcattgcttccaagccaaatgctagcgagaaaagagtgtgtcccattgttgtcttctcggtagttttgtgggcctagagtacctaaggtagctcgtcaacctatttgcctttggcagcgtctaacttcttcttgatagtatcctttaaagttttattgacggcttccacttatccattcgcctgaggcctggatacttacgagaagcttttgataattttgttcctctcgcagaattcagtgaacaagtcgccatcaaattgacttccattatcggataccatcttcatgggaattccaaacctacagacaatatttttgacgaaaaagttgaggactttcttgcagattatggaaataaggggctcaccctccgtcaatttcgtgaagaagtcaattgctactaccgcatacttagctcctcctcgcccagtgggtaatgccccaattaagtcaattccc

SEQ ID NO: 108884 - DNA, 586 bp, Cannabis sativa
tacaacagatatgatgaagcctatatgggttcagatctaaagattggtggccaaacaagtcagaaatcgaatcaaccaccagctgcctacacagcaacacctgaaacagtcgacagtgatgcatggtttgtggatagtggagcaagtaatcacgttactgctgatgagaacaatatgatgcacaagcaagattatggtggtaaggaacatctgaccattggtgatggtaataaacttcatatatctcattttggttatggtaaattacccacagatgttcaatcaacacccttaatacttgataatatgctgctggttcctaatattgcaaaaaatttgttgagtgtgtcgagtttaacttctgataatgatgtgtttgttgagtttcatcctgattattgttttgtgaaggacaacatcacaaagaaggtgctgctggaaggagtgcttagagatggtctttaccaatttcccaacaaatctgcttcagatctgagtcagtcacagttgtcttctggtttatcgagtctgtccaaatcaagtgctgttaacacagccagtgttcatctttccaagaaggatttat

SEQ ID NO: 108885 - DNA, 684 bp, Cannabis sativa
gaacagcagatgcgagttttcgcaccaactccagccgggtatcgcaaggtacttaatacaaagatgaacctcactgtggattgtattcactttgaaaccctgatatcctaaaatttttacatagaagagttactggaaaatctcgatgtttatttgatttttgcaaaattttatgttggcattttggtcaacatccttgtacttcactatcattattgctgctgatgctgttactgcaaagtagtcacatgtcttaaatctactgctttttgctgaaattattaacttttttttgcaacccaatcacatatgacttactatttttctaaaaagtaaatctatacccttattttccccactgattgttgttacttgttaggttgatgttacatgacattttacctatttatttttcttaggtgatactggctacaaatattgctgagacatctgtaactattcctggaattaagtatgttatagatccaggattggtaaaagcacggtcgtatgatccaaagcaaggattggaatctttgactgttgtaccgatttcaaaggcacaggctcttcaaaggaggtatgaatgctgaggggcaatatactttggtatttaattgtgtactacacttagtagggttcatttgacagtcgccaaataaagtataagttagtttgaaattg

SEQ ID NO: 108886 - DNA, 557 bp, Cannabis sativa
atgttcgaatctattttgcactttcttcaatctcaaaaatctgttctagctactacgactgcagttactgatggcatcactcgtgaagacttcttattagcatggaaaaattctaatttatatgatcatattacaattaagacctaagttcaaagattttgataagaattattgtttgtagttgtataagtatgaagaagaatcatcaccgttgtaattttctggtacatgtttaaatttttaaagaaattttattgattaatatttttatttattatattcaagtttacatattctttcttttcacttcactagctatgttgaatgactgtataactaaaaattagttgacatagaaaatgaaaataattatcaattggcataatttagaaattttgcatttctcgccatatactcaatttaaaaattataatcctgaattgctaaaatgaaatataatattaaaactatttttatatacaaagtgcattgattcaaatcccatttttcatataaagaattgaaaaaactttagggaaatcaccctccttaccata

SEQ ID NO: 108887 - DNA, 907 bp, Cannabis sativa
ttacggttttgtgaacaatcacaccgtaaccgcatggtcgattttttgatgttaacggttggttacggttttgtgaacaatcacaccgtaaccgcctggtcggtttttttatgttaacggtcggttacggttttgtgaacaatcacaccgtaaccgcctggtcggtttggcagcaggtaaaaaccgaccgtaaccgactgaagttcacccctatacctcaacactggtgaactccaagataattaaaatgaggctcgaaagatgagaaggaaggttgcatggtatatcatagtagagggaattatgtacagacaaggattctccatgccattgctcagatgtgttacccaagaagaagttgcacgacttttatctcaggtacatgatggattttgtggaaaccatgctgccggacagagtttatctacgaagattctaaggcaaggttatttatggccaacaatgattgaagattccaaggcctatgttaaaagatgttacaaatgccagagattttcgaagatacctcgagcaccgcccaacgagttaactcagatgcaaagtccttggcctttcgtcatttggggaattgacctgatcggacaattgcctaagggcaaaggaggcatgcagtatgtagtagtcgtagttgattacttcaccaagtggacagaagccgagccgctagcaaccattacgtccaaaaaggtgcaagactttgttgtgaagaacataatctgccggttcggattgccatacaaaatagtttcgaacaatggcaaacagtttgacagccagtcctttactgatttttgtgcgaattaaggtattatcaaaagtttctccgcagtggtgcatccccaagcaaatggtcaagttgaggcagtcaacaagacattgaaggata

SEQ ID NO: 108888 - DNA, 521 bp, Cannabis sativa
  modified_base (195)..(198): a, c, t, g, unknown or other
tattacaattaataacagaaaataacagggttcaacataaagtcatacacattaaaaaattatgatacatttaacaagtaagaaagacacgtaaaaatacaaaacaaacacatcttaaataatttctaaattttccaacaaactgatacagtgtttcgttttgagtcaaaagtcaaagatatcattcattgaatnnnntagtcaactcatctaaaatggaaatcattctaccaaccttttcttcgatcgaaaagagaatccgacgttgcttcattttagtcgagactcaaggtcattcctatttcatgagcttccaccattatttcacaccttgtaagtcctactcttagcagccactattcggatggacgttactaaggataaaatacttacaataatatgtatctttcgagattctacggccttaaattgctaatgagagtccatctattggtgatgaatctcacttaaacaagaattgtgtagaaccaacaatggagatcgaatgtccttataactaa

SEQ ID NO: 108889 - DNA, 671 bp, Cannabis sativa
gggcatgagattttggtacatgcgccaaaaagttttcagggggcaaaaatctaaattagccttagatttttattacatagtttcttatcgatgtgataagatcatatgatcatgtatttataaaatttgtacatttatgtatttctaattatacacgtttgactcattcttagaaatgaattaagttcataactattgaacttgaacctaaatttttctgattctaaagtttaatatcatatagtatatatgggtttaaaaaactatatattgatccatttgtgacatattaaaatccctataggtgtatttatattattaaatatcaaaattttaaacattctctcgatcagggggagagaaatacagttggaattgatgatgatttttgaaaaatgataattgcacaaagtatataagaatggtatagttcaaaatgatatatacatattgcaaatcaatattatttaaagttgagttagaatgaattcaaaaatacctgaagcgtaaatgaataatgtagaaattattaataaattaatattcatttgatttgttctgaagttgttaaatctagaggtactcatggagatacctagatgttatatagtattaataaggctaataaggattttttcccctgaactttgagaagtaccaaatcttgctcc

SEQ ID NO: 108890 - DNA, 738 bp, Cannabis sativa
cagatatctctcacaatttctcattttaacttctctctctactgtgttttgtctctcttattattgcctttattcttatcttgtgaaacgagaaaagtagttctctatatatagaccaagggacccaatatacttgcttccatatttgaaaattaagttagttaaagactaactaactgaatattggttgaggatttaaggaataatacaacacatataataatctattttaattttaatttttcatgattagaatgaatcatattttgatatttttaaagtgaattttctcacaaaagttgaaaacttttttctatttggttattttcattcctcacactttttattagtattcatcatttttgcagcctttcacaacaaactatttttttataatccaattttttcttatacgtaataataaaacttataatgtaattttaatattttaatagtgtgacaattctattctatatatatttgataaaatatatatatttttgttttatacaatatgaaaaattttaaaaggtaaaagtctactaaattttttataggcttacacttctagtttccattacatagtaatttttttcaactattaatattctatagctttattgtccaagaaataaggaattagtagttgtaaagactgcttacgattaacactttgggttaattaataactagggtttattcatgagattaaatttatttataatatgcatattgtgg

SEQ ID NO: 108891 - DNA, 647 bp, Cannabis sativa
ttcacatccaccgggcatgtgtcatatgtgtgaggggccccacatagctcacaagtaacttgagcctgtttcacctgagcagtcatcaacttcgttaaggcctccacttgagctatcaacttggtgatggaatctaccttgtgcataccagcaactttcttcgtttggcttctttcaattggccattgttggttattcatagccatttcttcgagcagatcataagcctcgtttgcacttttttcgcataaatgccccaccagctgcaacatctataattgttctggtgttaccaatcagcccattgtagaaattatgaaccaacatccactttttgatcccatgatgtggacattttctgatcagatccttgaacctctcccaagcctcatagagagattcattgtctagttgacaaaaaatattaatttctcctcccagcttggtagattttgccggaggaaaaaacttggacaagaactttgtcacgaaatcagtacatgtagcaatggagttgggtggcaaggagatcaaccaacttttggctcgctccctcagcgagaacgggaaaagtctcaaacggatggcatcatcactaactccattgactttaaaagtctgagataactccatgaaatttgacaagt

SEQ ID NO: 108892 - DNA, 546 bp, Cannabis sativa
tggtcgagattcgagtcgaggtccctgttcgggttcgagtcttgatcccagtctgggttcgagtttctgtctaggtttgggttcggatcttgtgtcggggtctaggttaaggtctgggtcttggttcaggtccgagtcccaagttttgatccttatttgggtctgggtttggttttgagtccgagtctcgggttcttatctcagtttggattcgtgtcttggtctgggtttgggtttgggtccttttttgggtttgggtacgagttaaggtcccgagttcgggtctaggtgtgggtttggacccaatctgggtctgactctaggttacggtcttgatttgactccggggcggggtctgggtcaaggtctgggttcaggttttgggtctaggtccaagtccaagtccgagtctgagtcctgggttccgatcagattctggggggttctggggcccgggtcctgcatccaggtcccccatctaggtttgaattctaggtacctgtccgggtcaaatttcaagttcgggtcccgaatcctgatctgagt

SEQ ID NO: 108893 - DNA, 584 bp, Cannabis sativa
tgttgaaggaattttacaacaccaaaataaattataataataataaaaactgatgaacaagtgcgagtattcaacctagaatggcgattactcaaaccgggaacacaaataatttaaaaaaagggctagaaagaataataaacacaagagaattatagtggttcagtcagatcacagtctgcttagtctactgttgcaaagattctgtctccctacttcacggtggatcactcctttatatacaaagcaagtgtcctatcgtttacacaaggattccattcattgtcaatcggtttatacattgatttacaataattaagcttaaacataaacattaataaatgaagaacagtttccagtttcattcactaaatacagcaacgtacgcgacttctatagtgcgagttgattgttcacattcttgcataagctcgcaggcttagaatgcattcgagactagttgggtctaagatgtctgccttcttgtacagtcacttttatggacatcgtataacgagctcatagaaccaagacatgcgagtctacatcggtttatcgaggctgttgggtcatcgggaccagct

SEQ ID NO: 108894 - DNA, 630 bp, Cannabis sativa
  modified_base (441)..(443): a, c, t, g, unknown or other
  modified_base (475)..(478): a, c, t, g, unknown or other
ccacatgatttttctacaacagatttaaagatgttagagtgtcaacttcaaacttatgttgaagatatgcgttctcatgttgcattttcaaaattaaattggcactaacacttccagttacaacagcttcagtagaaagagcattctcagctataaacattgtgaaaaatcaaatgcgcaacaaaatgggagatcaatagttgaatgacagtttgacagtatatctcgaaaaggatgtattcaaggctattgacaacgagcttatcattcatcgttttcaaaacatgaaaactcatcggggacaactctaaagatatgagctcaaaaattgatatattttgctaaaattttagaatattgagtatgttatatattttgaacatcgttttagattgcttttttttttattattggaagatttttagtgtttgatatttaatnnntttttaattgggaattgaaatattgaactgtnnnnttctttatatttacctgtttttttttgaatatttttatatatgaaaaaaatttgcacccaccctctaattaaattttggatctgctactgtatgtaataataggtagttaggtaattaatcgatttaactaccaatttaactaactatccta

SEQ ID NO: 108895 - DNA, 598 bp, Cannabis sativa
  modified_base (52)..(52): a, c, t, g, unknown or other
  modified_base (525)..(564): a, c, t, g, unknown or other
attgagtgcatgcccacacatagcaagtgagtcctcaatcatagtgtgtaanactgtgaagaatccaaacaacagatggagtttcgagctgagttcttggtgatactcttctacggaaaggatacaaggattagagatctgagcggaaggagtcatttaattctgttgcaaccaatgtaaggtttctcataccttttatgtctttattttatatcgttttagaagttcatgtctaggatattaaaaacatacttgttagtaaatctagatcatggttaaacatattccaacagcccaaatgcctcttacggcccaaatcggaattacaatccttcaaaaccaagtcagtaaatataacccactcatccaaaacacatttggctttggctaaaatacaaggcccaaataaggccaatagctataagaccaatcaaagacaaagggtaggaacgagtctataactgatctataagaattgatccttccacctggagaaggggaagacctgttggaaattattttacnnnnnnnnnnnnnnnnnnnnnnnnnnnnnnnnnnnnnnnnctaaatatgaactttcaaaaacgatgaaataaac

SEQ ID NO: 108896 - DNA, 514 bp, Cannabis sativa
  modified_base (462)..(476): a, c, t, g, unknown or other
taagtgaatggccttttgggcggaccacgctcaaaggtttggataaaattacaaagtactcaggtcgggtgaccacttatgaaagtataatttttattttctgtaatttcttttgtttatgctaagctaaagatcagactagatcaatatattagcttcaatgtaagttactatggtaacaaacataattccgaccaataaatgaataaagatgtttatttcaattcaaattgagtcaagttcattagcatgttataaatttaccatctaatgcgtacaaagggtccggtcatacccaaagccccgaacagacaaaaagcatacttctgaaaacaagtgaccaagagtcataagtctgctctgtcacttggggggcacctatacctgtacgaaacatttggtaaatattccaagtttaaaaaccgcttggctagtcattattccagaatacaatacagttannnnnnnnnnnnnnnttaataaccattttctatctatggattcaaactgtatg

SEQ ID NO: 108897 - DNA, 853 bp, Cannabis sativa
aattctcgatagagaaatgatgggaaaggacttgttttgggcgatccgtggtggtggaggagggagctttggaatcattctttggtggaagattaagcttgtaccagtgcctgaaacagtgacattttttagagtagtatattcgtactgatgcctaataacaatgctctaaattatactatttaaatttccaagtagtatgcatattgtagtatagcttgtcacatgggacatcaatttttaatatgtaaaattaatatttgggttcaagtggacaagaaagaaatacaacgtaataaacaagatcctcgttttatgtactgttaaaatgtggtttgagtctcaaccttgattcaattaatctgtaatatttcacgtgcatgaaagttaaaagaaaatacagagctgctggagatagagctgtggcaggggggcgtgcgagagcgagaatgctaacatttcaaaacttttttaatctaattatgtatttatttatattcattactttgcataaattcctaagtagaaattacataaattatagaattttttgtagtgtttattttttatgacataattaaataatatatttagtgtataggttttgtgttttgcttacatttttgtgggatttttatatgtcatatttttgtaaataaaactaattttactattatttatagtttctccatatttcgcttctctaggttaactgtttgttaggtcaatctgaacttgcctgcaaccatccccgcacccctctccaactcgcctgaccaacaaaatcgtccgccccagactatgaaaagaaaacaccagaagtgttttcatgcgtgtatgaagattcattatc

SEQ ID NO: 108898 - DNA, 1254 bp, Cannabis sativa
ttagggcattagtgaccacgcccaaggcaccctactcactactcatgcctaaaaaaattcttaaacaaaaagtcttaaatctattttttcaaaatattatattttatatttttattattatttattaaaaaatataacaaactttttagaaatacatataatttagtttttaagatattacattttataatttattaaaagaaattaatttattaattttaaattttcactactacatataatgtgtgattgagacatgaattgtatttcatgagatccgttcgaatactaataacgttatgtaattaatactctcactttgtttgtagtgttaatttgagatatatagtgaaagttaaatgtgtgtttcttattgtttttgctatgtaaaatacttatatatataataattcgaattattctaggcaggtgtggagttattggctcaatataattaagtggagaaagtttttgtttatctttcccatttgggagtatataaaatatttaaggtcaaatagtcatacatgaatatgaatgaattaataaataaataaacagtaaatataataaaagagaccatatgcatgtctcttcattggctgacatgaagaatcttattcccatggccccatgagaagaagaagggatgtgagctatggaagtctctgctgccaagtgccaaccaaattaagtactaataaaatgtataattaaatggaatgaaataaaatttaaaatatataaaaaaattaataaaaaaattattaattttttttcaaattttatattggaatggtctttctttttatttcaaaatgaaatagtcattctaccaaaatgatagaaaggtcattccatcaaaatggtattctaatgtttttaaatacaaccaaataaaggaataaaataaaaaggcaaccaaataaaaattgtttcctttctattccaatcaatttcattacttccaatcaaatgctactttagtattgtgataaagtaactaacactattataagataacattttacgaataatcattataaatttaatacttacactaataataatataatactttgtaatttattagacatctttgatatccaaacacattattacaatatattgccttataaattattagtaattttatttttttttaaaatatatttaaactaaaatatgtagtacttaaacatttaattataccaataataatataataatttgtaataatataggtgacgtttg

SEQ ID NO: 108899 - DNA, 538 bp, Cannabis sativa
caaataaataagttaaatttatgtagtctattttagaattaagtttatgacttaagggcatggttgtcatgattttaatatacgggtaccataaagataatttctaatttcatgaggggccaaattgaaaatagacaaaaaggattaattactatcttttcagttattattaaacaggtattggtccctatttttacatcgcttcacatatcgtatctttattcttaaatctctagcatcaagaaactcaggttctagatagaaaattttgatgcaaaaatatgttgattttaaagtgaaaggacgaaaggttgagtctgagccctaaaatccacacaaaatgaagatgagttaattagctgaaaatgtaataattgagtttaaacataattaattgatatgtttaggcaaagtgagataaaaaaaattgaagtaatgtaaaaaatcattatatattattgttataaaaaagaaagacaacaacatgttgtatataacatattttgttttacaaaattagattaaaatttaatatatt

SEQ ID NO: 108900 - DNA, 3816 bp, Cannabis sativa
gatacagttattttctccatttatcattgtcaagttattattatttattgtgtgtaacccatgattttctcttatgaggtttgtggtccaaattttagttagaatcttcttataaatttgctagagttcttaccattttaggcctgagcaagtggatctgaaactaacaaagataactgtaaatctgtgcccttagatgtaatttacttgtagttgattaatctttctctctctctctctcctaaaatgtttaaaatttaaatgcttacagagtttcagcagacttgtacttcgctggttcttctattctattatcacaaggatcatagcctttatctttcaggaaaaatggatttgctttggaagaggatctagatgcaccgccagggcaccactttagactgaaagcggttcccttcagtaaaaacataacttttggagttgaaggtaatccatcgttttttcgtttatgtgtgtgtgtctttgctttaataaatttatgggtaaggattcagccctgctgtaagaaatccttaagcaagcttgcattaattctctcttatggcaagatgttgatgcttacaatgtataacagagtacactttcaagcaatggttgtttgctaaaatgaaaagaaattgactagtttttttgataaatgatcatacaatttcatgcaattctagaattcttgtttgtttgttttttttttttctttcaagaaaatcttttttattttttatatttgcaagaaataattggattgccgaggagcgctcttgattttgcctaatggcattccttgcttatgtttggtcgcttgatgttgtgtttggtgaacaatatttataaccttcaagcccatcactctttatcgttgttatgaacgcatacactagcattcactcacagcctaatctcaactctcaagtggcaactcgaattcttttaatgaaaagaactagacaattattacaagcctattgttttcacccttgatagtgtttttactgtgcctggcttgtctagttcatatgcttgcccctgcattgatgtgacatgaagaaaaagaattacaattctttgtttaacagatgtgaaggaccttatttcgactctggctgatggccatggggaatgctcaataattggtagttacaggacggacactgctgattctgtttgcccgtcacgagttcgtgctatgttggcatcacgtgcttgcagatcgtctgtcatgattggggatgctcttggaaggaatgagatgcagaaggtaatgacttacttctgatttgttgatcttctcacttttctccaaattactgtggaaagaagggaagcataaaaactactattgtgtgtttgatagatggaaggtggcatatagttgaaaggaataaaaatattggaatataaatgagaataagaataggaatgaatggaatcaaatttaaaatgcataaaaattaataaaaaaatcattaattttttttttttcattttacattggaaagatttttccttctattttaaaataaaatagttattctgttaaaatgatgttctatttcattacctcccaccagttagttggaaggaataaaaacataagattgcgaatgagaatgataacaggaataagaatgaaattaaatttaaaatgtatagaaaaaattgataaattattttgtataaatacctaaattatatttttggaactttcggaggtagctggcagttaagtatattaagtcaatggccacgtggcagttgctgattagtctaggtcattaaattcttattttttatttaaaaattaatttaaatgtaccaataagaaacgacatgtgaataataacttgacacttaacggttagatatttatgaaagttttaaaaatataacttagttatttatctgcaaccgagagttaaacttaagtatttataacgtaaattactcttttcttatcttgcattgaaatgtcttttttttttcattttaaaatggaataattattccattggaatgaaatttgaatagtttaaaatgaaacctaaggaaggagttaaaaatgatatctttaagtgtgcatgaataaaaatggtaagagtgtgatttgtttcagatacttgagcatttggtagggctgaagtctccttggaattgtccacatggaaggcccacaatgcgccacttggtagatttgacaaccatatacaagagtgcagaagaatgatgctgttgctgttgttggataacttatttaggtaaaccttgtgtaaatacataatcttgtgtagatgtgtaatctcatccttggtggactgtggtagagaattataaatagttctctttagaccatagttgcattgcattgcagttagctcaagcaattttttttggtatatcctatattatatcctggctcaggaattgacctcaccaattgaggaggtccttgttacttgaagaaaagggcaaatgcacgagaaatcaatttttggtacccctttctctacgaatcatcaaatttcacatttctaggattatttacaggaatttacctcttcctatttttataacgaaaaagataatctatgatgccttctttttatgttagtatatgttagtttttttttcttagaattaaattttaattcgatgaaaataaatgttaatattgctttataccttcaacaactcttatttaaattataatcattaatatttatcgaaaaaaatatacaatgttggaaacttcttgttctttggaaagttggggagtgctttacataaatctttcagaaaagaaaggagaagtatttttctcgaggagttatataatttattttgaattgatcgaaattaaattagaataccaaaaattattaaaatcaaactttttttgttttcatcactttttagttattctttaaagaaaatgatggtttacttattcataatattttttggggattttttttttaaatatatatgattgttaaaaaccatttaattaattttagggtttctacatatgttatttacttttatataacttaaagctttttctaattaatgttaggacttacaacaaaatgagtgaatttaaagaaaaaaataaattaaaattttagaagaaatagttaaaagatattttttgagaggttgtggtatacatccacctctaaatcaaaaaggtctctagaaattattatcattcttagaaagtagttgactcgcgaatgcaggtcttggaaggcttgtttgtccttctcggaatggtctccaggaaacctagtccatctcctggaaggtagtcccgaatattcaactccagcctcttttctatctgagaaggtctttcagtgattgccttggatcgtgactctgggagctctcatactctcccccgaatgcacacttccttaagccgatgtggagacctcgctcaaagaagagttgattaaattagttattgtctaactaagcattaaatccacgaaacatgtaatttatttaacttagataaagttttaagattaatggagacagattaatctagacaataaattaataaagcatgtaacacatttaacgtaagttatattcttcatcacaattaaaaatacctttgttaatattagaaattgcaatttatcacaaacactttgaatcttatactataggtgaagagtaatcctaaaatgacaatatattaaagtaaaatttaatttagtgatcatctaaacaagattaaattaataatcatgacatttaatataaaagaatagaagtaattcgatataa

SEQ ID NO: 108901 - DNA, 943 bp, Cannabis sativa
gactaaaaaggtaacaactacacacaaaaattgttagtatatcctttttttagtttttttatttttttattaatatcctataatttttcccctaaacttatacttaacataatttgttatacatgacactttttttgttttccccataatacccccaattacatctacccaccccaaccctctcctctcatcaatttcacacccttccccacccgaattcctatattccaccaccaccaatttttttttttcttctcttcactcattaatacactagaagctacaaccttccacactacaagccaccacactagggatcccccacactaatccaccacgttagaacctagaacactacaagctccattaatgggtaagtaattaatttttttttttaaaatattgtttgttgttgttatatttaattaagaatgttgtttttcttgcttggtctgtctattgttgctgttattttgttattttttctgttaaaatgtttgttgcatgtgaaaactggaattttgctggttttctgcattttttgtcgtcgggcccgatggggtccgatgctggcccgatgggggcccgatgtggggaaaaatttggttggtagggggtaatggtcagatggtcggaccccccatcagacccgatgatggctattttttttattttttttttatttttttttaatttttggaacctgggttcgatgctccccccatatgggtccgatggtttgaccaatcggaccccatcgaacccgatagctcttggaattttttttatttttttttaattttttaaaagagggcctgatgctcctccacggggtccgatggtcggaccaatcggagccgatgcaattttcaattttttttatttttttaattaattaattaattattaattattattgtatgattaatttattttgtattga

SEQ ID NO: 108902 - DNA, 624 bp, Cannabis sativa
  modified_base (595)..(598): a, c, t, g, unknown or other
ttcctgttgccacgtgtcacaatcacaatccctctcattttcgttttctctactcatccaaaactctcaaagacaaaatccctctttcagattaatttctgctttgccccttttgaatcttcaaagtttttaaaacgatcgaaactttttgcagggagaatcgtcaaatcttaaggttagttttcgaatctactttcgaattttgtttctggatttgggaaaaattcttcactctgaattttcgagaaatagaaaatgcatgttatttgtagggaatacacatagggctttatttctctgctagaactggtttattctcatgtgaaaatagacctaaaatttgtataaccgtgaattctaagaagaacactttgaatattcgcgtctctttaattactattttgaatattcacgagtattgagatgaatatcttgaatactcgcatgtgtacttccttaggaattctaggggtttggctattccgacccattgtttagaacttagggctttctttatatgctctgtgtatcttaatgtgggaatgctggttaggtctttcaaatggtgggtgtgtctgttgggttttgtgccctnnnnaaaacccatttcaatataataagatt

SEQ ID NO: 108903 - DNA, 1113 bp, Cannabis sativa
ctcttggatttaatatggagctgcgatcatcaatttgtcatctcatttgtactacgaactgcaacaatcaaacaattatatgttttgttatgcgaatgcatttatttcgaattttgtggattggttgtttaatacctgtttcaatttgaatttgaattcagtagggagctctgatcaacaatgtctcgtatatttattgaatgatctgcaacattcaaattacaattttagaagaaggagtgatgatacctcagttctttatgagattatagtataaaatcgttgatacctctgtgtaagcagatttgatcaatgagtaattgctcttgatgaattcatctctattgatgtttgtttttggtttctatgagtctgattgttagagtaggtaagttttgtgttaatttttcattgaaatgttgttggattgttgtttagcaagcttagtcgagcatcaatggctgccctatttttttttttcagtcggacgagcatcaatggtgttgaagaagctgaaaccgtattttatgtaatttagattacactataagttgtattttgaggtgtaaccgtatttttgttaaatttttcctattttagtgcaattgtgaaaatttccctattattaatatagataaatatcatgtacacatttgaatttgaattaacctagtaacaatgctcttttgattttgagaaatttagtttaattgtatctttgtttttagatagttaaaggttaattattaggagaaagagaatttttttaaggaaaaaagtatcaggaaataccattaatcaataagaaaaaaagaaattttttcaatattatacttaaaattaattttatttataaaaatatctttaaaaaaattatttacacaaataccaatatcacacgtcagcatacatatcaaaattcaaaacaattactgaaaatgaaaaaatctcgtttctagaaacttttactttttgggagttttaaaaaagtaaccatttagttacttgtgatgtgaataagatatttactttttcattaaaaaaattattttaaaattttacacatatatacataataaaataactattttaatatgtgagaagcatatattt

SEQ ID NO: 108904 - DNA, 865 bp, Cannabis sativa
ttttttttacattgggcgggttgcacttaaattttagcaacccgaactttagattaggttagaaaatatataggataaaccgcccaaaccgaccgatgtacaaccttatatacatgttaatctaatctcataaacaattaaacaaaagcattgctcacttataacttcaactaaaatatttatttttactggtagaaacgtcaaacctgcttgtatacaaagtacatgattgtaccgactcatacatagtaaacctagataacaaaacttacagctgtcaaaaatttgaatatgatgaaacttgctcacatgcaatgcttgtataaagctcaacacacatcttcttcccagtaaactctgaaccaaactcatatccattaaactccttcctcataccatgcacaaaaagctcaacacaaatcttctttcgaacaacattcatattcaaagatttggggacatggttgatcatttcatgtataaagtattcaacataccttataatgaatacaccacagtcactaaaaaaatacaaaaacaacacacatttaatatcattgtaaactatataattaataaatctatatataaaaagtaaacaacatagttaccactgatcttgttgtgacagtttatccacaaacacaactttcaaagaatctgtctcacttactccctaaaaatactttgtgttcttgtcaatatccgacctccgaccatagaagttcacatgagatagcaaaatggacagaagaacaacaaaagctttcacaaaactagtgttcccactccggcaaaattatttttattagggaagataatcatcttaccctaaacaccattctcaggtttattaaaatatttc

SEQ ID NO: 108905 - DNA, 1434 bp, Cannabis sativa
caacaaaccttttttgatttttagttttctggtcgggatatcttgatcgatctcgatctcttctaattcttctacaggtccaacattggtgcttgggtcccctagtcgatgatcaacatcttcatccccgccttgggaagttccctacttgggaatgttttttcccttgtctgtgctctggctggaggatacttcctacttagccttggccactacaaggttgtaacattcccgagcagactactggtttcctcttaaacaccctaccgcattctttgttggaaactttaggcacgagtgaaatattgatgtgacatcctttaagtcatacatggcagaccggcctagcattacgttagaagctgaaggaatatctaatatcaggaactatgccattacaatcatcctcatcgaagcttgtcaaacagtgaggggtaaacgaatttgtcctagaggtgcgacttcttgatcggagaaaccattatcgatcatggttctggccaccattttattggctatgtggacttccacgacgagcgggtcgttgggtggaaatttaattttgacagcgtcttcatcgttgaaggttatggtcggctctcccgctcgtggaactttgggcttcctttcttccacggccaggataacctcttcttgctcgtgctgcactgttcgggcatacctctcccgagctttgcccgaatctccagcaatgtgtgggcctccaacaataacttgcagatgcccatccaccggtggaggcaggaaatcttggttattgtcgtctctttgaccctgattggtcttaacatacttccgcaggtgtggattgtttttccttattatgaattcaatttcccgcttcaagttgttgcattcgttagtgtcgtggccgtagtctccgtggaacctacaaaactttgtcatgtgcctcttgttggcatctttcttcatgggcccggtcctcttatatggggcctatgactgagttgccatgtacacactttctatatcttcagtcaaaatagtgaatgtagtgtatttggcatggttctctcggggagcttgttcagacttgccagtgaactttcgttttttcccattccctttcttgtggttgttgttggaacgcttaccacttgagctcaaattacttgggtagtgggaaagttgggcggatgttccagtaagaggagcctttgacttgccaggcttttgctcacctttcgctcgttgaatggcttcttcgagcttgataaagcctttggcatagtcaagaaaatcactcattgagtctactgtcctgttcttacttatatccttcgagagttcaccgaggactttcatgccccccagtatcgcggataactttccatctttagttacccgtgaaactttggttggctccgccatgaatctactgatgtatgcccg

SEQ ID NO: 108906 - DNA, 634 bp, Cannabis sativa
tagtgttaatataattagcgtacctgaaattcaggagttagtcgactttcaacaaaagtgtaccaatcagcctggtcgatcttggggtgcttttcaggaacttgtgtcattgtcccagatccttctcttccaaagcaggcattatgatgtcttttgtcatcatattcttgaggtctttcattaacttcccagctaggatgagacaatcatgtttgaaggagtctggcacaatgaaccccgtctagtttgaaggaaaacaaacatggttagagtgaacatttgaattaataaaaaaacaaatcaaaattctaacaaccaaagtacttacttgtatgtctttccaaactttatttttcagagtagggttgacttcttttgagattttataggacaaccctatcgtctgccagcatctgactcctagaattgatacgagcttggcatagtttttcccgctgtattgtcctttgtcattaacctcgagggccactcttttgccttgatccattagcttgcatatttcattcatttgagtaagccctcttgtaggtattactgttggacactctgcctctgggtctgaatcagatcctgaacccgagttggccatatctacaccattaacaaacaaaat

SEQ ID NO: 108907 - DNA, 1223 bp, Cannabis sativa
  modified_base (706)..(715): a, c, t, g, unknown or other
caatacttatgggattcacgatgacgattgaggctgagaggcccaagaatttttcttccctatgttattttttagattaattaacttgtagttagatttattaacttattaatacttggactaatattacaatgtttgtgtaatatttaattacttttatgaaatgaaattatgtattttagccaatttttaaattaatttaaataatatttaatttaacttttaaaaaataaatatgtaatttaaatttaaattaaataaaataatatataaattaataaatatataatttaataatttatataaattaaaaaaactaaaaattgctcatatatggcgtcggttaatagctaggaactgacgccatatgtaccctatgacgtcggttcctagctaataatcgacgccatagggtacatatggcgtcggttgtttagtaaccctttagcgtcaccctaatgagcatcggtagcgaatttcgccaaaaccgaggctgaaagggcttaaaaactgcctctaaaaggggtttttgtagtagtgtaaatttaccattccacccctcaatgtattttatcattaaaacacttagcttcctatgaatgatatttcagtaaaccaatataattactgaaataagagctcttccatttatctctattaagtcaagctcgaaggaaatcattatttcacttctatgtccagatannnnnnnnnnattccgtatctatgattagcactcccactcactatcatgttcccaagatgtatgtgttcacccgtacgagcttcaatgaacaattataagaacataaataacactcttcagatcgaacctaaccatatcaagattaagatcttttgatctaagatcaatcagtgatattgacttagaaagatacaacagtaagattataatatttttaccaagatcaatatcgatcccagtccaatgtctactccatacatctgatactagcatactttgccaatatcctagaaagaacataatacttatccaaggtgtaagtaagctttattgctgactatcacattagtgtaaatccagcgcactaataaattatgggacagaaacttttgaagcatataatcacaattactttccaccgtgttgacgtcactttaattgtgaataactatatattttggatttaaaccataatcatgaaaaatacatataaacataaatgacttctaatctttta

SEQ ID NO: 108908 - DNA, 536 bp, Cannabis sativa
ataaagatgggatcatggtggatttggctaaaattgaagctgttcgggattggccaacaccaaaatcggctactgaagttagaagctttctgggcttagtgggtattatcgtcggtttgttcagggtttttcaaagattgtcgtacccttaacggagctgacctgaaagaacttgaagtttgtttagactgatcggtgcgagaaaagtttcctggagttaaagtagcgcttgattaccgctccagtactaactcttccttctgaaaaggaaaagtttatggtttactgtgatgcctcgagacaaggtctcgactgtgtgcttatgcaagctggaaaggtaatagcctatgcgtctcggcagtaaaaagagtacgagcagaggtaccctactcacgatctagaactcacagcagtggtttttggactaaagatttcgtggcattacctatatggcgagaaatgtgagatatacactgatcataagagtctaaaatacttctttacccagagatatttgaatatgagacaaagacgct

SEQ ID NO: 108909 - DNA, 1095 bp, Cannabis sativa
  modified_base (26)..(45): a, c, t, g, unknown or other
tatattaataagtaaatctaattatnnnnnnnnnnnnnnnnnnnngggcataaaacccaacagagctggcctcaatccaagaagacgatgatcctgaggtcttcttagacctgtgcgaagaacttgaaatggagaaggagtcgggtacagaggcgttgaattcgacccccaaatcgacgagttgggctgatgacaatgaggcgatggacttctaggaatctgctaaggttacttggagcaaattcaatttgaatcaggtgaaaaccccttcctctcaactatcatttactgaaccattaaaacttggggatcaggtggttgctaagatagatttagacgaagctgaagttgaagcttcattttggagatcgtcaataatctgtattgtattgggggccaatcctccatttagagtttttgaaggctttatcaagagaatatgggggaatttgggagtggaaaggatagtgagaatgcactctgggttcaccttagttagtttcaaggatgaagttactaggaacataatacttgaaaccggggttatacaatttgatagaaagccagtgatactaaggccctagtcggaggatatggacacaggccgaatggtcaaattggtccctgtgtggaataaggttgcacggattaggtcttcaatactggggaaagaagaatttgagtgctcttgttagcactattggaaagcctattacggctgataaagtaatgcttgagagatccatgattaagtatgctagagtgttggtggatgttgagattaaggatgaagctccgagaacaattgcctttgctaatgagaagaagcaactgattgaacaaccggttgaatatgagtggcttccaaccgaatgtgcggcatgtgacttgcttggtcatttgatttcaaattgcaacaaagggaaacctgtagcctggaagaaaaaaacagcaaggggacaagcctaaagctgttgaaaaagctgctgaaaatgaggaaaaattagtcgggaacttgggcaatgtaatggaagcagaaaagagtgatgtcgatggcaaaacagagaaagagtcgattgatattgaggaaacagg

SEQ ID NO: 108910 - DNA, 526 bp, Cannabis sativa
gtgcatttcaatataaaatcaatacctttgttggaaatattgtagtataggttgttccaatttaggtatgaataaaaccatgacaccaattgcccaaatgcccgaaaactgtccttgtactctgtcttcacctcgacactctggagctaaatatgctttagtacctctaacatcagttgtcgagtcgtcaaccatctttgccaatccaaaatcaaaaattttagccacaaagaaataatattcttctcttatctctttgactaataatacgttctgaggttttagattacagtgtacaaaccccttctcatgaatatagtcaacacctctcaaaatctgttgaagaaactgttttacttgtttagattcgttgtaaaggggagaagctaagatgaaatcaaacagtgtccccccaatagcgtattccaagaatacattgtaatgcacttcctccttaccattaatactcttaagagtagtatcatgaccatagcacttaatgatgtaaggacaatcatcgaaatat

SEQ ID NO: 108911 - DNA, 855 bp, Cannabis sativa
ttttgtaaattttttttggaatttttctattttattaatattatattgtgtgtgcgctataagtggccagatttttgtcgcaatttgtcgtcggattgcgtttataaggtaaatatttattaacttgatatataatatatatatgcatatattttgtgttttattattaaatatgtgtttatatatattgtgtgtatatatgctatactatttgtgtaaattgtgtaattgtattgtatatatatttgttgtgaatgagaatgaagtagtagggattgaattagtttagaaataaaatttttaaaattatgttagtttgatatataattgattatatatgtatatgtatatgttatttttttcaaaaattaatctatagaatttagtaactagtaagttgttacattttttaatataactagtaagtaattaaattattaaaattctaattttgttgtattgcattatattgtaggttgtgagctaacttttgaggttcgacatatttcggtattgatcggattttaacttgctatatgtatatacattcactaactttctgtttttataattaattatcagtgcatgcttagtggagttttaatatcttaaattttcatctgtagtgaagtaggttctgcgaatacatgtactgcgatcggatgggtggataaattttgtattatttttgttattttgcttgttctgtattgttatatttgttttgtttgttattttaggcatttttaaaaatttggggaacgtccaattacagtcgttatgctgctgaaatttcagtagaattagaataaattttactaaaaaaaataaatattaaagaaaaagtacataaca

SEQ ID NO: 108912 - DNA, 633 bp, Cannabis sativa
  modified_base (27)..(27): a, c, t, g, unknown or other
  modified_base (237)..(243): a, c, t, g, unknown or other
atgaccagtgaaccgagtataggctgntactgtaacacatcggtaaagctagagtatgactagcagctggagtacgaccaatgtaccgagcatagggtgttactttgtcaatagtaccgtcgtacgaatgttcgggactcagtatcgtgtgggacacgacagttagggttatggtcaggggtatgggcgtctgatcataacccgggattatgtatgttttatgatttatgcttttcnnnnnnngtttgtcgactcacagtgttatgtttatgtgtaggtaagggcaaggccaaggctgaggaaccgtgaggacgcgccgatgaagattgtacatgtcggggaagttaggcctggagcgtacgatcctcgggacaacagcgcttttatagttagtcgttgggcgacaagtattttgtaatcgacagtaaacatttcgtaaagtattttgcaaatgggatcccaaagtattttgtatgaaatattatataagtttaattaaaagtaaaaattttaattaatcacaatttccatatacctcgtttattagcaaccagctgcacagtatgtttgaaaatcacgtaataagcctatgctagttagggtgttacataagttgtcattggaaatatattt

SEQ ID NO: 108913 - DNA, 740 bp, Cannabis sativa
aactcttattattttattggtttcttattattttattggttgccaaaaacctcggtcaacaatacataaaaatcaacttaaagaataagaaaaacaaacacaataattgtgcaaatatattcagatccaagcttatactaatgtaatataaattaaagaaaagtaaaaggagaagaataatttagaatgttaacttactcaaacaaaaatggttataaaaaaaagcttgaaaagagagaaggagttgagcaagagggtagataactgagtcagaatgcgtgcgatggcaatggctggaggcgatgatctctgctcgacgaagggatgctggccacgatgaggaaacttcaacaaaggaggagatggagttttttttttctgataatgaaggggggttggtgttgaaagctcaaaaaaagtacatatcagtatttttataatttttaaaaacttgaaaatgtgtaaaaaaaaatgagaaagcataaatgtaaaagtttctttgtgttaatataattataaaatttaattaaattttagtatgtaatgtaaaaattcatttacattacttattgtaagtactcctaagaatctagtgtaaaaataaactaatataaatataaaaaaaaaagttaaatgttaccaaataagctattaaaataatttgattttattatccaactaattaaataaatatattacattattaaaaatcggccagttatagtcagtttttacaattt

SEQ ID NO: 108914 - DNA, 1686 bp, Cannabis sativa
gcattattctgtgtatcctatcagcccacattgattcttgtgtgtagttgttgatttggaagatcgatctggtgtgagttccattaccgtttttagatacaacatacgaaaaatagagaagaatcttgataattcatcaaggggtaaatattttatgttcattttttatttttgatttaatatacatacacatatgggggatcttatcgtttggtacaatgataatctatattaaatgcttacgatgcacacgtaatttagtattacaaaattaacattttgtctcacattgctcatgtgtgagtgatttgtggaatttatattacacacatcataactattaagccttaactccactttagggttttggtaagagaaatgctaagggcgccttaaggtgtcatgtaccacaagaggtgatatactattattggtgcaatttaatatcgagttttatatattttgattgaatgtatataatataagaaacccctaactacaaagaacatgtcacatcgatatgaggtgtctaatagcaatacttttttgttaattgaataaagagtagttgtgttaccgttaattttctattacaacttcttagtcaacttgagtgtccaaaactacactcgtaatattttcttcaaaaaatgattcatggttgtaactaagaggtttttggataaatcttacgtgtgtgattgaaatttataaaagaaaagaaaacttgtatgtctattttgtgagatttatattacattaaaaatagtttaaagtattcatcaaaaaataacatagcaatgcaatttaatattcgatctggcatattttagttcaataactaaaatgaatatataaacttcaaagtattagttccattagaaaatatagaagtcatgcatacccattattcgtaattggaaaaaggaaaaggaaataaaaagacaaacaacttttcttccttcgtatatgtcttactttttatatatttggttttccttcatatccacacacaaatacttatacacaagaaataccgaaaactcattcacgtttttactttcacagtaacctcagctaataacaatggaaaatcatcatcgactcccactcatcctcttctacctccttcttctgttaatcttcatcaccccacggcgcacgttagcttcggacccttcgtgtcgaaacatgtgcgggtctacacaagtcaagtacccgttcggaaccggctacggctgtggctccccgcgtttccaaccatacgtgacgtgcgcacctaccgacgacaaccgagaccacgaccacctcgtcctgaccacccacaccggatcctacgccatcacctccatatcctacaccacctcgaccttaaccatcaccccaccatccatgtccacctgcttcaacatgcaaccctctcagtccaacttcggtctggactggcccagcccattccagctcggcccatcaactttcatcctcctctcttgtcaacccccgacctcttccctcaccgtcaaagattcctcaaccgtctgcgaccccaactcccacctctgcgcctcgatatacacgtgtccctccgtggttgctctaggcctcccgcttttcccgccgacaaacacgtgctgcgtgtacgcgccggcgaatttggacggcaaggatgagctaaacctccgcaaa

SEQ ID NO: 108915 - DNA, 885 bp, Cannabis sativa
taggagaccaaccacattgattacatcgggatgctccttcaccggattcccgaggggcagtactttaaagatattgtgcttgggccaagcgatcctaggcctaatcctcgcgcggaacaacaatctgttgccaagaagaatacttgggaatcttgtaatcacaagtatattctttatcaacgagaagacccaccgatcgcaagttaacttcgctcaaaaggaagttgcatgatcgaaggctgtagggaagagttaacaagcgcttgtgcctactaaccatctcgggggtaggagtaggtctcgtcaaaagagctgccagaacaaacaaaacattagtcaaaaacttgaaaaagaaatactgatgtaaataagtaagaagagaacgatcacttacgaagtttacgaaacgtggttgtgccgatgggggaagaccagatgtccagaagaagttgttcttgaaagacactttatttggcaagtctacaataattttaggctctctaggatgagtaccgagatagaaaaagcccactgcagggttcttcctcgatggaacagcctttactgagtaaagatactcaatctctaccagagtggggaacccccaattcggaattttatataaaattttcaaactagtaagaatcctataggagatgggagtcagctggaatggggcaactccaatgtggtttatatagcctttgaagtagtcccgaagtggaagggtggcccctgcactgatatgctcaaggctccaagcactcacactagttaaaccactgcaactggtctcaccactgcaccccggttactgctggcaaagcgtgcaggggggaagcaagtgaactcaccctttcctactaatctaacttggcatgattg

SEQ ID NO: 108916 - DNA, 671 bp, Cannabis sativa
  modified_base (286)..(291): a, c, t, g, unknown or other
aatttcttatattatttactaatggcgcgtttactaaactacaactagaatcagaataatcaattagagaaatgaatcggtttaaaataaaaaataatcgaaaagtaatattttattatgctgtttactgaactgttcagaaagaaaaatagaatcatattattttatttacataactaaaaaaggtaatcggaatgctttaatttgataaaattgctattatcagaacatgtaattattttctgtttataaatttttaaagggtatatttgtcttttttattttnnnnnnataaaattaaaattaaaataaactaagttaggaaaagaaaaggtattccctgtaaaaatgggggagaatatttgcttttattttctcgctatttggatgtgcctcactactttctctttttccaaaatttaataaatagttgtatgagaattaataccatattattaaacccaatattattaatttagaaggaaatactatttcaactaaaatgagaatttttttttatgtattttaaatttaatttcattctatttctatcatcattcctatatttttattcttttcaatcaaactgtaataattcataatactcactacaaaaaattgttacttttttagtgacaactttttagtcacaacatagattttttgtgact

SEQ ID NO: 108917 - DNA, 710 bp, Cannabis sativa
ttcaatctcaagcactgttatcttttgctggtagtgatataaatctgtggcacagaaaactcgggcatcctagctcaaatactctaagacaaattctatctcacatgtcattgcccaattcattaaaagaactaaaattttgtgatgcatgtcaaaagggtaaaagccataaaatgccttttcctctgtcaaatagcagagccacacaacctctagaacttcttcacactgatgtgtggggacctccacacacaccctctatagatggttttaggtattacatacatttcattgatgattatagtagattcacatggatcttccctctcactcttagatctgaggcctataatgtattcacccgttttaagacacttgttgaaaaacaattttctttacctattaaatcggttcaatctgactggggaggagaatatagggtgtttgctaatttttttgcaggaatagggtattatctttcaacatcattgcccacattcacatgagcaaaatggtcgtgccgaaagaaagcatcgtcatattaaagaaactggtctcaccctattagcacaagcaaatcttgatatgtcatattggtgggatgcttttcagtgtggagtttacacaatcaaccgaatgcctactccaattattgacaataacagtccctaccaagtgttattcaataaagttcctgattacaagtcctt

SEQ ID NO: 108918 - DNA, 549 bp, Cannabis sativa
attgacaagtcgattagagagtttggtagtttgcatagtatagttaggcaaagacaaacccacagatttaatgagtgtagcacggcccaccttggataacgtctttgcctttcatccctgcagtttaaaggtgaggttgtccaggataaagttgaagtcagcatccttctgtcttgatctaaaaagtgctaggcccaaatatttgatgacaccctccgaagaatcaatccctagagcctccttgatacctcttcttacaccattaggggtatttttgctgaaaaagattgacgttttgagcttattaacttgttgtccggaccaaaagcagaatttttcaagacaatcccaataaccttttgcctcatttagattggccctacccaccaggataaggtcatccacaaagaaaatatgagataaaaccgaaccacctctactcaatctaataccctttatagtgcccaaaccaagagcctcttccagaagcctagataaaacttcagcaacataggtaaataggtatggtgatagcgggtccccttgccg

SEQ ID NO: 108919 - DNA, 504 bp, Cannabis sativa
aaaataatagtaaatagtacaaaaatcatttatacaaaagataaaaaaaaaaaaattacaaaccaattattgagtactatatcaatatgagattaagcacattaaaaatatcaatagcaagtacaaaaaattatttaccaaaaaactagaattaaaaaaaatttaaaaatatacaaaaaaaatggtaccacaccgatatgacattaagcacattatcaatatagtagagcatattaaaagcactaataataagtacaaaaaattatttatcaaaaaatagaattaaaaaacaaaacatagaattaaaaaaaaggagtaaaaaataaacttaaaaaaaaacacaaaaaaacaattgtgaatttatattgtaaaaatgttatagatatacataattttaaaaatttttgctatgatttgatatgtaagaaacatatttctatatatatatatatactagtaaaaagttacgtgcaaggcacgtatactaaattttatgttagtttt

SEQ ID NO: 108920 - DNA, 921 bp, Cannabis sativa
tatttgttagaggaccacttatatatgtatatatactttattataattatttaattttcaatgagtagtcttcatcaaacaaaaatatctccctcccaaggttaaaaaaaaaagctataaattcagacattgcctgtaaatttttttaatacaagttaagagttttcttgaatacatatatatctaaattaggcaaagaaagaaaaaagatcaagaaaaaagaattaatggagtactactctgtgtatagtatgttgatgagaagcaataagcgcatttacaaagaatcagagaatagttcatcatcatcaacatcatcagttcaacgttataataataataatagttcagcaaatcatgagaagggtagttcgaatgatgatgaagccattgatgccattgatgctaaagctgcaagctatatattaggtgttcaacaacgttttaaggttgaaagggttatgggagctgctaactaagctggatcatcatcacatatatataatattatatatatatattatattaggtctttttcttatttatatatatatatatagagagagagagagaggggattagttaagctaataaccttgatgattagttaatatatatgtatagtactttcttgaccagaatatataatagcatatatatatattaagcgtttatatatttgtagtgaaagtcaggtatgtatgtatttatattctggttgatatttagtaagtttcagtgtttcagcaaagttataataagtaacaaatttcaagatttgtggctttttttttattggaatgttatatgttaattcaagcaatggtttccatcttatgattaaaagaattattggtagttaaccacttgaggctagctcaagtgaccataggtgggtgtgtgtcttggaggtcttgggtt

SEQ ID NO: 108921 - DNA, 679 bp, Cannabis sativa
  modified_base (146)..(152): a, c, t, g, unknown or other
ttatctaaacctatggcttgtggtatgtctggtaatttacttactctagtgcaagtgacttacttagtaagatgctggaacaattttttctaatggctctctataagaagtcttttggctcctacacatagattttatttatctannnnnnngtttcaactattccagaaaagataaaggccaagaaaagaattccttcaggatcaacagtgagaggtctcttatatgcattagatcaaacacctgctgttgagtgggagttatgagtaggtatcagattaagccaggaaaggaatattggaaaacaatcaaacaaatcttaagatcaataagagtaactatatgttagtcgatatgggtagtattttaatactcttagactacaccaaatcagatttctagacttgcgttaatgctataaagtctactaatgagatggtgattactcagggggtggagcaatgatttttgttgaagtgtaaaaaccaatctggagtctctaactctgccagtgagactaaatgttaaagttgcatgaaggatacttatttagcctatggaatgttctatacagcttttggcattataccaataatgaattaactactagtgttgcttcctaacaaacacagaaatagttgccaaaaagtaaagaatccagtatccttagaggagtaga

SEQ ID NO: 108922 - DNA, 523 bp, Cannabis sativa
ctatgctagttaggatgttacaatcaacgactgtaagaggaaggaaaaaacttgttgaaatttatcctaaacaaaagaatatttcaatttttgaaataggagtcattttaaaaaaaaaaattaacttcaaaccaatctttgtttcgtccttgaaaagtttcacgatttttcgagatgtgtagggtgagattttagcagaacactaacgagtgtaagaggatggaaaaaacttgctaaaatataccttgagaagaagaatattttcaattttttaattaggctgcaattttaacaaaatttaactccaatccaatcttcatattcatgtcttagacgaaatgccacatatacatcaccaacaacgcaaaaacaaattttgcatgtgttgggaaatatagtgacaaacgcaattcgtgacgaaattggtgatgtaaaattttctgtaatagttgatgaagcacgagatgaatctaagaaagagcaaatgtcaattgttttaagatttgttgataaagatggttat

SEQ ID NO: 108923 - DNA, 1896 bp, Cannabis sativa
gtgacaatagtaattgttccatcactagaacaaatccaaaatctgtatttcaatctttataaattttaataattttctggttgtttcgagcaacactattatttagacaaattgatggagtttaaaacttttaaagataatttttacactaatcttgaataactgctccaccccagaataaggtctttcttagtttttagattatcttgaaacacatgtaaatctataaatctaagtttaaaacaggacgtagctaaaattgtttggttatgtccttatttaatcctgaataaaattcttttactccttattcttcccactcaacagtagatctttggtatgagtatgccaaattatatttaatacctcttactattgatctcttttaagagttacttttattgttcatcatcatacttggaatggtatcaactattccatacaaaaactataatcctggagatcaaatgagttccttagggtttaccattaaaattactttttagcattttacaaagtaatatgcatatagaaaagatgttttgatctcttctctaatatgatgattctaatttaacattgcttcaaatgtttaaatatcatctataagaaatatcaaacacactgtatagtcttttatgtaaaaataattttctcaagtcattttacttatcttggaaaatatattttatcttgcaacctttaagccgtaaggtcttctcatgtaaatgtttagaccatagtgttctagactataatttgtcattataagtattttctaagtggcagtgagtcaagttttcacaaaccctcccactacttcaaagtactatgactttgaaggagatctcttagttgttttcaacaaacatgagataatttaaatatcatattcgattgtaaataatggctaaacatccataaaataattctacttataatgattaaagaaaattgatatccttcacccctgatcactttagaataactagagaattggtatctttagttttcctaaggatattggtgaggcatatacttcaaattttgaaatttcatttatcttacttattatgattttgtactgatatgtttaagtgatacatttataatgtgattattgataataaagaatgtttgaactgcataacaaattaaaggcaaaagttttctccacccatatcagtttaaaagacctttgaatgactttaactttgttgaactagaattatcttgaattaattcaaattctaatttaaacaatatctaagtagtagtctaagaaataactaattactcataactacttctggaataatatttccttaagcatacatagcatccaagtgtttatgtagtagtattctctttgtagagaattgaacttgttaataaaaaattaacaagattcaaataccatagataacaataattataataaagtagattgaataaaaataatttaaagtaaatgttattgtcatgagtaattggtcatcaaaatataatgtttatttcatttttgcaatcacaatgatatccattaaaagaacattaaaattttattaaattaatactccaaattgtcataatgattgtttgcataataacataaataataaatatctaaccaattaaatacaataaatattgtcttaaaatattaaacaattattctaaaattgaatttggcaaactttattttcaagttaaatgattttaactttgtgtcaaactttcaactttgacccgctgggagcaaaatcccaagtcttaaccatccgtagttgtaaataagaatacatacatgtttagtagatttagaaaaaatgatcattctatataaaatatgaacaaaagagtaagaaataccttgattctttgcgagaaacttag

SEQ ID NO: 108924 - DNA, 642 bp, Cannabis sativa
aaattggttaatttatatttatttattttaaaaaataatgttagtaatttattatcagttcttatatagaacccaacagactctcttctgctctccttaaattttgctaattttgggatatttgggagttcatcgcaggagcaacaatttttttcgactcctattctcaatcaagctcagctagagaaccgaacacttggtttatcgttagatcaactatatgtttcttctccgccacaactgttgggatctccgaatggtaataatatgcgtatcaagactttataacccaaaaccttaataaagattttatggaataattagtttatgcttttaataatttagtttaattttgagacattttaatagtgttaatgttgaacattgttatctagtttaatttgagatatttttatagcattaataaatattgttggtttgttcaaaaaaaaaaatattgttggtgttaaattataatatttgtaattggttaattatatttaatttttatttatatatttataaataattatttatattaatatttatagatttatatatttattaaattattttatttttaattgttattgcgatgggatcctcctattaacgcctgcagctattaatattaggctaatt

SEQ ID NO: 108925 - DNA, 517 bp, Cannabis sativa
tagtaaatctaggtcctcgtaaattaaattcctacagctatcacattggtacgactagagtaccgagtataggctgatattttggtcaatagtaccattgtacgaccgttctagacttagtaccgcctcgggtgcggggatagggttacagttgggtgtatgggcgcctaattataattcatgatatgtatttatgattatgattatgcttttcttactgagtttgtcgactcacagttattatttgtatgtgtaggtaaaggcaaagctaaagctgagtagccgtgagtgagagtggatgaagattgtacatatcggggcggttaggcctgaagcgtacaatctttaggagagccggctatattttgtatagtcgctaggcgacaacttttgtatctagtattttttatcacaactgttaatattttaaatttgggatccggttatataaaagttatttattttcaagttaatagtaattaagtaaacttttaattattcacgattttcaataagc

SEQ ID NO: 108926 - DNA, 533 bp, Cannabis sativa
tttaaaaaaaatattataatttttaaaagtaatttatttttaaaaaaaggaaacaaaattttgtattagtcaatgtttaggatgtaaaaatactaatttttaacggtaaaagaaacagaacctaacagaagaggcataattatgtaaatgttatattttagggagaatttttaataagccgtatattttaaggggcaaaactaggtagtgcggaaagttcaggggctaaatatactaattatgtttttaaactaattaagagaataatttttaacgctaatggggtgaagattctccatctaaacacgtaacggagtgaggatagagattatgtttaggattgaaaactattttatgtttttgaaaattaaaatggtggggtctacctaagaattcgttgagtgttttcaaaaacaaaattgaatactattttaagttttaggctaaaaaatgaaaacaccatttttatgttttttatgttttcaaatcatagaatccaaaaactctctaattattctcttacttttttattt

SEQ ID NO: 108927 - DNA, 616 bp, Cannabis sativa
cctcttcctgagccatattgctgcagtaaatggctgatttctgggggtttggttgcagacccgaagagatggagaacaatttcaaaccctggagcatatacagaatgcttttgaaatccccattacagaagagcagtacatcatctgcaaatgccagatggttaagcttcaatgctgagcatctctcatgataatgaaactcatttttgtctccaacttccttaagaattctagataagtactccattcctagcacaaacagtaagggtgacatggggtcaccctgtcttaatccccttcttgcctcaaaaaatccgtgtacagagccattaaacattatggagaatctaggtgtcctcacacaattcattacaatctgtatgaagtgagtagggaattggagccctataagcatctcttctaagaactcccagtcaattgtatcataggctttttgcaaatccagtttgatcatgcaatttgccttgttggtcttccttccataatgcctcactaaatcctgacaaatcatgatattatgtcctatgaacctgccctgaataaatcctccttgagtgtttgaaatcaactcagggagaatccatttgattctaga

SEQ ID NO: 108928 - DNA, 680 bp, Cannabis sativa
gtaattagtagtttcccatttagtctcctaactttgtatataaatatatactattttatggaatacaacacataattctattcaccattctaaattaatatcgggtcccacataatttgacttaataaattatataagaaactgctaaccaatcacaatgagctatattggtatggtattgggtatcatatggtgtctaacaacaatattcttttattagtaagcaaaggtacgttttttgtcaataatttttttaaatatatatatagatatattattgatttcaattacacacatagtatttaattactaaggtagtctttggttggaagtaataaaaatataaaaatagaaataagaattagaataagaaaagaaatggtatgaaattaaattttaaaatgtataaaaaattgacaaaaatattatcaattttttattctatttcgaaatagaatagccatttcaccaaaatgatagaaaatgcattctactagaatggcattctaatactttaaaatataacaaaataaataaatggaatacaaattatttttttttcttcatttcattccatttattacctccaaccaaagaccacataaaattttattatggtgttaagacttggtaactataagaaagtatatgagcattgctctggtacctaacaccacctt

SEQ ID NO: 108929 - DNA, 555 bp, Cannabis sativa
attttcccactcactcacctcacccagcatccagtccaggttaggttgagttgacgacgttagttagataacctgggggcgctgcgctggatgtcaacttgggcgctgggtgtcaacctgggtgctgggttgtcaactttggtactggtattagagcagtcttcaataaaattgccataactcactcaagattgattcaattgacgtgattcaacttgcgttttgaaactatttcaatgctttatcaagtcatgtctcacactacaatcacaattttgaagttatcaagtccaaagttcatcctcaagagagttacgaatttaagctacaacttactcgaagtgggtcccgtagacgcaactcaagctctaaaaattgacgaccaaccttcagagtcaatttcaccattagatcatcatatcaacggaaaaaaatagcctaaatgtattttttcatatgttttggaatattttattattattttttaataagattttcttccctagaaaataagagcttctctagttcatttttcacatttagaaaagtgcccat

SEQ ID NO: 108930 - DNA, 540 bp, Cannabis sativa
agctttccccttcaacgcatcacgccttgaaggcggtttagtgagtggaccccaaacaaaacacaacataatatatcaaatttgatccaaattctaccgaaatttcggcagcataacagctgtaattgaatgcccccaaaaattttaaacatgcctgtataatgacaaataacagtagtttattaatccatcccaccacagcacatatattcgcagagcctacttcactatggttgaatattgaagatattcaaactccactaattattaataattaatttataacagaagttacctcgggtgttacaattaagtgtttaggccaacgaaggaacatgttcggtacttccctaacatatctgcgcccttcaattcatattgggatttcaacatcctcttgcagcatttccgaaatcagaacccggacatgtgaataatcgtagttcgtgtagtgaacagtgattttaccaacatgcttgtaaagatatgctcgggccacaatgttgtcgatattgtcagagtagagatatacttgctgat

SEQ ID NO: 108931 - DNA, 508 bp, Cannabis sativa
  modified_base (205)..(212): a, c, t, g, unknown or other
tatggcttgtccttatttgtttaaagtagttttgtggtatgctcaattggcaagagaagtgatttcttttgtgctcatgatttctacttcaacgaccttttcactttaaacatgtcatatttggagggcctacactaatagagaatttactcataactttaattttatatataattttttattttgattttcaacaatttatatnnnnnnnntagtatgttgttaatagccaaagggtaatacctttggctagttattcttagtaattttattgttttttttttaattttttagtattgttgagctagtgatatgagttgcgtgtttatttcttagtttgtatatttatttttttatttttttttatttttttcttttattttgaagattgtcattctaatataactgtatttttggtttgttgttgtattgttttttcagtttcgctagctctggagaaaattattaataatgagaaggtattttttcaatgtgatgtggtgctgtt

SEQ ID NO: 108932 - DNA, 587 bp, Cannabis sativa
  modified_base (219)..(220): a, c, t, g, unknown or other
acacgagggcctacacaaatgaattaaatatccaaactaatggatcaaggcaaacgattggccctcgaggttaatgataaaggacaatactgcggcaaaagctatcaaaagctcgtatcaactctaggagtcagatgccgacagaagatagggttgtcctataaaaattggaaagaagtcaacccaattctgaaaaataaagtttggaaagatataaanntaagcagttatttgttagaattttaatttatttttttattaattcaaatgttcactctaaccgtgtttgttttccttcaaactagacggggttcattgtgctggattccttcaaacatgattgtctcatcctaactgggaagttaatgaaagacttcaagaataggatgacaaaagacatcataatgcccgctgttcaagagaaggatctgggacgactgacacaagtccctgaaaagcaccccgagattgaccatactgattggtgcatttttgttgaaagtcgactaactcctaaatttcaggtacgctaattatatttgtactaagataaactctgaaatacaagtacatgtatctaatgtatt

SEQ ID NO: 108933 - DNA, 539 bp, Cannabis sativa
ttttttttttttttttcagattattggtgtgtagcttttatttttgttattgcaatgtggtgttgaaatcgatttaatttgcacattaaagtgtggttgttatattatgttaaaaaaaaatgtggttgttattgtgatgttttattgttgttatttagttgtctaaataatataaaaataataatatgtttagtttttcatgagtacacgtattaagactgcttttgtgttgttatacagttatttttttgttgttaattagctgtttaaacatgtattaaggttgtgtatgtgttgtgtttatatttttttaaggttgtcgactgtattttattaatgtcaaattgatttgcatatttttgttaattagtgttgttgtatagttatatttttgttgccaaataaaattaaaagtcaattttcatatatatatttgtgtttgttttatatatatagttatttattttctgttagttaattatttattgctattaaatatttaactaagagaaaaaaaaaataaatacatatgtatatat

SEQ ID NO: 108934 - DNA, 534 bp, Cannabis sativa
  modified_base (132)..(132): a, c, t, g, unknown or other
aattatattttgttgagttagttatgattaattattatttgtttttgagtattgttattaggcaccagtggtgtctagcaccttcttgacatgttttgttataattggctagcgatactccctaaaagctantatattaaactatatgggacccgatacttagttggaccaatagcgatattaaaaattttctccaatgccttaaaaatgttaaaaatttgagatgaaatctaggattaagatatagatttgggaaatacaatagtgacaactacaagtgaacaacggtaatgacaagggatgttatacagtgatgacaacgagtgagatacaatgatgaaaataagtgagatacaataagacaacaagtgaaatataataataacaataattttgaatgatcgagatatgaaaataatatattatgagaaatgccgtaattttcttttgcaccaccttctttatttatttttataaaaataatttattttaacaaaacaatttaaaatgctacatataataaattttaaactt

SEQ ID NO: 108935 - DNA, 2077 bp, Cannabis sativa
ttggttgtcgatcgacgatggaggagcaccatcctgggatcaagttgaaggcctggccattgaagcggtgggcaatatgtcatctgataccatatgagaaaaaagagagaacagagtgaaaacagagcaagaattttattatggctcttcaatttgagtttacaaaggagagatgagcttatatagctcagttcagacaaggaaaatcagttggaaaaataaccaactgttaaccgaaagattagctacaaaatatcaagattaacaacccaaaactaatcctaactaactaagtccacttgttctaaaagtaggatgtttcatgtgatatcattttctttaggttgttgttctccatcttcaacttaagtcatatatgctcagaggaaattcgctacaacatccattgctatgcaagacacaaactctagcttctggctcgggtcaaattcattcaaatgtttcaactgcgatgtttggttagaggtttctttaaggtaagtactgtttgagtatagctttagattgaaacatctggagtcccttgtgattgcctgccaacctttttgaattccccttgtgattgtcaatttactgcaggaattaggaaattgaccatatttttagaattaataccgggtaatagtaggacaagtcgtgtcaattttagcttactatttggttagtttactctttttttttcttcttcttttttaaattataatctgagtaattgttggttgtatattttttctcattttgtagtggaaccgattctatttaatttgtctcagtatcgggaaccgaactcttcttttttttttttaataagaatcaatttctgagttattgtttgttatttatgtttacttattttagtatggaaccatttttgttttaatttatgtatcaatatttttagaattgattcattcttttatggtatgtaaattataactagtttctgagttaatgtgtgttatttattttgtcattttattgtagaaccggttctattttaatttatgtcgcagctgttttttttgtttaagtcatttcagaaaacgaatcttgaattatttatttcaaaaactaattttttaatttaattaattcaaggaattggtttttaattcagattttttaaaaactaatttttaatataatcaattcaaagaaccagttttttatttatttattttatttaacaaatttttttgcgtaagtttttatcttctttgctttactgaactaatttttttgtctcaaatttttaactagttgatgaatataactagtctctttatattatattttgagttattatgtattatttgttttatttattttgttataaaatcggtttcgtttagatttacacctcagtatttttagaattgattccacttttttttggaaaaaaaaaaattataaccgatttatgtggtattatgtgctattcgtttttactcattttgttgtagaactagttttgtttttaatttatatttcattatttcaaaaattgatttcctctttattttattttttttattatatcatgagttattatttttattcattatgttatagaacttgttctattttcaattataatcggtttgaattatgatgcgttatttgtttttattcattatattataaaaccagttctatttcaatttatatataagacatctacttccgataattttccgacaaatatatcggcgatagtaactttttcgttaatttttccgatgcctaaaacttctccaactactttccaacgattcttattattagaattttatcaaatttatttataatttttttgtttagtttcttatattttaaactttgattattttttaatctcatatctttttgcattatgtatttatccatataaaaataaactctaataaatttttcaatatttataaaaattcccccttttaaaagcaatcaagagaaccggtgatataatcccaaattcctcccaaacatgaaaaaacttggacttgaagttttaatatattttttcactggtaatataaaccaaattttatatatt

SEQ ID NO: 108936 - DNA, 656 bp, Cannabis sativa
tcctagtgaatttgaaataaaagccttatctaaaaattctagaagaatttaatacatgtcttaagtgatataaatttaaagtcgcgagctctatatgataaaattttttgtagatatgtaagtaaattattatttgaaaaacacatatgcttgtctatgcaatataaatttgtaaattatacgttgtgaattgtgatagacttttgaagagttttttgattatatataaataattgaagaacaatttttttttttttttgtatattagaaaatattaaatgtatatagtttgttcattagtagagaagtcttgaagtacttcatatgtatcaattattatagatatatgatcatttgatatgaaaataaagatcatacaacaagaatataaaatatatatggccttggagagtactatcaatgtcgcaaataaaaatttatattatcattaatgtattatgttcatattacttaaaatttcaaacttaataattgtggatcgtaagtgcatgaggaggggacatattcatgttgtactatttttctcttagtttaagttttgtaccattgggttttcctgacaaactttttaacgagacaacttgcaaataattataaatatgaaatatatttattctatataaagtgtgtctata

SEQ ID NO: 108937 - DNA, 748 bp, Cannabis sativa
  modified_base (144)..(155): a, c, t, g, unknown or other
ataacctattatgttgtttcttgggacttaccttttagtacaacctttgagctaacttaacaagtcataatattagctcaaataggccattgagctgcatactcacctaggacatgacgtacaactagttgagagtcgtggtgnnnnnnnnnnnngttagcccgcacttcgtgtgctagcctgaggctaacattcagagcttcatattcaaccttgttgttagaagcttaaaacagaccttaatttccatgtgcatccattgcctccaggtgtcttgagggccatggcagcatcgggcaagtggtcaatgcaccttctaggttgagttgtcttgctcttgctctcgctacttctttggttcttgcttttctcccaaacctttagagctttgaggagatatacttctatgtttatccatgaagctggcgagagcttttccttttatggcaatgctaggtttataggtggccttatattggtcgagcctcgatggtccacttgagtggtcggcaaggtgcttcaggttttggtgacacctgtcaccatagctagttggcctgtatttcattgagagttttgatagaagagtgaagcatgcatacttttcctccttctcccttagacttcatggcatgagagaatctttgaatttccctttttttgcaattattttgttagagccattgttggtgcgcttgcctcccatattctcattgttggacagttggcagagatcgtctgtgttggt

SEQ ID NO: 108938 - DNA, 583 bp, Cannabis sativa
gatttgaaacttctcgtatgttgtatcatttaatccagatgatgaggaaaatgcaagtgaactcacactagtgtcttctaaattgttccaccatatacaaggaatattgtgggctattatgataaagtgtataatgtgttcttgtttaattctcaacacatgagcaaatataatttgagagagaaaactatttttcttttctcttgtgaatttaaaaaaatatgttgtgaaaatcatcttttgatttttcaaattaggcttccatttataattgttaaatcctcattaattaaattatatttaattatttaaataaataaaaatctataacagatttcgattactgatatttatgaaggagtctctcaactacttgagagaatatttcaacaactttaaaatatctttaaccacttttcaaatttaaatatttacctaattgaattaattaattaacccaaaaagataaaactaatagggacaccctactataagggtaggcacctatcatgtttgaattaagacaaggaaggtgtcttttgtctaacaacttttatctcaacaaatattgtcttgacaaatt

SEQ ID NO: 108939 - DNA, 572 bp, Cannabis sativa
ctttctctaaattataatattacataatactaatatttcataataataaacataatattgaacattaaatttattgagaaatgatctttacactatataatacaatataaatataaatagtcctaaagacattacacaaaattaattgaattacaaaaatatatttaagaaatttcctttctaagagcttttagctctcaattcacactaagctctcagctctgaattcacccttttattacttttaaaagctttaatgtctccggtcagtcacctttaatacaaatacaccaacatgtatatttacaaccaatcattaataatattgataaaaatacgtagtgtagaatttttttttaataaaagaagtgtaatttgttgtagtctattagttataaaaggttatttccctacatattccaaatcccattactttgatctgtctcagggccggctagagggtgggacagctggggcctcggccccaggccccacaattttggaggtcccgaaaaaattaaaattaatatatatacatataaaaatgtataatatataaatacttaactcaa

SEQ ID NO: 108940 - DNA, 1145 bp, Cannabis sativa
tgagttgagaccttcctttgaatacactgaatcaccatgtcactacccagatttgaagcactaaataaggacgagaaataatccacaactacatcctcaaggtcgttctcccactccttccaattgccactagaatccttaagcttcgagatttgattaaagcttctacgattactagccgctctatggaaatacttactgttctgatcgccttccttcaaccaaaattgctttgccctctgcttccaaaaaatttctttttggtccaacaccaaaaaaagttcctttttcttctcattataacgctggaccgagagtgcatccctcttgttcttcaattttttcagctcatcacgacaatgcttgattcggagtttgaaatttccagttacattcttcccccaggtggccaacttatctgcacaatgagtaatcttttctgctaccgaggcgaggttagagccattccaacaatctttcacaatctccaaacacattggttccttcaaccaagcattctcgaacctaaatcgcctatttgggatgaaaacaaccggagcaacaaattcaagaaagataggcgagtgatccgaaggagaaaattcaaggttgattaaacgagcttgcgtaaaggtttgaagccaagaagatgaaacaagagcacgatccactctaacttctatccaccgaggcgttccccttccttttttcccaagtgtaaggataaccaatcaagtccatatcatgtaaatcacattcctagataacttgctcaaacccagatataagccaatttggatacggttgtcctccacgcttgtcactttggctaagaacattgtttaaatcaccaactacacaccacgggtcacttgagttgttcaacaatgatcttaaaaggttccaagtatccatcatttgttgccgttggggttctccatagactcctgtaagtctccactttgggttaccatcaacttctaccataaagtcaatatggttttgagaaaagccaattattctaccatctttgtcgtttttccacaataaagcaagaccaccactcctaccttgggcctcaacagtaaacatcccttcatagcccaacccccggcccacataatcaattcgagctttattacttt

SEQ ID NO: 108941 - DNA, 877 bp, Cannabis sativa
ccgtaacccacaccgcgaacactcctacctagtagtactggaaattactcctaatattattaagtgtagcttattgcctttaaaaagttgcctctaataattcactataaattagaggcaaaagtacttaagtaattgattttgctataactaaatattttaaaaaattattagcaaaattcgtaagtaaaattattttatgaaaataaatactgatataaaaataatttaaattaactcttaaaaaataataataatttaaattaaaaattaatatttttttaattattattattattctttttaaaaaaataaatatataattaaatattattataatatgtataaagttttaattgcatacaagcatccctatcgtaacagtatacaccttatatcttaatgaccacatgatctaaaatcaatggttaaaaaaacttccctatcggtagggaacttatgttaagttgaatttcctaatatgagatatttgattccgtatcaatattttatcttcttcatagttgtccattttaaagttttctgtattttgtttttctagatggagaagttgactcttagcttagttttgtactaaaattttatataactttagagtagagaatgtttattgaaaaaaaatcaggtcgtatggcattttagtattcatgattttttattggattaatcttataatattttatatgataactattaataatctaacattcaagcatatatcaaaatgttcaactctttatttaataatcataaatgtcttaaggcttttcaaggcataaatcctaacagttggtcacttaaggctgagatgaccagttagggcctaggtgatggtgttggtgttgggttttatgcc

SEQ ID NO: 108942 - DNA, 720 bp, Cannabis sativa
tcagagatagaaaagaggttaatattgaatgttgggacatataatacattggaaatggtaagtgtaggattaatctggacagtaccaacattaacaacctgaatttgttgaccattaggaagaagcacatgttgcggataattgctatttgaaaaagaagtaaagcaatttatgttatggcacatgtggtgtgtagcaccactgtcaactacccaagtgaaagatcgggtattacctgcaaaatttgatgcagctggtgtgatgatagcaggttcaggattggttttattgctgagttgttggctgagcaatgaaatcaattgttggcatctggtggagagatcattgttgagtgaggaagtctctgcatcagatttttcattggtgcaggaagcaagattggctttgcctttgttcttttcttgcttctttttgtcaccataaccggggggaaacccatgtagaaaataacatttgtcgaccaagtgaccaggtttgccacaattcgagcaagaagggcgtggtttcttgtttcttggtggattattagagctggaagcaacagctaaagggacttccacagaaccaagagacctttggcgttcttcttggattatcatggcaaagactcgagacaaattggggagtggttcattgagcaaaatttgagctcgaactgaagcgaaagactcatttaaaccagttaaaaactgaagaact

SEQ ID NO: 108943 - DNA, 773 bp, Cannabis sativa
accaccacaagatcaccagaacaatcggataacaaccattaattctggtgagattgaaaaaaaaagtgaaatcgacgtcaaataaataatcatgacaaaacaactgtaaaacaacactagaacaaatcaaacaaaagaaaggaaaacatgattaaaaaaaactagaaaatattttgcacaatctcaatacccaatgcaataacagttatatttgcaagctcgctcttaaaaaatcagaacaaaaaaactactgaaacaacacaaaaataaatgtaaaacaataagcagatataaccacttagaaaaacataaaagaaccacacacctcaaaactttttttctagtgaggttgtcaaatgtatttttaggagaaccaaaataaaaaaaaaataaccacaaaataaccatagagtaggaagaagaaatgaattctatagtctccatcttccacacccacggatagaaccaccacagcaccacgagaacacccaaaaaataatcattaattctagcaagatggagaaagaacagtgaaatcgacgttaaaaaaataaattatggaaaacaactgtaaaacaacactaaaacaacacaaaaaaaaaaactaaaaaataaacacagtatactgcagtatgaaacttataaaaatacatagtaaaaaatactgctagtatttttgtaaaaaaatatcaaaaattagtataccatgtaaattttcctatctttaagggattgtttcacaaaaacataaaacaacagaaaaattacaaaag

SEQ ID NO: 108944 - DNA, 628 bp, Cannabis sativa
tatttttataatactatgatattgtagtagcaaaattattattcaactaacgtgccgcttaattgtaactagaaatgttgaatgtcaatttgtacctataagaaactatttgccagtgtttttttgtcactgatcgataattacttgtatcttaatagtaatatgtggagaaacaaatgcttgacctctctaaaccaacttgatatcaactaatttagtatattaatataactaaatatgttataaaattttttttaaagatctttgtattgtattgacgatatgaaacacttgcaaatatgataaaagttattgtattgtattatcaaattataataattggatatgtcaagttttagagagttagcaagatatttatgcaactataatgcaactgttatgaaatattaaaaatcaaaacagtgttttcacgtacgtaactctatctacatgtctattcgtgatttaatatgaacaaatttactattagaaatctagaaaataataaaaatgcactgggataaacattaatttaactatagtattgatgtatgtttttttagattatacttgagttggattgtttgggaactccagttcaactttttgagatctgcattttatggat

SEQ ID NO: 108945 - DNA, 2176 bp, Cannabis sativa
  modified_base (1718)..(1719): a, c, t, g, unknown or other
ctacatgcacaatcccagtaaaggtcactggcaagtagtgaagtggattctacgatatatctatggtactgtatatatttgtttgaagtttaagagagagaagattgatggtaatcatcttgtaaaatatgttgattttgactacactagagatctggataagcattaatcaactactagttatgtgttcacaatggcaagtggaccaatttgttggagattaactttgcagtcaacagtagctttgtctaccccataggcaaaatatatggatgttagaagcattcaaagaagctatacagattcgctggttgactaaggatttgggtattattcagaagaacgtggaagtttcctacaatagtcaaggtgccatttgtttggcaaagaaccaagtccatcatggtcgcactaagcacatcgatgttcaattttattttgtttgtgaaatcattgatgaagggaataatattcttcagaaagtcagaactgcatataaccctacaaatatgcttacaaaagtggttacagggatcaagtttcaacactgcttgaacttgatcaacatctctcggacttagagcgcctagggcacatgtggaggaagcatttttagttttggtttttttgccaaggtggagttggttgggtttggctcaaaagtcaacttgtcttggagttgcaaagttatggttacacattcaagagtcaacttgtcttggagttgcaaagatatggttcaactttcaaaagttttgggacttactatattccacatctatcaagaagcatgctctctcatttattaaatattgttggaagatgagctacctcatttattacatatgggtggtagttgaagttttccttatgtaaatatggagcttttagaagagcattcaaaattcaaaagaggcatttcaatgaaaagaaacatttcgggtataactttgtataatcaggttcattaaaaaatctgagagagagagatcatatgtatatcaaaactttgggaaacacctgagagatattatttataggaaatctatatctgtattctgtatatttcctactcaaattaataatatcagttgcatcctgtggagtaggtaaattactaaaccacataattttatgtgtttttgtttaccgctttgatatatatatttattgttatctttcgctatttattacttccgcgaacaacagatatatacaacaaaaatattgtttggaataaactgaaaatgtaaacgataaaattgtacataaattaaacaacaactgtacaaaaaaaattacacataaaagcaacaaaaaaataattataaaacaactatagaacacctaaacaacaacataaaaataactataaaataacaaaaagataattataaattaacagaaaaataacaaaatatcaatctgttaaaatatgtaaatcattcataaattaactctgactaaactacaaaaattcaaaaaaaaaatgtattacttttattaatcatataaaagatagaaaactataggaggagtgcttttaatttttttttgtaaaagagagaaagagtgttaaaaaatgagaaataaaaatgtacacttattatgtatatggtttcaatggttacatcaaatatgtaaccacggtggttatatttattttagttgttggatcattgttaagcgattgcgattaatttaaaaattaaataaanntaattaataaattacctataacctgatactagcctgattttattaatttttttttatgatcaaaaaataaaaaaatatttgtaaagattagttgtggcaaatgtcttattaaatattttaattagaaaactaattcattaaaagtatataattaattataattattttgagtttaaaaatagaatatttacctgttagtagcttatttagcaggccatataaaaatgtaaccatcatagttacatttttaatgtaaccattgaatagtaactcatatatatatacaaaaataaaaataaaaatagcatgaggaaaaaaatagagagagagagttggaaaaataaaaataaaaaagggaaatatagagagaaaatataaagataaaaaagtaagctatttatttaaaaattgtcaaagctgactaaaaaaatataaagaagagttttttttttttttt

SEQ ID NO: 108946 - DNA, 627 bp, Cannabis sativa
  modified_base (453)..(458): a, c, t, g, unknown or other
agtaataacaagatctgagcttggatctccttcaagtgttggaattcttcacaatcttcaacactatgattgagtactaacttgatttgagtgggtaaggtactttatctctatagggacacaatttagagagagaagaagaagagaactcaaaaattagagaggagcctctcttttcaatttgctgatacagtagacttatgaagagttatcaggctatgagtctgtcatgttctatttatagactttcatctagggttagatttaaattatatagattaaaaaaaagataaaaatggcttaaaattcacttaaggggtcggccacttagtggaccccactaaattttaattttcccatttatttaataatttatctttttcttacacaaatgtcatattttaattttaaacattttaatgtcaaatatatttatttaataattaaaattannnnnnaaataaaatttccatttaacttatttattaattagaccttacaaagtatcttaattaacaaataaactcaaaagcctcttttcttctcaattaagctattccttaatgaaaattcataaataagagatagtcttatttaaaattctaattggttaattaaaactaatta

SEQ ID NO: 108947 - DNA, 510 bp, Cannabis sativa
ttttctttactgtttataattttacatacattttaagagaaatttttaattttaattcctacttttgtcatgtttccttctttccttctttagttagttatattcataattaattaaaataaaaatctaagctttcaataaattaatcattctttcaaaaatataaaaaattaataataatattatctagaagaaatcttcaaaatatagttgtcatactaaaatataacaatcttttattttagttaatgtcaatttctctattttcttaaaatgatcatattttatacacactgttctattgtcctagtccatatacagttagagagcatgaactaatggagcaaaaaaataatacacatctcgatcttcttctctctcaacaagcaaacaagtaaacatagtacaaaaatttatgtaggacttgtaaaattatatattggagaaaacattttctagtttaaatattttactaatcacctgtttacttaccagcaccaaaaaaaaaaa

SEQ ID NO: 108948 - DNA, 945 bp, Cannabis sativa
gtgttataacaaaactgtttatattttctgtatctattcttattcgaaattgtcttcaagttggttatattaaaaaaaaagttgtcgaaaatcaagctgagtgtcctatttttacaattttagaaaatatatatagggtctattttgtcatttatcaaaacataaagtccaatctataacttttgcaaaacacacagtctaaaataatatctaccttaaaacaaataatataaaaaactttcaacattataaatgtaaacatttataacattcagagacttaaaattaatgagcatcgatcattagtattatattcttcacatcctaaattgctaatgaggtagttgatggggttttaattaaataactgtaatttgatattattaatgtggtagttgattaattttttaattttatttctaaatagtgttgttgatatttttttcatccacacatgcattaacagtgagctaatatatatgtctatgccaataaacataacttgcagttcattctaattgcttaattaaatatatttatatataaaatgtaaacatttgcataattatattaattaatcttttttttaacataatattaattaatcttttaaggctataaaatgtggagatgcatgtttaagatcaggtcgggcatccgatccaatttaatatttttctactcactcgatacaattcaattagtaattggatttagaaaatcatcatctgatccgatctaattagacctcaaaatctaatctaattcaatccaattactaattagattggatctattttttaattggatatccaattaaaattacacacctaatttttaatatgaactttaaaatataaagaaaaataagtaaaaagtaaatactaccctttatttaagtttaatactctataaaaatattattgtgtgacagtcagtagtccc

SEQ ID NO: 108949 - DNA, 678 bp, Cannabis sativa
ttttctaagaaaatgactgagtctgaaaacaaagtagcaaagtagaggagatatttttttatcttgattcaaaagtgttctatcatcttattctatataagttggtccaacttcttctgttgtactgacacaaccgaagaggacaataccatttatgttcttagacagtaagtcacagtacctagtcttagtgggagggtttcaaggaactcaccctgttatgacttggaagacacttgtgattaaaatccattgttagtttaaacaagtaatggatagtcagaataagaaactaagatgtaaagccaagagaactatagttgaaaccattcatatggagtaaccaaaagttttctattacaatgacaagaaaggaaattttgaaaattaagtctattcaatggactcaacaaaacttccagttcctataaacctgtggcttgtggtatacctagtagtttacttactctacgtaacaccctaactatttaaggcatgttagcatgatttttaacgtactgtgcagctcgttgctaattaacgaggttattgaaaattgtgacttattaaaattttgcttatttaattaaaaacattaaatagcatacatatataatttcgagatcccgtttacaaaagcatttacaaaagttacactgtacatatagaaaagtctgt

SEQ ID NO: 108950 - DNA, 572 bp, Cannabis sativa
tccaaaaagtgtttgaaacagagaccaagaaaaaactcatcaatatccaaatttttataagtatcataataagttgcaaacctggaatatcgccaagctttccttaccctggagcaatctagtaaagcatgcttagtagtttcattctccatcttacaaacaggacacaaaggagaattaatcacacattttttaaacaaagaaaaagctacagggatagccttagataacaaacgccagacaaaaagtttaaccttgggaggagcagaagaagaccaatttttgtccaaaacttttttgattcagaaaaagaagaagaagatgggagatcctgattggaaaaagctaaatgataagccgacttaacagtaaaacaaccagaattctccttttcccagatcaacttatcatgaccataaaatccagaaacaagaacagcaagaatatcatggaccatggactcatcaaagtaggactgcaatttactcacatcccacgtgcccgaatcagtaagaaaaaaggacagagtgtgagaagaaggaggtgggttagttgaagtaaagaacttgaat

SEQ ID NO: 108951 - DNA, 666 bp, Cannabis sativa
  modified_base (553)..(559): a, c, t, g, unknown or other
atgatccacaattattttggtgatgatatatcccataagattattgttatcacttttaaaatatcatcgtacattatctatgatcatatgttttctatgactcttccagagtgtatgtgtggacttctaaattatggatgaggggttcttgcaacatcaatatttatccaactagttgtatcactcatgtgtgtatacaattttgttcatactaaaatttaaaaaacataacacattaatgataatataaattttcatttatgataatgatggtactccaagaccatatatttgttccatcttgttgtatgatcttaatttccatatcaaatgattatatatctataattcttgatgcatatgaaatacttcaggacttctctactaatgaacaaactacatacatttaatatttctcaatatacagaaagaaataaaggtttgttcttcaattaatcaaaaactcttcaagagtctatcacaacgtattatttacaaatttatattacatagacaaccatacgtgtttttcaaataataatttacttacatnnnnnnntttcatacaaagatctttatcatatagtaagcgcgactttgaatttatatcacttaagacatgtattaaattcttttaaattttttagataaggcttatttcaaatt

SEQ ID NO: 108952 - DNA, 2683 bp, Cannabis sativa
ctcctggtcgatctgcagctgtaagttctctcaagactggaataatgactcaattcaagagtagctttgtcgctgcttcatcaacttctcagagtcagggttcaagtaacagttcaagtgcacctgcaaacaagagaccagcattacgtggctttgtctctggtggttcaattggcggtgataatagttatagagctcagacaacctatccaagtaattatgccccagcatcggggatgaccaactcctctagtcagaacgctaatgaccagaatgcagatcaaaagaactcagaaaggtcaatttatatgcttctaaatatatactaaaatttagacatttaacaatgttgatctttctgatggttttcatatatcgttcatattgcagttcaagtgatagaactagagaaagacggaggcgctcaggttgggaccgttaagttggatggatggttcaacttcaaacaagaatagtttttctttgttatttaagatcgaaatcttggaatgcctgtataatttttcatgcgtggttagctatgtaatttctaaccgtattatgattctattatgattccatcctacttttcacactaaaatgacattactagctcctcagtgaatatgacattttctgtacttatattctgtatgaagaattttggataaggaaattcaaatgaacaagtcaaattgtcatagcattagcatgtttgccaaataaattaaataccaattgtcgttttagcgtcatcttaaggttttacttaggcttttgtttacaaatctctattattgttttgcttgggtacacagtatacaaaaaacaatatacttatatagatacacgattttaaatttagtgttacatttttcatttatgaaagctagaattatgtgcaacttgttatggggtctggtgtcataatgaagtaaatttacgaagccttagggcattggtcagaatttatggcaagttctcttcttctggtggcattagggcatatctccaaacaaggctcctttaaaatggcatcatcttcggccagtggaggatgtacaccaaatttaaactgccatgtttaatttaaagagtgtaaaaaagcaaatcaatctattctcaaataattctgattaaaccaaaaggagacataaacataatcagtttcatccatgggttcatgggccaagtaatgaagtagacattattatataatgactcagttgctacctggcagctataatcactgaagtttggctccatcagaagaggaacacccatgtaatccttaaagaaagtctggaacagaacagtaaaaattgcatagtgagcaatgtctgatttttaggcttttagccataaaaggagggcaaaaaaagaatttcatggatgccaaatttgacatgttaaaaaaattgcatagtgactcagaaatggcattacatatttacacatacaagatttgtgtattaaaaatttggaacatataatattaaatattatctcaactatgccatttgttgaccttttactcaaaattttgcatttgtaattaaactaattaatcaaagaaaaaaaaagacagacctgtgtgggaagcttacaggtattgatacaaatcccaacacatttgctttcctccaaatacttgcatttctccacaaacacctgttaaattcaccaaaaatttgtttactaatttttgcagcaagattcaccagttacaacttttatagactaaaaattaatctaaatcaattttgactcttttagttatttgtcatttttttcagaaagaataataaggtctcaaaattcactcacgccactgttgcaagagcttccatcgcctaaatccacagaattgacattacatcgtcccatgagccactgacaagtgagggcagtcacccttgcttttcaaaaccaaacgcacacacttcatcagttttcttaaatgcaacattttccagtgtcgcttttagcataaacgacaatgaatgcaactcactcaccgaccatgacagctgcaactctgccctgagccaagggtgacacaagcaatttataaaggtccaacaacaatggcggaaatagcgatctcagaatccgaacggcggcttctttagtgtctgaattggtcttgttcttcatcactagacgattcgccacttcgataagtccctcgtatccaggcttatccgagtcccacccaacctcctccaccatttttgtacggaagacgttgaggaagagctcatcaaacgctcctgctttgtattcgtgtcttacctgaaagaagaatgattggatttagaagtgaagcgaagttgaattttgataatagtaaaagattagagaagaatcgaactggttctgatgtagacgaagaagaagaagagaagactcgaaacgtaaaaggtttattattagggtttatgcggttatgtaatttgggagagaaagtattgagaggaagaagaggatgagctaaaggcagagacttcatttcactctcctctcttccgtggctgcttctcctctttttgttcctttattttatttttattttatgggaatttgtttatgggatttttttaataatatacttaaaatataaattatttacaaaaataccttaataaatctcaattacaataacaccttgccacgtcattaa

SEQ ID NO: 108953 - DNA, 3999 bp, Cannabis sativa
atacaaaaatggactaagtgatgtcaaaatatcacttaggcatcaaaaattacatccctgatgctttttctcactcacatgtcaatctgggcgctaggatgtcaacttgggcactggcccagaacaaccttcagtaaaacgaccataactcacttaatatttatccaatttatgcgattaaacttgcatttccaagctatttcaatgctctatcatttgttctcctacacttcaatcgcaattctgaagctatcgactccaaatttcatcccaagggagtgacaaatttaaactacaacttacctagagcgggtcccaccgtcgcgactcgaactctaaaaattgacaatcaaccttagaagttaaatttcaccattggatcatcatctacggtcaaaaataacctaaatgtagttttcatatttttggattattttattcatatttaataggacatccttcacctatataaggagagttcctctagctcatttttaaagatcagaaaagtagttataaggttagagcacttgtgaacttttatggtcgctaaaaattctcattgaactattgagattgttatatttaaggacttctgtctaatttcattcaattttactaattcgatgattgtttatgtactaaatcatgctctccagacttttatatttaccaaatcatgatcctctaactttgacatgtgtcaaatcatgtctctgaactttcgtccattgtagactttccttactaaaattggacacttaaatccaacaatctcaatagtttcggagaatttttaacggttctaaaagttcatggggcatgatttggtacatgtcaaaatttaagaggtaaaaatcttaattagcctagtttgaatttgaaaattattttaattggcattgttttaattatgctagaatgtttaactatacttgtgttattttatgagctacttttaaatttagtgtaacttaaaattcatgtcatatttctctatattaaataataatgcataagactataataacattttttgatagttcttactattaaagtacttttaaaagttagatactaagactaagagtatctcaaaatgaaaggaaagagtgataaaataaaatattataattttagataacttacagatttttaacaccttaaaacatgcttttatacagtatacaaagctcacaattgcctttaagcacgtgatcaataagttcaaatcaatcgcaagtgtattgtccgtgtatcaaactatagcagagaaaacatataaaatacataattcacagtaaaaggatattcatggaaattatcatatgtaaattcaggtttctcacaaaacaaaaataatttttttttctctttcagtaatatgatcctgaaaatcaatctaggtgcttgacattgaattttacctggagtcacattggattactagttgattccatgccagtgtttttgtgatcctctttaaacgagtgactatgaagttgccttgtaatagtagtggttgtgtccaagaaatagagaataaataccattatgaaagagcaaacaaacatgggtataggaccaaagatccagagaaagagaggaaaagaaaaatagaatgctcgtagtccaagagaccaaaagaagcttcctcggttcaaattccttccaacatactccatagagtctttcctgtcgttccatgtagggacagtcaccaagaaacttacatgggcatagtatcttatagactgtacattgcaaagaaaggcaactaggaaacatagcaagattgaaaagtacttgattgcagaaagagtaggagacttattgccgtaaactattacagatgcagatattttctcagagttcgaagtgctgctaacaaacacaccaatcaacgaactgagagtgattgctgttgttgccaaaagtgtagatgccatgatgttattgcgtattgtttgaacagccaaaacaccattcttcaaggggtcctgaaacaatcaaggaagtcaaactcctgaattaactctaccaccatgtatgtaaaggttccataaataactttgtaaggagcatattgaaacccaacttactcttttaaacatttacccacaacatgaaacacattggaagagaaagaaagaaagtaagtaaattaccttccaaccttcaagttattaattgaagtggtacgcaaaagtttagatgggcaattgataccacaagcgcttttaatttcttgtcattgtaaaaaacaaagactttttcccaaattacattaacaaaaacacaaaggatcatagaaagcgccgctaattcaatgcatttcatagtgattgtaagacattcttgcagcatattaatggtcagtgtaggtgaaatggtgctaagaacgtttatttgattctcaacattacttaatactagcttcactatttccatactgtctactcagagcccagaggccttattttgcctctaagctttttcaccgaaatatgaagacttagaaagccttataaaattttccccttctatcttatgatggtcttctcttggaaagcctaataattttaactactcctctcttattgcttttgctgatcttcttctgtctcactcttttctcaacctctccttcttcattccctaacattttctttatcctaaattaacaatacatcatacattactaaataaactggtggaaaacttcccaagttcttctccatcaaattaaagtaaagcataccttaataatccatctatccatcttaaattattaagagtagaatttttgtttttaaaactatcattcttattttaaaaaatagctgttaccgaacatgttttcgaaaatattttcactttcgtaattaagaaaccaaaaaattatttaaataattgttaccaaacacaacctaatttaacaataggtttgatacaggggcagctagcctatatacagtcaagtaagtagctaaacaagctcagttaacaaactaaactgaattagtatactactaaaataataaacgaaacaactaattgactgtcaaggacttgatcaattccagcacacaaccagctacttatttgttggctcatcaaataattgttccaagaacaaaacatcgcaggaggaccctattatcaataaatttcatatccacaagccatgcagagaaaatgtaatggtaactactttaagcagaagctaatatgaatctgatattcttattagagtattgtgatgactgtttttctagtaacttatagaaaattatgcaagttttattatctgcatagtctaatggaataagatacttgttcatggatggaagaaatccaccagaagttgcttttgaggtggatctattaaaatcaccaagggaattaggtgtttgcattacctattttttctagtttccaaattcttatcaattttttgtcttgtcatttcttttttaatttcttttttttttttttttttaaaaaaaaaaacaactaaataatcatcctatacgtttcctcgtctcaattttaaaatcctttaatatcgttattcatattacttaaaaaaagatgcagatcacaaccacaaatggcaataaaaaataaacaattggtcaaacgagagagagaacaaagaaagtactaacagacatcatggaaaagacccattggtggcgagactgagcattcagaccaataacagttttcctgggatggcgatgaataatgaagaacaaccaaacgtggtaagctcccatcagaaagaggcccagcggaacaagaataaagtccaaactcttctcttccatttctctcctttactcaccggctctgtcactcagcaagtttctcaaccctttccaaatggaaagagtatgtggaaagacgaaaccacactccgctaataactttgtcatatgaactttgctagtgttttattattaatattattcttattattattttaaggttagt

SEQ ID NO: 108954 - DNA, 520 bp, Cannabis sativa
gttcttctcaggcaacggcggtccttgaccggtcggcgaggaaaatggagggtacagaggaaggtacgttgcatggtgtgctgcatggtagtgggcgtccactatgctcaaaggacgatgatgtggcacagagagaaggaaagattgtggtcccaagtgaatttgaaaatcccccacgtgaagaatgtttgaatattccccccaaaaatatccttactgagttacctaccccagattttgccagtgtgggccatgagaatgaattgggtcttctccctgacattgggccctcattaatccaaagcttaaatatacctcatatttggacttgtaaatctcaaatgccccatcatttccctgagcccattaactttaaatggcccacaaatgacccccagttacaaaaactttactgtgatctccttgggccggactacaccaacttgtacaaggtccaaccatccttaatttcaaacccccctaatgtctctgaaatgattgttcatctgctggggtcaag

SEQ ID NO: 108955 - DNA, 508 bp, Cannabis sativa
agggttactgcagccattgaacataccagagtggaaatgggaagatgttgctatggacttcgtggtaggtttgcctagaacaacgggacagcttgactttgtgtgggtcatggtggacaagtttacaaagtcagtgtactttttacctgttcagacgaatttctccattgaccattatgctgagttatatgtcagagaaattgttcgtctttatggtgttccaaagtccattgtttcggttagagatccgaagtttacatcgagattctgggacagtctccatcaagctatggtactcagttaaagttcagcacaacatttcatcctcagacggatgggcaatccgagaggactattaagattttagaagacatgctacgggcatgtgctcttgactttgaaggatcaggggtaaagtacctttggtaagaaaggaaagcttagcccaaggttcattggaacttttgaaatcctagagaggatagggcaagtagcgtacaggttggct

SEQ ID NO: 108956 - DNA, 508 bp, Cannabis sativa
caagtatgttgaattaacatcctacatatgaatatctctaatatgatgaaattaaacacataagagtttagaaaaccttacatttattgcagctgaataatatgactcattcgttgagatctctagccctagattcttttctgtcgcagagcattatcaagatcaaaacctggatctctttctctccttcgggtttggttaccactgtcttacccactatgattgagtacttgacttgctatgtgtgggcatgggactctatcactataggctgactatgaagaacaatgaatgaggctttgaaaactgtataaaaggcatatctcatctactagttgtctgagaatgaaaattagatttggtagattaaaaagtcaagtggatgagatgagagcatcatgttccttttgtattttttcaactagggcttaggtttgaataatatggattaattatttattcaaaaaacttttttttaacaaagttattatttatttgatctaaattg

SEQ ID NO: 108957 - DNA, 1867 bp, Cannabis sativa
tccaagccaaggctctcatggggcgttgggagacattttcgggcaagtctccacagccccaaaacgaaaaacttggcttattttcccaacactagcttcagtctcctcatttatttcctgaatggtgcacgtaggcttttcctgataacttcgatcgacaagtacaaaatgattatcaaggtccactatcaagtcaaaaagcttattgtcccagtgagctttaagtgtttgcttttgtttaatcgctctatttttgtgacttcttttgaaggaggtgggtttgactctgacattcgtgtttgcttttgagggtcttcctcttcgtcgctgagcttgtattggctctagactttcaatcgtagccttttcattcatcctggttaccagtctgcccctctttcttctgatcgtggcttcttccaccgatcctagggagaaactcgagccgtctgcgattacattgggggaggttatcttaccttcgataatctgggtagattgattgtgattttcatacatattgaccgcctcttctgcctttgtgtccagttcattacatttagatggtccaggcccgatgatgatcccatccaaagtctttcgtttctttgggccgttctcataatccatggacctaaagtcacttatctccatgagaggattgaataaagatggctccctcatgtacttgtccaccgttccaagcccagttaaagtttgaaagcccatttcccataaatgtttaaagggccaagggataagttgggcttggctgccaagtaggcttgaatatgggtttattgtctttggatccagcttgggctgtcccaagcccactttatcttgggattcctggagggttgacttctttggtattttgggactactgttcgctgttggggggattgtttcagcttggtcttgagaagaaatggaaataaagtgattgtttcccctgcaatcatgcatagcagacaagctattggacaacagatttgttgcatccgatgcagttttaggtacggcgttgctgtcgacaacctgtatcaaagccgaaggcacgccggaggaatggtcactatctgggttgacaacagaggctaccgggtttggcaaatttgcagtcgtttttttcaccataaggttgacagtatcctcaaaaggacagacttcccctatccctggtaaggaaaccaccgaaaaacaactcacccgttcttcctccgtttccggcaggtcttcaaccacttgttccaccattcgtctcttccctggatattgatttcgttgttctctagcctcccaagactcaatggccttcatcgagttatccattttccaaatttgtttgaatttgttatccaccgtgaggcgtttttgtattatccactcttcaaaccatttaggcagcaatggagagaaaggccatcttgcatcgtcgtcgtatgtcatccatgagccaaacattgggaagaatgcaccgttgacatcctttataacagtagggggcttgaagcagaacttttgttcatgtgatatgacgccgcatatgagacagaacttggggagtttttcgtatttatactgtatccataagtccttgatggattgccttttcatatagaagcccgagaacagaggtttatcaatctcgactgtggccttgaatcgcagtgttcccattccaaacgagccccgctcgaagtctatgtatcgaggtagtttataggctgtcgacactttagctgcaagttcttccaagttatttttactccagtaaaaaggggggatgccgcttagtcttacccagaatggagacttgttgaattgaacttcggacggtgctagccatgatggccaaggcatg

SEQ ID NO: 108958 - DNA, 1318 bp, Cannabis sativa
  modified_base (101)..(101): a, c, t, g, unknown or other
  modified_base (150)..(150): a, c, t, g, unknown or other
ttcaattaatctcaacacattgatatcctgattaagtgtagtatgtagtattctctccgtaataggatctaacaagttgtattcattctccaccattacanttgtattcattctccaccattacacatccttagtcacaaaatccttganattgtgaaattcctccgtatatgtgtactcgtatagggatactggattctttactttttggcaactacttttgtgttagttaggtatcaacattagtagttaattcattattggtacaagccaaaaactgtatagaactttccataggctgaataagtatccttccagtaactttaacattcagtctcactggcagaattagagacttcggattagtttttatacttctctaaaatcactgctccacccctagagtaatcaccatctcatcagtagactttctagctttaacgcaagtctagaaacttgatttggtgtagtctaagagtattaaaataccacccatatcaactaacatatagtttcactttttgatcttaagattttcttgattgttgtccaatgttcccttttcttgaattaaatcgataccctctcattactcccactcaacagcaggtgtctactctaatgcattgcaaaatatacacgagacctctcactgtcaatcctaaggaattctttccttggcctttatcttttttggaattgttgaaatttttccttaaataaaatctatgtctaggagccaaaaggcctcttttagaattagtcattagattaactccaacatcttactaaagtaagtttcttgcacttgagtaaataaattaccaagtataccacaagccataggtttagataatctcaaagctatgatattaggatcaagaagttttgttaagtccattgaatagatttattatcaaaatttccctacttatccttgtaatataaaacttttggttactccatatgaatggttttaaccacagttctcttagctttgcttcttagttccttattttgactatcccttgattatttacactaacaatgattttttatcacaagtgtcttccaagtcataacagggtgggttccttgaaaccctcccactacgacgaggtagcatgactttttgtctaggaacattagtgatattaacctcatcggttgtgtcaatacaatagaggcaatacgaccatcttatatagaataagatgatagaacactttagaattgaataaaatatctcctctactttgctttgagatttagtcacattcttagaaaagtagtgtttttttgaaacaaatactttctt

SEQ ID NO: 108959 - DNA, 1070 bp, Cannabis sativa
acataagagggtgctaggtaccaccagtactctttagcatttttcatttaaaaaatattaagtactattagtgcccaataacaatgctccatttaataagtgtctcatacaaaatataggagatatggaagagtattgcagcatgtgggagaccacaccacgatcccctagtccccccaatcaactgcttagcctgttagaagaactatttgcacgtgagatcatagttggattttttattttttgtctgtcaagacttacgattacgacgtcgttttcatgtgtttggcatgcacaataatattcatgcaatgtgcgcttaccttttttatatatgcctttaggctttaatggtggatcaattcagatcggtggagtggaggatgcccatgttcatattctaattctatatacagctggtataattaatatatatatgtggaagaaacaagcagtatttataaattatggaataatttactgtataaatatttaaatttaatttttagttgtaaataaaaatttaaatttaatttttagcgataataatacttaagttatatttttagaattttgtaagtatctggtatttaaatgttaagtgattatctacttgttatttttttattagtatatttaaactaattttttttaaaaaaaataaataaattcaaattacacggtatctactttttatattctattttaatttttatctttattttactactctttaatttatactcaatttttgtaagttatatcctcattatgtgcattaagaactctaattttaataagttacgtaaagttatatttgatactttgattataaaaaaattatttatcaagtgaaattttttaagtaatatttgattaatatgtaataaaaaagagtagtttatttcaacttaaatattatcatgtgatagtatacttaatacttaaccgtcaagtatattccagaattataaatattattacagtaaaaattaaatttaaatatttatttacaactttaaattaaatttaagtatttttttaacttaagtatttataacataaattac

SEQ ID NO: 108960 - DNA, 653 bp, Cannabis sativa
  modified_base (623)..(627): a, c, t, g, unknown or other
gtaaacatttaatgcacatgtttctaagttttttttattgttaggcactcataattaaagataggtattctttgctggcaccttaaagattgttaattgtttgtgtaaggttattattgtaaataattttctaattatgtatattagtgaaaaaatcccaaacacatttgggctgattttacaatgtacccttctacaaagatatattgatctaccctctacttatttcggcatacaaaagaaattttgagagatttagaataatttataattaaaaaaataatgttcaaacagtctattttatacgcgtataaaataaaacaatcacgcgtgcaacacactgtttgaacgcagtttttggcatgttaaacttccctgaatttcttaaaattttataggatgtcttaaataattataatttataagaccataagaaaaaatttaactaaaaaattcttttggatactaaaatgaatagagatgtatcagtgcatcccttttaagagggcgcattatagaattttccaaacatttttatcctcccaaaacctaaaattactctaataatcagatttactaattaaagaaagatcataattcattctatgttgcatggttcacannnnntatttcatgattatacttaatgtata

SEQ ID NO: 108961 - DNA, 621 bp, Cannabis sativa
taataatttttaataaattaatttgtggtataaatatttaattttaactcttaattgtaaataaatagttaagtttaattttttacagtaataatacctaagttatattatatatttatggagttttcgtagatacttaaccgttaagtgttaaattattattcacgtgttatttttttagtagtatatttagattaatttttaaataaaaaataaaaatttaatgacctagaccaatcaagaactatcacgttggtcattgacttaacacttaacgatcaggtacttacataagttctgaaaatataacatgagttagagatgttatgacaaaactagttacggttactgcatctgttcatgataaaaattatcttcaaattagttatatcaaacaaattatcgaattaaactcagggtcttatttatactattttaaaaaatataagatctattttgtcatttaacaaaatatatgacctaattaataacttttataaaataaataatcgaaaatggtatcaactatttttttaaaaccttaagtagaatttagagatttgaacaccaaccttggttagatattgtatctaaagctaagcataatattcattagcaaca

SEQ ID NO: 108962 - DNA, 653 bp, Cannabis sativa
ttttttttttctttttcttttcaaggggtgtatgatatttatgtttttttttttttgataagtgaaattttattgaagaaaaggaaaaaacgtgtatgatatttatgtgatcaatatctctctattatttatatgacaagttgtgctatggtacaatatatttaatgtgaaataattgagcttataaactgttgtctttaataatatttatatgtatatgcataggacatagtaatatgagataggtgataggaatgctatttctattgtcaaacctggccgtctcaaagaatggtttatggccgtacatgtagagataaaagatggatattttgtggatataagatacaagtggtggtggataatagcatgtacaagttgaccaaaattttggacaaatcaacaaaaatgtttgaccacagaacacctactctatcatgtctaataccactataaaatctcattaatgtaatttatatatggagtctcatatatttatgattttttgagattgttattggatatcatctggtactttttatagggagcgtcttattattaattagcgatattttttaaaaattattttattaaattatataaaactcaatatttaattacacaaatagaaatatgataccgaagaaggtact

SEQ ID NO: 108963 - DNA, 2747 bp, Cannabis sativa
aatagaagagaatagactctaggagagagcagccctctcgaaaggttgtaattggagatactagcatctcgaaagctagattattcttttatttcatcattagtaaagaaattttctttgagggactttataattttgtgtaccaatttagatacatacttttattctctaagaatatcatatcacaatttcaatacttcagaagccaactagcaaatagattccaaattagtaatcatattttgtactattcaaaaccgtttaaggacaaacgatataaatctcacattgacatcattcgaatataccataagacaaccgatttcaaaatagtaactgtatattactatttgcaactgttaaagagaaaacaataccaatctcatacctggagggaaaaggaaacattcaaaagtactttcacttttcaaaataatgaggaagtacctgcctattgagtaaactattaaggcaacaaaaaaaattgaccattgaaaaaacaaccaacagattccaaaatagtaacgattatactattcaaaagagtttaagggcaaacaatacaaatctcacacctagtgacaaaatcgaacattcaaaagtacttttaacttctcaaaaatctaaaaaataagcgtctatcaagtaaacttttaagctaaccaaactaatatttaatatttgtagaagcaacaggcaacgcatttcaaacaaacaattaggcaatgttgttcgaaactgtttaagaacgaactataaaaatctcacatattgtagcaaaaggcatcattggaaggtacttttttactttgtggcaattgtctatctagtaaacttttaaagcaacaaaaacagcctaaattatgttttctttaaagaggagacaaccgtttatcaaataaatttttaaggcatcaaatgctaatttcaatatttcaaaaggcaactagcaaaacagattacaaattagtaattatattcagtactattcattattgtttaaagacaaacagtacaaatctcactcttagtagcataaggcaacattcgaagatactttttattttgtaacagttcaagtaaacaaccgtctatcaagtaaacttttaaggcaacatacgtcaattttaatatttgaaaatggccagcaacatattgtacttctaattgaggaagcagctgtctattagtaatcttttaaagcatcagaaaataaatttttgaaaagacaaccagcaacaaatttgaaaaatttaaatatgtattactgttgggatcaagcaaacaatacaagtctcacagttagtggcaaaagcaaacattcaaaagtaagcttttcaaaatctaaatttcaaaccaaccaaactaaattttaatatttgagaaggcaactagcaacatatttcaaaccaacagttaacctatgttgttcgaaacagtttaatgacgaacaatacaaatctcacaaactgtggcgaaaggcatcatccaaaggcactttttactttgaggcaattgtctatcaagtaaatttttaagagaacaaaaggcaatttatttgtttaaaaaaggaactagcaacaaactccaaaagagtaattgtgttttctttaaaggagaagcaactatctatcaaataaacgtctaagacaccaaaagtcaattttaatattttagaaagaacctatcagcagattcagaactcttaaggacaagcaacataaatctcacacatagtggcatatggcaacattcaaaagatctttgaacttttaaaatatctaagtaaacaaccaactatcaagtaaacttccaagacaacaaaagttaattttaacttttaaaaaacaaccagcaacaaatttctaaataattattctttgtcgttcgaaactgtttaaagacgaacaatacaaatctcacaaacagaggtgaaagataacattggagtgtactttctacttttaaagatgaggcaaatgtctatcaagtaaattttcagacaacaatagctaattttattttttgacaaggcaaccggtagctaattacataatcggaattatgtaacctttaaagaggagacaaccatctatcaagtaaacttttaaagcatcaaaaatcaatttcaatatttcacaaggccgtgtaaatctcatgcttagtaagcatacgacaacatttgaagatttttttattttgtaacaatgcaaggaaacaattgtctatcaagtaaactattaagataacacacgtccattttaatatttcaggataagaccaggaattgattccaaaatacaaaaccatatatcactattcgcaaccttaaaggcaaacaatacaaatctcacacctacatgcaaaatggaacagtcaaatatctttgaacttttaaaaaaacaaccagcaacaaattttcaaacaacaattattctctgtcattagaaattgtttaaaaatgaacaatgcaaatctcataaaccatggtgaaagataatattccaatgctcatttgatcaagtaaattttttaaacaaccagcagctaattacataatcgtaattatataaccgtctatcaagtaaacttttatggcatcacaagtaaatttcaatatttcacaaagccatgtaacgacaaaagatacaaatcacacacttagtactatacagcaaaattcgaaggtattttttattttgtatcaatgcaaggaagcaattgtatatcaagtaaactattaagac

SEQ ID NO: 108964 - DNA, 560 bp, Cannabis sativa
tttgagtcttaaataatcaaagtggtaacaaaattgatgagaattttgttaactttggtatatttgagttaatctcattgagaaaaatatacaaaagtgatgtttttatatacactttatgctagctagaaatatagggtgagtcacaaatttaatcaaagtgtgtttagatattgttgattaatttatttgattttgaataaaaattttaaatcatgtttggctatgtgcatatatgtaaaaattttgacatatttggtgtctaaattagtgtttaattttgatatgcttggtatcaaaattattaaaaatttgagttgtgtgaaaattaatctttgatgattgaattttcaaagcttaagtacttaaagagaaaagtgatcacaaagtgagcactttattttttggcatgcatgattcacatggaatcaatagtgagaggttataagaaatcgcttaattaatcgctccgtacaagattaaagcatgaattttcgagggatggaacctaaactcccttagtgttttgctcatttatggtaacctatcttaatactagt

SEQ ID NO: 108965 - DNA, 506 bp, Cannabis sativa
cacttctagaggctacttacattttaaatgtagtattgttaacgtagatttttgttaaccaaatatatgaaccttttatgtaataaatatactacagagttaataataacaataaatgaacaccacatatttttacgtggtttgtagttaaaatctacatactccacaagtccatcttattatgaatgattgatttggatacatagtacaaattctctatttcagtctaatagatagttttttctctcaaattttccatctcatttttcctgaattctacccctatttataggtgtatagggtggcatttatcttcattaggatctagttatttacaactgctcatgaaacgtggacattctccacgttttgttattatacacatgagagaatgtttaagaactacctaaccgctcttctgtctttatccttaaacggttatgctgaccatgcatgttgtttctctctgaatacaagttgttcttctttaccatctctataggaaa

SEQ ID NO: 108966 - DNA, 1846 bp, Cannabis sativa
gccaataccccttataattatgaatacatttttttaaattccatattgttgaatcattttattattattattattaaaaaaatagtaataataataaataaaaagaatgagccagaatgagtcaaaagaaaaataaatattatttttctcccactattctctttaacctcccacttcccactctcgccactttttacataacgtaaaaaaaatagtctataaaaagaagaaaatcaaataaaaaaggaggggaggggagggtatcgacactttgcaaagaaaagcaaaagaaaaaaaattactattgttgttcttccaattgcttagagtctttaagggtaagtacttatggagtgcatctattcctttcttaattttactttgtactcattctcttcttttctctattcatctatggaatttcctcatttcataaaaaaagaatgccctcattccacaactctgaagatgttctcatccatggaatgcccacagtccaccgattaaaatagatgtcctcatttatggaataccctcattccgccaaatctatatttatggatatcagaccaatgaaattttttagtcaacacccgagagtaatttgtgatttcccttaggacgttgagacccctgtcgggttggtgataacatctcctcatctcagctggtgcatgaggtgtataaggatgcttggtctcaagtctggtcgccgtttggtacccttgtggaggtgggttttgtgtcccctccacaggatttatgtgaggctttgcttggaactgtagaaggttggggcatacctctacagttcgggacttgaagtccctaattagggcatgcttacctaattttgtattcttatctgagctcaaagttgatctgtcaccaatggtacgtattcttaaccaacttcaattttgcttccataattctgtgcctgctgtgggaaatgctgagggtattattctagcttggaaatatagtttgtgtttgaaagtactattgtagggcgtaaccaaatttttggcttgttaacaaggattggttgtgtttatttttgagagccattttgtcttctcttcagacgagtaactctgatcatctaccgttatgtctgtactttggaggtttggaaacaaagtttaaaagtaatttcaaatttgaagaagggtggacccgtgatgacagaagcaaacttgtggtggcctatgcttggaattctattatccaaccctgggctcctactagggtcttcaataaaattggggtgacttggatagcactaaattggaacaagatccagtttgggaagcttgatgccactatcaaggagctcgaacacgagttagatatcatgcagaaactcctgacaggtgagcgagtttagaacgaggaacttgttctttgtcaatctctaaaccaagcccttgaatggaaatccctttattggaagcaaagagcgcgggttgattggcttaaaaatggcgataaaatgttccaagttctttattctgtctgctacaatcagaggaagacgcaatgccattgaaagtattctggatagaacgatcattggattgttgggcacaatttaatcgggaaggaatgattatctaaggggtgttttctcctcatccaattctgttcgtgctaacttttgtgatgactttatccaagactgtctatcccagggggagcaggaagagcctacccagcttcctagtgttgaggaaattaagtctactttgttctctatgggtagtcataaagcccctgggcctgatggaatttctatccttttcttcaagcactattggggctgttggaaattattttatcagga

SEQ ID NO: 108967 - DNA, 582 bp, Cannabis sativa
gagcgcagactactctctattcacaatgaacgatatctttgactctcacctaaacgagacactatatcaatttgttagaaactttggaaaataattgaatatgttttaatttttggtatttttgcaaacatattttctttacttgtaattttctaaatttgtgtataaatttatttgaaccaagtaatttatttctctttattgatatttgtagtgtcaaaatgaacaaccctcaccccaatcctcaactattatatgcctttgcaaataaactctatagtgcaaagatgtctcctggtcagagtatcacttcacacttacttttgatgaacttaaagttccataaagcaaacttgctgggaattattttatcaaaagagcaatgggttcagttcattctcaatagcctttcacttgagtataacaaatttgttgtatcttacatgatcaacaacttcaactcgtccaacatgaataagctagaagttgaaatgcatgcttataagcagacattgtcactggcaaggagggctcgctccagagttatagataagggcaagaggaaatgtaaagcccgcttag

SEQ ID NO: 108968 - DNA, 1288 bp, Cannabis sativa
  modified_base (93)..(99): a, c, t, g, unknown or other
aaatagaaccggttttataacataatgaataaaaataagtaattcaaaccggttataatataaatataaccggttctgtaacataatgaatannnnnnnataacacaaaataactcaaatcaactataatttaaatagaatcggttctataacagtgttataatgaataaaaacaaataacacgaaataactcaaaccgattataactcaaatagaacctgttatataacataatgaatacaaacaagtaacacgcaataactcaaaccgattataagtaaaaaataaagagaaaatcagttcctgaaatattgaaacataaattaaaaacaaaactaatttataacaaaatacctcataacatataatgcctcataaaatggattatattttttttttaaaaaaaatgaggatcaattccaaaaaatgttgagacataaatatgaaaagaaccggttccttaacaaaataaataaacactaataataatacataactcaaatataatataaagaaactggttatatttatctcactagtaaaaaatttaagacaaaatattggtttcgtaaagaaattaagataaaaactcaaacacaaaaaccagttaaataaaataactcaaacaaaaatatctattcaacatgctccaacccaccaaataattacacacataccatatctaccacaaaaatactcattcattatgttatataaccgatttattttagttataacaggtttgagttattatgtattatttatttttattcattataacattgttataaaacccgttctattttattataagtggtttgagctattttgtgctatttatttttatttattatattacagaaccgcttatatttcaattttaacggggtttgagttattttgtattatttatttttgttcattatgttatagaatcgattctatttttgtttatatctgagacatctacttatggtgacttttctagtgacttttttcggcggcggtgactttttcggtgacggtgacttttctgaaaacttttttggtgacttttccgatacctgtgactttttcagtaatttttctggtgccggtaactttttcgacaagacttgttattgtattaaaaatatgagatttctatcttataaatgtaaaaataaaaaaaatccataaccatggtaatttttatttataccattaaaaaaaggaaaattatagtaaatggccccaaatcatagggctatgttagtttatgtcctcatttcaaaaaaatatagcaaat

SEQ ID NO: 108969 - DNA, 2078 bp, Cannabis sativa
acagaacccgagtattgggggtttacccgcagaaatttgggttgtgggggtttagtgaaaccaaaacgaaagtattgagggttttgccgcaatttacccatcatatatttatataacactatatatgttaaactttaatttatactaaaatattatatattttggtgtctataaaaattaataccacatacttaggtatccataaaaaataaacggactaatttttttggacgctgatatagataagggtagggcccattaacgcaaaccacaaagccatggttccaaaccccaacaaaagcggaccaaatgaatctgatgtgtttcattggtcaattgagcccttttataattttttggttccgtcatggttttagtatattttcaaccgcggtcaaaccaaaccaaacaatctaattttttatgtatatttaatatatattttttattgtatattaatatttgggaacaatcttagaatgaagacttaatattattttgataatttttttttttattatttatatattataaactttagaaagtatacaaatttaataaaaagttatgttttatatattaacaataacgaaaagagagaacttgaataggcatgagagaaagtatgtagagcagttatattgtaaataagggttttcttttgttttcagcttggcattgtttgtaattgcttgtaattaatgaagtttatcattcttgataaaaaaaaattaataaaaataattagaacgattatgaaataaacatcatggcttcgaacagattgatttggtttggatggtttgaccatttaattgatttggttcacttttgaagttttaaacatctgtattgcttatttagtttgaaaaaaatgaaaatttaaactaaatatcaatccgtaatcaccgctaaataatagtctactaaaacactcttttaagagggatataatatagtaattttctataatattaattgatctgaatgaattaaaaaagataaataataatatgtccaacccaactcccaccacagcttaattactagagaaaatattttgataacttcataatcttcttatttggttataaatttaagtctcttcaaaggaacaataaaaactgttacaacagcaaccatcctaactcaaaatcaaactatactacatatatgctggaatacaaatatgtctatatatatatatatataaatatgcagttgattttgtccccataaatacaaaacacggaatgtattccgttgtacggtaagtgggtcccaaggtacataataatgtgtgtgaatttatttatagatcccagggtacgtaataatgggtattagggtacgttactatttttttaaccctaattactcttagatcaacctcaaccctcagatcaaataactaccacatctaacaactgccgtacatcacaaaatacatcccctaaagtacactaacggaacaaaatcgtgtccttatataaatatatacaaacagatattaatttctatccataatcttgagtttaagacctaaaagccccaccaccccacttgaaggtaatgggctatcttgatgggaatatagcagaatcatacatttctttttttgtgttctcttttcataataaattgttgggatcagtaggaagttgacatttagagcagcgtattcaatgtggatttgaccaaaataaataaataacaaaagaaaggcattatgatcgtgatctgatggggaaaattgccaattgggttaccttcttaattagtaccttttaagacacatattataatgtttgacatttcaaagttattcaaccaatatttctaactatatagtaccatgcttctcttaaagagcttcacctacctattactattatacatatcacatttttcttctatatttctctccatttctaatattttgacttttacaatatatattattatattttagttatttagttattatattttacagtttcaatttggagtctgttctaattgatttggtacctagtttggtaacatagatgatgtttaataaaactattatttccatt

SEQ ID NO: 108970 - DNA, 723 bp, Cannabis sativa
atggttactgatttctttggctctggtgtgattcctaatggcctgaatgctacaaatcttgttttgatccccaagaagaagaactttatttctatgagcgatatgcggccgattgctctttgtaatgtgctatataaagtgctttctaaagttcttgccaaccgtatgagagttattattgatcagatcatttcggtgaaccagagtgctttcattcctggtagacttatttctgataatgtgatgatagcctttgaggtgatgcactatttgaaacgaaaaacaaaaggcaagaaggggttcatggcgcttaaactcgatatgagtaaggcttacgaccgggttgaatggaattatcttcgtgctgttatgactagtatgggctttcattcgaagtggattgaccttgttatgtcttgtatttcttcggtcaattataatgtcatccatggtgggcatgttattggtcctattactccttcacgtggaattcgacaaggtgatcctctatccacatatcttttcattatgtgtgctgaaggtcttacggcgcttatcaatcgatttgaagcaaaccgagctcttcaaggatgtaaggtggctcgtggggcccctgccataactcatatgctctttgcagacgacagttatcttttctgccaggccactccggatgctgctatgagtatcaatactcttcttcatatgttccaacaagcttct

SEQ ID NO: 108971 - DNA, 508 bp, Cannabis sativa
aaaaaatattttcaagtttgacgaccttagagagtcgatcggggctaaacatgtcaaaccaatttaattgatagaatttatgggaatattatgataagttgataatatgggtattggggtaattagaagtatgtgggatttgacttagcgccctagaagtataaattttttaatggctaagaaataataagataattattaataataaaattttattattatattatattattattataatattattttttattataaaacttatcagtacgttttgattatatatattgatgttataagattttttattttaaaaaacagaacaacgaaaacgaaacctttctcctttgtcaataaattctttctcctcttatattaattttttttcgatttttaatccaaaatctaacgatctaagctccagtagtagcaggatagaaaatcctcctagcgggaaaacttaaggtaaggtttaattccgttttaagtttaaaagatcggaagagcg

SEQ ID NO: 108972 - DNA, 1330 bp, Cannabis sativa
atttttgtaaatttcccattaatttatttataggagaaaaacatttcaactatctcatcaactggtttcgtttcagaataaagtaaaattcattagtagtgattactaacaaaccaactgatatatatattcctttttatctgtttgaaaagaattaaatggtcaaaagccaatattctagtactgattatgctacaaagaatgtgtgtgcacatggtctgagttcaaattttgtggctgtcgactggcatgctagctatgtgggtgttctagaataagggcaccaagttctaatacttgttagattaataagtttctacggttgaaaacagcctcttctaccttttgtttttcaaattcgaagcactactaatcaaatgagaatggattcggtaaaaagacattgattcttctattcagttattatagtcaacacgaattaattgaattagtaatagccaaagattattgctcttttgttgaggttgattgaaacacaaacaaactaactcaaaccataacttaataagttgctagcttccccacccaagctagtgatcatttcaagattatgcaatatttgacaaaatagatggataatagggacagggagtgtggccaaactagatgtacttaccttttgggttggaggggaaggaatataataaaagattgtattttgaaggcaaggatgatatgtagccatcgatcacactcatctcttataaatttgaatatatctattgtaattaatttagtggattaaaatttgaagcttatgtgatatattatatatagacacatataaacatattaatatatggggacactatgaaaatagtgtaagtgaccataaaaatttatgattaaagataggtgtatcaatgacaacactataacatttcttcactgaacatttgataaaaaaaaaaattaagttttagtgacgactattttgacattagtgataacaactaatcgtttttaggaaataatcagtggaaacaggcaggatttttccctaaaagatcgtcagcgacgaattaaacacgacaacaatatcatctctgatagtgcgttaaatataactaaaaaaatctcatcttctattttatttgtatcgctttctctctcccacaatctctcgatttcagaccttctctctctctaaacttcccactcccacatctccctctcaatccctccctctcgatactctctttaatctcgaaggttgtcttgagcactggcgatggcagagcttcaacggcaacaacaaaattttgttgggttttgtgccttaaaaaaaactaatttcaatataatcaga

SEQ ID NO: 108973 - DNA, 908 bp, Cannabis sativa
  modified_base (859)..(860): a, c, t, g, unknown or other
ttcacttaatcaacccactatcacgtataagatttatctcgttatttgagtacgagatgttgaacctaccctataaaacaaaaatatatattaattagtaaaaagacctattattaaaacaaaagaaagaataatatttacattacttattaattgtatgttttatcatttatatcatttagtgtattggatcttgtttgttcatgaaactttcaatgaattttataacgtagtatccacattgtttctcatctggtcgttgtgggcatatcaaagttatccacttgacgtaaccaggtgatcccaaaatttcggcaacataacgactataattggacgttctcaaaaattttaaacatgccaaaaataaggaacaaaacacacaaaataatacaaataaaataaaataacattaacaatacaaaaattatccacccatccacccacattacatatattcacagaatctacttcattactattaaatatttaagatattcaaactcttctaacatgcatatttcacatatccgatcgtagtacaattaatcatagaacctccttcactacggatgaatatctaagatattcagactccactatattaataaagaattttaaagttttagtaattatgtatttctccaataaaactagctacttttgcgctttacaatcaatacagggaacccgatacctagaaatattttaaaaaattaaatttaaaacttccatttataaacttatcgaattaaactaaaagtagataaaattttaatctttacaactattatcaacttatataaaagtatgtatatgaactaaaaatacacacatatatatgggtgcactcttaatnngtattacccatgaatgggtaaattagaaaattttgagtttttatactt

SEQ ID NO: 108974 - DNA, 551 bp, Cannabis sativa
  modified_base (194)..(200): a, c, t, g, unknown or other
  modified_base (257)..(259): a, c, t, g, unknown or other
  modified_base (308)..(317): a, c, t, g, unknown or other
catcttagtattaattttccaacaaatattaagaaaattacttaatttaagttgtattaacttaaattaatttgcaactcaaattaaaattttctacaaagatatatattttatttctaaaattatacaatttttgaaatacattaaaataaatcaaactttacttagtaaaaatacttcaagcaaaaatactnnnnnnntagattttcttgactaattaattcgatttcttataatatattttagttcctttattnnnaattaatcattaaatgaaaaaatgattgatttaagttgattcaaaattnnnnnnnnnnattaatttacaactttaatctatctttcaagataaattcaaaattatcttgcataatcaaatgcaatttcgaaaaatgattaataaaataaatgaaatatattttgaaaattatttaaatttatgttgttatgaatatacccaactgaaaataattttttatttaattaagtatcaagaaaataacaatatttaagtatcattaacaaaatcaacttggatatttaattttcaa

SEQ ID NO: 108975 - DNA, 852 bp, Cannabis sativa
aaaaatattttttttacataactagcaacaaaatgaaataaattataattattttatgtctccaacaacacattaaaataaataaaataataaataacaaattcaaagaaggacaaaaaaaatatgcataaaaaatgtttacttttattttaaattgtattttgaaaaaaaatatatatatataagaataaaatatacatttaatctattaattagttttaaaatataatcgtattatatgcattagacttttaacttactattttatttacattaaaatcttatttatatatatatataattttttataaaaattgtgtggattggattggatcggttacttttacatgttaatcaacatccaatccgtaaaagtaccgattttgaattttccaatccaatccaatctacacaagtgcggatatccgcactttgtggattggattggattgaatcgtgcggattggattgaatcggctattttatgaacacccctacttgactttatggtgaaattattataggaatttgaatggttgtattttattttttttaaaaaaaaaaaaatagaagatattatttagcatcagtttaacgggtaatcgaacaaacaatcaatatatatttatagatataaataacgaaaggtataaaggatgacattacatatatgagttttcttttcaattctcaattctctatttttctattttttttttttgttttagtttatactcattatttttaggagctttctcatttttacacttcaaaacagtttttttttcgcatttttacggaattctacataaaaattcctatttcaattagcgctacaacttaaattacaac

SEQ ID NO: 108976 - DNA, 1394 bp, Cannabis sativa
cattacttgttttacaataaaattaaataaaatgcgatagaataactatattatgataaaagttatattttaagaaatattattaacaagtcatttatcaagagaggcacaacttgtgtaaaaaatccagaagacaagtaatatttattctgaaaaattgctaaaccaaaatttcaaaaactaaataacacatgaagtcgttaagaaaaactaaagaacactaataagttcaaattaaattaccgtgaaaaaaaaaagaagaagaagaaaataaacaaaaattggtagttacagcacaatctaaatttgtttactcatcatttctttatataatgttaaaagcggtgtatttttgggatagtttttgtaaaagtaaaaattaggtctggccctcttagccgcattgatattctccttcctcttttcttttttgtaaagtccctcaaaatatttaggaataccaacaatgtcgatgtaataatcttcgaacacctccttccagttgataaatgttttatcatgacgaggacgaacatcgcatgtgcagcatggcatttttgtctgccaaaaatcgttttctttcttatcatcacacaaaatcctaaattctttacaagtgcaccctaatctggccacatcattacctggaagaaactccaaaatcttcatcttaagatctggatgaagttctatcaagcacggaagactcgaaaacccggcctcttcgcgaagctttaccttgagaggaaacgcaagctcatctcttacactggtccagaattgttcaaacccatcacggtgttgtactgataatggaaatctaagtattgattccagtttatgattgtaaaaaaataattgaaaaactattgatccttcttcttgttttgacttgacagagacagataaacattgttcaaaactttcgaaatccaactctactgtttgtggtaatttactttcattcttcttcaaaatatcagatagagtgtagcaaaacgacaccgttgaggaaaaaggtagttgatgaaacttatgattaatttgatttcctgaaatttgatcatatccaacgaaatcagattctaaaaaaacagcatgaaccgtaatggccatgagtttgtgaatgtgatgatcatgataatcaatatttggataatcggctaataattcttctctctgtgtttggaaacaaatatgctgacttttataataatcactatcgtatggtttgatatcgatattgatgttttctttggtagtcttcttcttgtttttcttcttcttcatcatcttttcaatcttctttttgaactccaaatatttattcttcttggtcatctttttaatcttcttattgaactccaaattgttcttattaaaagtctcgtcgt

SEQ ID NO: 108977 - DNA, 582 bp, Cannabis sativa
ataagagaacacattatgttgattttgaatcaagtgggggaattgataggaagagattgtagatatgaagaaaaattacttatatttagtagtaacattgttagttgttttgcagttgttttaaagttgtaaaaacgttgtttaattttattactttttgaacatgttgctttcacgttgtttgtacgttgaatttcagttgtaaagatttgtatcaaccttaaattatcagttgtttttattattttttacatcgttgttaaatagttgttaacagttttaaaaaactactaacaactattgtattttaaaaaaaaattataattatacaaatacttgatgtataaattaaaaatataataatagttgttttttaatgtactaaaagatataaacaactttaaaaatttataatgtttaatatctagtacaagatatatatgaagttaactagagaaaaatttaaaaaaaatataaaagcaaaggtttcttaaaaaatattgctcttctgcacatacaaccaaaacgaaacacacttctcaatcattaattcatgctcagtaacttcacccttcttgaaag

SEQ ID NO: 108978 - DNA, 650 bp, Cannabis sativa
gcctcagttttatcctcagaaagtgttcctattttcatgtagtcaattatcggggtcatccaggtcacctttttgaccgtatcaatcgccatcatctcatctcgattgatagttggatgagtcaatatgtctataggaattacatcgagtaattctgcttctcttgtcgaggctactcgggccagagcatctgcatgagaattataagcacgaggtattctacaaatgactagctttttaaacttttgtaataactcacaagtataagaaagatatttggccaagcgacctcctctagctaggtactctccgttgacttgccaatccacgatctgcaagtcactaaatgcttgaaggtactcgactttcatctcaagagcgagctttaatcctctgattaaagcctcatattgaacttctttgttagatgtaagaaattaaaatctaagggcgctgtgtaccttgaatttgttgggacttatgaggattattctgttggaatatcttttaccaagatctagatttactaacaaatatatttttaacatcctgagtatgaatatcgaaaacgataaaaataaacacataaaaggtatgagaaaccttacattagttgcagtagaattaaatgactccttccgctcagatct

SEQ ID NO: 108979 - DNA, 1623 bp, Cannabis sativa
cccagtggaagattgttagaaattattgaggtaacaattgtatatataaaaatgtgtgttggatcatcaaataaataagtcaaatttatgtggtctattttagaataaaatctatgccttaagggcatgattgtcatgattttaatatgtggataccataaggacaatttctaatttgatgaggggcaaatagaaatagtcaataaatattactaacagttttgtctgttggtaatataaacggtaatggtccccaattggcattatcgtgtctttttattctcttgaaaccccatcatcaagagacaaagttacagacaaataatttactgcagaattggaagatcattacaaaatcgattctatggacttcggtacgcttccgttaatctatattctattgtttgattctcttaaattaattaaggctatatacagatttacagtgttcttaacaaattttagtattgcaagtaaactttacaaagtgcctacaacttactaaaataaaaaaaataccaaattttttttttgagataaaaaatgcctttatattaaaacaaatagtcaaaatacaaagggcattaaaggcagaggcattttctctaaccatgtacatttagtatccaccgagagagcaaactttgccagtaaatgggcagcaatattagcagatatataaacatgagagacttgagctccaagaaaattgaaaactaaatgattagtattatttaacaagcaatgaaaatcagaagtaagctcttgtgaagagagtaatcctttaactactaagagtgagtctgtctcaatgagatgcacgagtagttgaagttctcttagccattggagactatgcataagagccaacacttccattacttgaggagagaaacagacgcggtaaggagcagccatagcagccacaacatcaccataactattccgtagaacagctccaaagccacaggtcttcgaaatagcatcaatggctgcatcagtattaaatttcagtcggactgaaggaggatttagccaaagagcatctttagtagcagctagagaggagacggttcctacaatgcagttaactacatgagcttttgatcgagcagctttaaattcttacagatacgaaagagcaaagtagagaataacatcatatggttttggtttggtaccatggcgctctttattcctctatctccaaatactccatagaattgaaaatactaattatttaaaacttatgtcagataacacataaattaatactcacgcgaaacacatttcgcctccgtacacatcgtattgaaatcagacgccacacatatatatatattgtaaaatagggtagtgattcaatcccgctcagtacagaaagtagatattcttccgtctattaatcctgaccagtaattcaatcaaatggttgataaaaattttaatggtgaaatcatgttcgtttatatttattactgatccaatggttagaataagttgtaatcctttgggtaggggtgagcgaaaaatccaaaaaaccgaccaaatggaatacaccgaccgtccgaataccggaaaaacaaacaccaaaaaaataaaaaaccgaaaaaatcgccttcg

SEQ ID NO: 108980 - DNA, 511 bp, Cannabis sativa
tatcaagactttgacggtactggcattgtttggggaattgataactatgtgtgccattgtaaacaactctctacttttatgttaagttgtaatttttcgtttatttctagaacttgtaattttatggctcataatgtagtcaagtggacttttgctaacattatagccggtatggtagatctttctttaataccggttactatcttttgtaatgaccacgaggtataacattacttctattttataaaatgcctttaaaaaaaaaaacccttcattttctatttgttttaggaaaatttaaatttctatgcttaaaaatgactccgataataaaaaagaaattttattttgtatacataaataatattcctatactaaattttagaccttttattaatttatacaaaacaatactaatattctaaaatattacctaaaatatccctcacatctaattttttttttctctttttactctatctcttcctcttcctcacatgctttctctttc

SEQ ID NO: 108981 - DNA, 739 bp, Cannabis sativa
tataattttataaatattaaattaaaatttatatttagagttatccaaattagtaattttaattaaataaatatatgctcaaatatatagattaaaatgagtatcaaatgaaaatacaactctttaaaataatgagctttagttataagtatatttgatctccattgttggtcttacatagttaattgtttcaatataacttcgagacgctagacttcatcccccttagggatggttattcgttgaagcatttaacaccgtaaagatctcaaaagataagtatttaataagtttttgtctctattagactctcccttacagtgactacttagagataaatttacgaagtataaaacaatggtggaagctcataaaataaaaatgaccttgattctcgcctacggagacagcgttggattcttattttgatcaaaaaaaggttgctagaatgttgtccattttagatgagttgactactctattcaatgactgatatatttgactctcgcctaccgggacattgtatcagtttgttgaaaaccttgaaaattatttaagatatgatagtttttgtattttcacttgtctttattacttggtaaatgtataataatttttgaatgtgtatgaatttatattgaatcatgttgttttctgtaattaatattgtagtgtaaattttgagtcttcattgttggtttaactttgtttgttgttttaacgggacaaatcccaaagg

SEQ ID NO: 108982 - DNA, 590 bp, Cannabis sativa
gaatctgaatctgcatttattcatagtaatgccaatgcagaaaatgcataagtgtctttgtcactttcacccatttttaaggaatgtatttttatttgaagatattgttttttatatttgaaaattttaattatacacaataataaataagagaaaaaaataacaaataaaattaattgtgtaaacatagattcaattactcataaaaactataaacttgattgctaaaaaagtaataacataattagacattaaacatgtcaaattatggttgctttgacaccatttaggatatgtaatctaattagtcctgaaaaagtaaatatatttgacataatttttaacaaaatatattcaaagtaattaatcataaactaaaaataaatagccaaaaactaatagataggtctatatagcacaccaccaaaaagtgtgttttagtaaaaacaaataatatttatagggagtgtagactaataatataattaaaaatgggcattttacataaatgtatacatttttttaaataattacaaaaaatgtgcaaaaaaacacaattttaaaaatgcacatatttgaaaacatattta

SEQ ID NO: 108983 - DNA, 568 bp, Cannabis sativa
tttttgggaggtcctgatgtgatgaaggctgagcagtggctcacagtgattgagcgaattctgaattttatgggtgtggttggtaatgatagggtgacatgcactatatttcaattcgaggaagacgccctggtgtggtgggaattggtgttcctcacttgggatgtcattgttatgacctgggaagaattctaggaattattcaacgccaagtattataatgaagctgtccgcagtgctaagcggaaggagttcactgaattattacaagctgtggggatgtcagttactgaatacaccacaaagtttgatcatttggctaaactcgctgtgggtatcgtgccagcagatttcagtaagaaagaaaattacctggctagtttgaatgtggagattagacatgatctggtgatcactacaaataaagcaaccacttatgcgaaaaatggtagaaaaagctcttagagctgagggtgcggttaaattccttcaggagccccaagtgactccgaatgttggtggaacccccacttttcctactcctgccttgttgggaattattttacca

SEQ ID NO: 108984 - DNA, 1115 bp, Cannabis sativa
aggacgaaaattggagataaaaatcaatcgcgaaggctttttcaactgggttttcaacattcttttcttctctattttcttcttctattctaaattattatgtgtgaaatttctacgatgaacatgagtagctagacaattcattagggtctagatggagattgtttgatattgatttttggttttaatatgatttaatttttcctcaattttcatgtattctatttcattcgtacttaattacgtttaattttctgatcaccaattaaatgtttatgattttgaggcaaaatctgagaagtgagtgtcgattatgctacagtgaaatagaatcaaattttgatgtaggacgagagtacctatagtttggataacttatagggtttttgtgtttaatgcctgttacatgtttcatttatcacgagagtagaaaatttgcatataattgaggtttatatatttgagaacactataaattactttagtaaacctgctattgcatagaaattggtaataggaataaaatcatgttaaaccataatcaatagatacaattaaaattgaacgccctaacttttattcattgttaattcccttattaatttacctgcttcttactttcgttgtttttctgattttattatctcttaaaattttatataaccaaatagaaataagaatttaattttaacgtacttaactacaattctcgtgagattgaccccactctttgtgagtattacttgttaaaacgatacgtatacttgcatgttgtaaattaccgcaacagttagtaaatctagatcctagtcaaataattcccaacattcactactacaatttggcaaataatgtcacgcacaaaagtgtgggtcactatagagttaggagtaacttttagtgacatgcataattagactccaaacattaggtgttagtctcttgcaatgtgtgtcactgaaaatatagagtgtcactaaagagtgaatatatattgttctaatttttattaatttaaaaaatattgacctatactgacgtgccaaatatgattgggtaaatatatcccctcacacttagcgcatcactatatcataattctatttttttttttt

SEQ ID NO: 108985 - DNA, 2660 bp, Cannabis sativa
attgtgaggaaaatgtacatgcctggcatatcttctgtgaatgtcattggcaaattcatcaatcttgaacgttgagcaggcaattgtacaaggtggcaagcttccttttagttcaattcattcaagtactttttttgcgcattttgggtgcttcctgcaatgtgaagtccaccagaaatggttgcaacatgaccatccaaagctggtagagaagctcttagagggtacgaatttccaggaccgagggctacaactaatgctgctgctagagcattttgtgcctcgtgaagggcttgcacatttagagcttgtattctagaagcctatggatggcctactccctgaggaggattaatggctccatgttgtcccagaataaaaagttgtccatgtgcaactgcatgtccatgatagatgactgaatgcttacctaattgacaaatgcccatttcgcacaagtccttcaattttattcgttagatagtcacattcatttgtggtgtgtcaaatatcaccgtgatatttgcacttcttgtttggatctcttttttgtcttcggcccttgtacattgacggagacttcttgtaatgaacttgccttatacacattctctgaagtatctataagacttgtatacttagagtatcttgactcttggctctttcccttctctgcagaatcacttcgatttggaccctttgaacgccatttactctgtgattgggttatattggactctggaacttcatctttttagtttgtttgtctaggagcgtcactatatccagtttgtgtagctctgtgcagctggctgtacggaagtatttggtccacaaaccgtaggagttgtaaaagtagttggtgaagggtaaatagatgcagtcatcaactgcaaagtttgggcatttggtatatcggtggaatatgctgggagtactctatatgcttgagtataagctccttctaaatttataaatccttgagctcttgccaagaaatcagttagagtatttgctcttttgcgttgaaggtctccccacagcaaagatctagttgcaagtctggatgttaaggccaccattttcttgtcattagtgaccttagttttagcagttacatccatcatgcattgcatgtatttcttcaggctttctcctggttgttgcttgactctagtcagtgaactagcttccaggtcgaagttcttttgctgctacaaactgctttttaaacattgcttgcaaatctctccaattgtggatcaatcccagagacaatatcttccaccagtcctctgcgaatttgcttagtgttagtgaaaggcataaacattttgtgccatcactggccttggcaacttgcataatgtgattgtacttagacaggtggtcgctggggtccgtccttccttcgtacagttccatctgtggcattttgaaatgcttcgatagtggcatttctatgattcttttcacacaaggatccacatcttcttcctcaaagtctgacacagtaccgttttttcttcctatagatcttttcagtgattttcatcaactcctcaactttacgttccagatgttgagtcttgtcacttgaagattctcttccgcaatcacgatcgttgatatggtctcttagattgttcccacggggtttggttttttatgcattggctctttcttttttctcattcaatcttcttcgaatatcaatcgtggagagacttccattgctgtcatctgatactagatatacgtcatcaacatcatcatcgtgattactaaaatcactgagatgatgcttctccttccgcgactttggcttccgaacttcggcatcagtctcacttttttgtgtgactctgcctctagaattagtttggtcaccatgccctgaagcatggtttcctttcatcttttgttgaggttggtcgacagatttagagtttttatgttgtttggtagaaggagtcttctttggattttcaacgactatctctttccctttgtctttgcgaagacctgaggttcaggatctttcaaatctacactcctaggagcatcaactattggagaagcttatacatcatcaagagtccctttggttagggcggtcatcacgacctccatcctggtcatctttgtgagaaatatctcgttaaactgatcttgatgagttaatttgctttctaccagttgaagttgtttagcaattatgaccacagggtttgactcatcaagttgattcttttttccaacattactatcagcggcgttgttttgaggattgtcttcaagtatgtcctcgagagtatcctgagaattgtctatagcatcacaagaactacttcctctagattctgcatctttgattattggatcatcttgattccaatcttcatcatggtgacctttctagcgaatggtcgcctcgtgtgggtcatcggtgttccctactttgttgctaggacaagtaaaatgaagaccagaatttgtttgggtgagtaccatgattacttgagcgtaatctccagatggtctcactactttcttcagctctcaatgaaagcaccaaaatattaactgagatttttggaaaactaaattagacctgaagaaaaaaaaaataattaaaagagaaaaagtgtgaaagacac

SEQ ID NO: 108986 - DNA, 510 bp, Cannabis sativa
atgttggaaacagatagcttggtaagtgtccaagcgattcagaacggtattttatgccttcacaatttgtgttttgtaaaacgatgtacaaataagttggcttattgcttggcaagagactcttgtttctctacaagtcatgtgcttcagttggaggactgttcctctgaagtgcgttctattgttttatacgaatttattaattattagatcttacgatttttattcaaaaaaaaattataattaataatgaattttaaatatgattatattattttaataaataaaatttaaattaaatattttttaattttattaaaataatattacttaataaataacattaataaattaattacacagctaaatttatatataataaaaataaaaattataactaactataataacaatattaacataatatatatttatatataatcacacatagctgtggatgaacacaccgacacaattttcttttttaatgatatcttttttttttttttt

SEQ ID NO: 108987 - DNA, 535 bp, Cannabis sativa
  modified_base (187)..(189): a, c, t, g, unknown or other
  modified_base (231)..(235): a, c, t, g, unknown or other
  modified_base (287)..(294): a, c, t, g, unknown or other
tggctaacttagttaccaatttaaggccattttgcatctcattcctgtcacgtaatgcgtatagctgaaaacagtacaatttttgggtaaacagtgccccaaaaatactttattcttcaaaagcaaaagaggttgcagagttttggtactgtcaagttattcttcgggtaaatactattttggaccnnntgttttgcaaaagttatcaattagaccatctgttttgttaannnnnaaaatagaccctgtatttttcaaaatggtacaaataggaccctgaattgatnnnnnnnnaaaataaaatttaattataatcagatctaaaagtgttatgacaaaattatttacatttatagtatctgctcgtattaggaattattttcaagtcgattatattataaaaaaaaaagttatcaaaaattaagttcagggtcctatttttactattttggaaaatacaggttccattttgtcatttaacaaaacacaaagtctaatcggtaacttttagaaaacacaagatccaaaataatat

SEQ ID NO: 108988 - DNA, 527 bp, Cannabis sativa
aatatggatttaaaatgatgaatattgtttgtgttgattttgatgtgttcatgttagtttatatgttacttgatgatgttatatgatttacgaaattttcccacgaagataattttatttttattctgaaaatattttatttggattccttgtaaaaaaattaagcaattttgttttttacggaactcaattccaataaaaattgagtgagttatggagttttgaaaatttgggatgcataggctcaatcgcacgcacaccagtcactcggacaaggtgatgtgcgcacgcgtgcctaggacaatttttgtctgaacgcacgctgatgcccctcgctgagacacgggccttgcccaggaagctgcaggcaccgagaaacctcgccagtccaccctacaaatgccccttccgcgcgcgcgtgataggctgcgtgcagcctattgcacgcccaatcctgggctacacccctaatgcgatttttgtgggatattttcacaaatttagatttttcccaatttcaaacccta

SEQ ID NO: 108989 - DNA, 1119 bp, Cannabis sativa
atttatttgatcatgtacgtagaaggcaaagtatgagattttcatcacgacatgattctaattttaattttaatgatgtacaaaaaccaatagaagaaaagaaaaaatgaacactaaaagaactaaggggagcagtgaataaaatgctaagaagtctctttaagggtaaaaaaaagtaagaggaaacagcattctgagaagcctggtccaaatccaaagacagtggatgagtccacaagtgacggttatcactcagatcatttttctactgatcctatttatgatgcagcaatatatgaagaaaattattatcataattttgaatttactcttaaggatttttcattcctagttggtgatctagacaaccaagatcatgatctagataaccaagatcgaaaaaaatcatttcggtactgaacgtgtaattaaaattttgttataatataaagtatttttcagctattcttttaaattttcttaatagtcttagttttttttttatgtaattttgttcaaattagtaatttattgataatttagttggttaatttatttttttagttctatacattgtaatacataagaggagcagggtcggccctgaaaatttatgggccaaaggcaaatttgattttggggcccttcaaaatatatacaattttttttttgaaaaagaatgttatgggattcgaacccatgacattgtataatatgcgatacaccttaaccaactaagctatgaatatttgttgtatacaatacagtaaccaactccatatggtgtggccagtaataccacaatgagtgcacaccaaattcgatcgatgtggctatacaactctagaaaattgaccatggttggatccagatccagatccaactttatcactttcagtggaagcattcgacagacatctttgactctcttcttgtatgacatcaacataggatttgttgatattagggatgtgatcttgcatcaagatctgagatctagctccattatacgattcattaagaccaactaaaaattcaagaactcgatcttcattttggtaatcttgaatttatcttgatagcaccataagtacaaataggttgtgttctatattcttg

SEQ ID NO: 108990 - DNA, 1710 bp, Cannabis sativa
  modified_base (646)..(652): a, c, t, g, unknown or other
  modified_base (849)..(854): a, c, t, g, unknown or other
  modified_base (1647)..(1680): a, c, t, g, unknown or other
tgtggagaagcagcagcctgttgtgcagcggtttcgatggctatggaagctagttttcagtatgttttggtggagagtgactcgagagtagtcatcaatgctctaaatgggacggagtctcattgggcgattgagaactatatctccttttgtgtcaagtcctctccctcttttatttgttgtaactttgtgtatgctcgtagaacttgtaattttgctgcccataatgtggctaattgggcttttgttaacaagttgtatggtattattccggtttcttctattccggagaaccttttatgtaatgaccgggaggtctaactctgtttatttaatggaatgattacgcgtttttcagaaaaagaaaagtgagattaatacatttgtcacggttatccaccaaagcaaaatgttaatacatttgtaaaactcaattttcacaaaattgaatttcatttcacgtaattatcccctaccgttttgaaaccctagcacacccacccccatttcaaaaccgagcagagttgtaccaaccaccattaatttcgaaagactcccagctgcccactgtttgtccaccgcccttctatttctctcggtacgtacctctttctctctcgtgtgaatctctctctctctctctctnnnnnnntctctctctctctctctcacgcgcggaaggggcactctcctcttctctctcacacgcctctgaagctataactctctctcattagtgattttcctacttgatccatgctttgtaactttatagagagctatattagatcccacctatagtgatctgaatagtgttatctctaggtattaatacaaccaaaaggggannnnnncattacccgctaactaaaggggtcaaacttctataaaaatccttgtcttatttactttattgttcttgttgtgtaacacgtgacaaacatcagattcatacgactccgctgtcgattaatcactttttgggatcaacaattatcatgcttgtttgcattatacttgacacaatttcccatctttgacctagggcatactttcctacttttgagtgattgtaggctgtttgtagttgtttggtgggatgtgatttatcctttattttgtgacttgatggcttatttatgcatccgctgattaacgtctaggggttcgtaaaatctgagaatgatgggtttcaacccttatacacgttagtcagagtaaggcatttaatgttcttcccccatgcttcattaaatgtgtatacagtgtaatgctctattagtgacatcatcttccactacatctcccatatcatcctctggttatgcctcactcgcagaaaaggtcagacgagggttgcttgtggactagccaaatactcccggagatgattaatttatcatcactttacttcatgagtaattagggagatgcatctcgcacctgtgggtcctactatcacatggcatattctagtactgtcacgcattttaggagaaattctaagcaacagtatattttataattgatttatgaatatgtagtattataatgttaataattttttaattgtatatagatttattaattatttaaattttatatcaatgcatgtaaaattttatgcactacaaaaaactgctactnnnnnnnnnnnnnnnnnnnnnnnnnnnnnnnnnntttgtgactaaatgtgactttaattagtca

SEQ ID NO: 108991 - DNA, 886 bp, Cannabis sativa
agaattaaagactctataactatgcgtctttagttgtctggcaaataatgaaaactagaatgagaaccatcttattccttttagaggatttctcctagggttagatttaaattatatgacattaaaaaatgttaaaaattggctaaaaatcaccttaagtggccgaccataagatgggccccactaaattaaaatttttccatttttattcaacaatttatcattttctttcacaaatgtcatattttccaattttaatcatttaaatgccaaaactacttatttaataattaaaattaattattaaataaaatatcatttaatttatttattaattagacttaataaagtctctttattaataaataaaccctaaaatctcttttttttcttcacatttaagcccttgcttagtgaaaatttctaaataagacatagtctaattttagaattagaattgattaattaaaactaataaactgagccttacaagcattattgtctcaactagtgtgtggaccatgggcatatgtaaccaagcttccaataagtagatttagaaattattaattcttcattgcacaactatagatttagaattgcactctcaattaaatagagcactctatatgttcaacgatatagatacgctatgaaattatccgtcgttctaatccttataatcaaagatcctttatagatgctttacattgagtatggataaatttactatttcacccctcaatgtattttatacataaaacacttaggtttttataaataaaaatttaactaaactaatataattactgaaataagagttcttctatttatctctattaagccaagcttgaaggaaatcatcatttcacttctatgtccaaat

SEQ ID NO: 108992 - DNA, 511 bp, Cannabis sativa
  modified_base (451)..(454): a, c, t, g, unknown or other
  modified_base (482)..(482): a, c, t, g, unknown or other
tatattatgaatatgtattatttaatattttatgcatgattatataaataatgtaattaaagtaaataattatacattgaacattataattttgaaaagtaaataattaattaatattttatgcatgattatataaataatgtaattaaagtaaataattatacattgaaattattaaattaattaaaattttaattaaatataaataaagaaatataatattacttttaaaggattgaactcttgacgttttgattgttttaagagtacttatattgattattataagttgaacatgttatagttttctataagtataattattattttaaaataaatttaattaaaatattataaatttaaaattgaaaaaaatataattaaaattaaatttttaataaacattatagtttggagttaggtttggagttttgttagttaaatttataannnntaatattcaaagttaattataaataaanaaatatattaattatggtgtagttttgaa

SEQ ID NO: 108993 - DNA, 1334 bp, Cannabis sativa
ccagtatttttgtaagtttttcttatataattgatggtaaagattgatagaacattaggcttgggttcattgcttcttttcttcaaaaatacaaactattgagttggattttaaagatccaaacatgacaatagttcattagctcaattcgaaaaataacacaaaattaaaataaattaaatattttcaactaaaataaatttaccattaataatatgaaatatttaatttatattaatttaatatgcataaatgaagacttaaaatgtacaaattcgagccttaatcagttctttctcaacaaaagtatattcaagatataccatgcaaagctgagatgcaagaagtaaaaagtcaaagttcaccaatgaacagtgggttagggttgtctaactatgggagtgatccagtcgaagatgctacaatttatagatcaatagttggtgcattatgatatgcaaccataaccagacctgacacaacttttagtgtaataaagtatgtcaatttatgcatcaaccattgcaatcccatcttgtagcagtcaaaagaattctaaggtacttagtaggtactcttggaatgcatttaaaatgtctttcatcactgtaactcgaagccttttgtgatgctgactgggctgcagatccagatgatcgtagatccaaaatgttggttggcaatctaagaagcaacctaccatatctaggtcctctactgaagctgaatatcgcaacattgttgctgttgtaactgaaatcagctggataacctcattgctttctgaactacatcaaacgctctctgctactcccctggtatggtgtgataatttgagtgcatttcatcgcactgctaatcctgtcctacatactcgcactaaacacattgaaatgatattcattacgttcggggcaaggtcatgaacaaggaaatatgagtccatcatgttcctgctgaaggccaacttgcagatctccttactaaacctatttctagttctaggttccctagtttaagagacaaactcgcggtgtggtcttttctaccaccctaagtttgaaagggattgttaatggtacctagtttattataggtttagttagttaacagttacaaattgttagctttttctgttttggttttcagttagtgtcaactaattttctagtagtgttagttcttgatgagtttttaaggtcactcaaaatgtatatttacttgtgtatttcctttcttaaataataatgaaaacacagtgcattcttttactttgttcttcagcttttgacattaacacttagatctatctatctatatatatctataatgct

SEQ ID NO: 108994 - DNA, 560 bp, Cannabis sativa
ccaccacaaatgtgcagtatttgaaagtgctttggggtgtgtccgggcacaaggtgactgggagcctcactttccccatcaggataagtgtcgttctattaaaccctgtgagctgggaactgcttggtgaaagatcccgatccgtgaggcctatcgctgtgaaggcttctttgaataataaattcacagaactcccgttgtcaattaggactctagccacaatcttgttggaaatgggagtctctatgaccaggcggtcatgatgagggaaacacattgtcttagcatcctcttatgtgaacgtaatgggctaatccattagccggggcctttgagctgagagttgagtaacatcccaaacctcattgtgcttcacggcccctgcataacgtttcaattccttctgggtagttcctccgatgtgaggtccttttgatatcatggctactcttccgttgggtctcggcgataggccaagaatttgctgggcttctccggagggagcaactggggccaatgctccggctgcaccccctggtactccttggggcaaaggtcct

SEQ ID NO: 108995 - DNA, 802 bp, Cannabis sativa
ttgtgggttccatttttagaaatgggcactagagttttagtttctcaattttagagattttattaaactctaagagtattatttaggtgtttaggttgaatcaaatcaagatggccagctgccaacctcaccagcagccacttaaaccttagtgcaaaattctcaaaattcccatcttacttactatttaagtaattataaacctaggggtaaaatggtctaaaaccataacccaacataaatccggtattcataatatctcaaatatttgtcccactacgaataggttctaaacttatccatgtgactataacggccaacaatcgcattttttatcatcgttgagcaaaaatcataaaaattgtataatttataattagcataaataatattcctagattttaataatatttatgctaattatgaattatacaattttgatgattttttctcagtgatgacgaaaaatgcaatggttggccgttaaagtcacatgggtaagtttagaacctattcttagtgggataactatttgagatattatgaatactaggtttaagcggggttatggttttggaccattttacccctaggttaataattgcttaagttggaagtaagaggggcattttaggaattttgcactaaggtttacgtggctgcatatgagattggcagttgggcatctttatttgattcaacctaaaatcctaagtattattggatttaattaatttaagaaaacttagagatattaccttgctctctctctcttcccttcgacccaagcacaaaccaacag

SEQ ID NO: 108996 - DNA, 500 bp, Cannabis sativa
  modified_base (176)..(178): a, c, t, g, unknown or other
tacctacgcccggtacttatcatacgtcactgacgcccgtatctacgcccgatacgtcgctaggaagaaacccaataataatttcaatctataccacaaccaggaaatttcatatcactgacgcccgtacctacgctcgatacgtcgccaagaatattgcatcacctaatcaggtnnncccatatattatgtccatagtatcattacattaccattgccttatcaaacaatcgataatttcagattttgtcatgccatgtggtacattatacttttcttacctcaagttatggttcaggtatgttggccgacctgcttggagaacgattgataatcttgagccctatgtcataacaataataaatcaatgagtgtttattctaaaacactacttaacactcccgtaagataatttaggattttttatcaaaccccacggtatgaatacactaaaataagagcctagaactgcagctagatatgtcttacgaagaacagcc

SEQ ID NO: 108997 - DNA, 798 bp, Cannabis sativa
aaatctaggaaaggttggcattttaaggccttaaaaatggagtttttgggtgttttgaacccagtcgccgctgcgactggatttggcagtgagaatgtctatttttttcgattttgttttcgccataacttttgactcggattccatttgggacgttctttatatcgttggaaagctcattccaagctgtattttattatctgtgttttgaatgccatgtttatattatgtgaaagtggatttagggattaaccctatatttgtaaatcctgaaatttgtgactaggattaccggcacttggtcaggagcaccagggggatttggaatctcttcgcttgcaggacatcaggtaagacagtagttgcatgtagagttatgcacaatggcgcttatattgaaatgttttacgtgagtaattagaaaccgggattagggttattgccctaaaatgagctgtttagcggcctagggttattaccctagtgatatatgatgagtaaatgctacgccatgttaattatatgattaaattgagaattagggttgtgcgttcaaggcataactgtgttagactcggtaactagagtcgagatgaaccattctaaggccttattgtatatagacgtgtgagcgcaacacgtaggtctatgttacatagacataaataggcatgtgagcgtaacatgtaggtttgtgtcatacaagcaattgtgaatgtcataaatgtttatataatgtgatatttatgattatcgatatttttatattgttttgctgggcttggctcacgggtgctc

SEQ ID NO: 108998 - DNA, 523 bp, Cannabis sativa
tacttctaaattgtacatccaagttagttcttagagttagcgagttgaaattctggttattgattgcttgaagttgtgcaggtggtggtagcagttcaatcgttgaaaagtttagttatctgctgtattgtttttctttagtttgagtcttagttttactcgggggcaagtaaagattaagtttgggggagtttgttaggctatttttagcctatattttggatcgattttatgtgcgcttttcactgtgttaggacagaattacgcttgttttctatgttttcaggttctttggaataatagaggtctcgggatgcaaaagtccaataaaagacgagatgagccaagaaagacacctttttgaggaaagatgcatatctggccgcggctagatatagtttggccgcggctagatcatgaagcagaggcactgatttttgaggctacagtcgccgcggcgagatacaccctcaccgcggccacataaaagttacagaatcgtgattttaagcatctatctggc

SEQ ID NO: 108999 - DNA, 549 bp, Cannabis sativa
taagttttgtgcaagtttgagcttgagctcaaagctttgatctctaatggcataatttaattcattgagtttttctatgaaatactggttggaaaatattgtctttacattgattaggtacttaggaaggtttggtggcattcggtagaaaattgagcaagaagtgaaaagtttggggtcaacttgtgcaaaccggctagccggttttaccagacctctaaaatcggctagccggttttggcagggtccccaaatgctttattttctcgattttcgtccatttcattgtcttgattaggtgtttcactatttctagagtttgagcaacctctagggggtataacagaacctagggttgtgggttagggtttcccgggattagggttttgatcatgtaacttacccggtttcataatgtgattagggcatccatctagcacgagattttccattcaggttgcccagcacacttgaatctagaaagaaggtaagaactatatataatgtgtgatatcagtatctaaaagtatgtatatgttatgtgtatat

SEQ ID NO: 109000 - DNA, 514 bp, Cannabis sativa
ctgcctatgtgatatttcaagagagagacaataacattaagcttaaacacgaatggaaacccttagaaccataaataataacaccaacactacagagtgatacattcatacagttttcatgtcaaagcaccacagaaattcatcttcatgaactaaggatacatcgattaggaggaatgaaaacacataaataagaataggaatgaaataaaatttaaaatgtataagaaaaattgataaaaattttcattttgtattgaaatggtctttctttctatttcaaaatggaatagaaaaatcattcaattatggctggatgatattctaatactttaaaatgcaaccaaacaaaacaatagaataaaaaccgattcttttccattccatttcacttcattagtcctaactaaatgcaacctaaggctatgttccaacgataatgtatcgaatcgatgagtacaaattcaactggaattcgctaatccaaaaatacaaatattaaataatcaacaat

SEQ ID NO: 109001 - DNA, 1504 bp, Cannabis sativa
aagggtatttccaaagcaatttttcgtacttgatgactttgtaaatgttatcattaaggatattctgatttcctccaattcaaagaaggaatttgagaggtattttggatggtattataatattttagcaggttaaactttatgctaattgctggaaatgcaaattttctgactctaagtaggtttcttagagcatgaaatggatatagatagtaccttgaaaggctcgacaaggattaaagcagtttagagttgacttcaatccaagtttacaactgaggttagaggttttctagaattaacagagtgctacggaatatttgttgaggaatgttttacactctaagtggagttaagtcaaagaattgaaacaatggttaactattgtaccaatattaacaatgccagtcaaagaagagaaatttgtgatttagggtaacacttctaaacaaggataagattgtattctgacatagtttaggagagttttgccaaacaacctagaccattaaaggagtatgagcaatggtattttaatcatgatattgaattggcagtaatagttttgcactgaaagttggtacattatctatatggtgaaaatgtgaagtctatacaaaacaccaaagcctcaaatactgtttattttggaagaagttagataggaggcagtggtgacatttagagatgattgaaactttaacggtttgattttctacaactttggggagtaaattagtagtgaataccttaagctgaagaggtctagaacaagattgtaaaacgaaaagatcttaccaaaggttactggaaatgtaaccagaacaaggattgagagcgtgatcagagaacttgttaatattattttatagattagtgtattgtgaagaaataaaatggctcagtagagtgactccgaactttagaagtacgagaaaaggtttggaacctgcttaacaaaggacttttggttttgtttgaaggaaattttatgatataaaccagattggtgtattagtccaataaggatactgaatggaaggttctaaatgagtattcatgtaataacagttattagagtactgttaatgtaatactgatgtagtttaaagattcaggtttgtgtattgcttctatactggatggaagagctatgctaatctattttatctggagtttacaacatatgcttcaaggttttagaaatgcaaagtggaagcaatccatgtgcagagttaggagaatattaaattttaaacagacttgttatattaggagcaattgatacagattcttgaacagaaagagaaagtgctacggaacaaaagactatatcgcttattataatattgtgaaggaacaataagattgaaaagcgatttggaagttaaagtcccagttgcgggggcggtgtcctgagtggattaaataaatttcgaggacaaaatttctataaggacgggatagttgtaatatcccggaaaaatatattgagattttaatt

SEQ ID NO: 109002 - DNA, 701 bp, Cannabis sativa
  modified_base (137)..(137): a, c, t, g, unknown or other
aatttacaccacaataaatgcactacttttttatttacatttatgtcatttttattattttaatagtatatttaactatcatattgaattatgaaatatttatattatttttttattgtcttacatattaaaataanaataaaattgattataaagttatttgatttttttttaataaaacattaattagatattaagttcttatatcaaattttttaattgtgtattggagcaaaaagttaaaatttggtgtaaatttaccacaaaactactttttgtgccaaatataacacaatttttacatctcccattggagatggtctaactttttcggcgactttttcgacaccgttgactttcttgacgacttttctggcgccaatgtcttccgacagcttttccggcagaacttattattgtttacaaatatttgatttacatcttttttttttacaaaaatatggcataaaaaaacttatatagatgtaaaaaaataaaaaaacctatagcccttagtattatttatttatgtcataaaaaagtaaatttttgtaattttgtcatgtataattcttacttactaaaataattatttaggtcaaattatatatagggatacaaatatatgagcccagatgagagattttaatggaacagtgcattcattcactctctctcgttctcttttttttttttttttt

SEQ ID NO: 109003 - DNA, 506 bp, Cannabis sativa
tttaccctatttacaaatatataaaaaaaaattatgttaaataaaatttttatttttctaaatatttttaattatttttctccttagtgtaaatttatatgcatttgatataaataatttataatatttttaaattatattttatcatattttaaagaaaatatagtttataaaatcactctaagttgatgtagtttcttaataataaaaatataaaatattttttaaaacaaaataaaaaattaaaatttaaatattatttattttaaatattttttgcttcaaaaaaaatattttatttttgtaatatataataaataattaaatacatttttagtataaattaatttattagtctttaattgattttttttttaaaagttgggtttaccaactttaatttcttaataaattcttcaatagattattttttaactctttaccaaaaatatttttggtacaatttttttaaaaagtaattgttagctttttaaaaaattgtgcta

SEQ ID NO: 109004 - DNA, 511 bp, Cannabis sativa
  modified_base (101)..(105): a, c, t, g, unknown or other
  modified_base (459)..(472): a, c, t, g, unknown or other
tggtctgatatggctcaaacatgtacattcttcgcccagctcctgaactcatggttgatcagctaatgtcttaccctttcctgcacagaagagcacctgtnnnnnaagcccagcaagacagtataacacatatcaacaataatatgctcattgtactatttaaacaataataccattcatatatgtctgtgtgtcacagacctgcatgttacactcacatgcctaattatgtctacgtggcttagacccatgtgttgcgctcacacatctatttatatctacgtggcgtagacctacgtgttgcacatctaaatacaataaggccttagaattggttcatctcggttatggttaccgagtccaacctgattataccttaagcgcataattcttgaatctcattacatataacataacatggcatttttacacatatattgtttgaaattattttaccannnnnnnnnnnnnntaacaagtatgtttaattaacaccctaatatgaattcta

SEQ ID NO: 109005 - DNA, 765 bp, Cannabis sativa
  modified_base (142)..(143): a, c, t, g, unknown or other
  modified_base (170)..(190): a, c, t, g, unknown or other
  modified_base (698)..(728): a, c, t, g, unknown or other
ggtacgacatactgaacacagtcctccctcacatgaacaacgccaattgtgaagggccatttgtcttatttaaataactctaataggttaattaaacagtttaatctaataaaattagttagcaacataattaatttcgaannatatgaaattaatttttcattggattnnnnnnnnnnnnnnnnnnnnnaaacacacttagtttaatgaaaattttcaagataaactatatgtatttttctgtatttaattaaatagaaaagttataactaattagattcttcaagacacttaattatttaatgtttcataaaaatatatttaagttgaaaatagttattataactaatttttgactaacttaaatttgaatatttttgaagttaataattaagtagatttttctagaaaattagttattcagatattctttaaatattttttaagttgaaaatttgttaattttggattaacttaaaatggaatatttttcaaattaagatgattagttcaagatacttaatttgttatctaattaaatttttgaaaaataatttaagttgaaattttttgttattttagaacaacttaaattagatatttttttcaagtatttattttattatattttttaataattttcgaaattttgtatattttataaaggattttccaaaattaaattaaagttgaaaatnnnnnnnnnnnnnnnnnnnnnnnnnnnnnnnttaagtaattttcattattaaaaaatatagactaaaa

SEQ ID NO: 109006 - DNA, 540 bp, Cannabis sativa
  modified_base (317)..(320): a, c, t, g, unknown or other
ttcagggaaagacagtgttttcgaagatcgatttacgatctggttatcatcaactcagaatacgggaagaagacataccaaagactgcttttcgaacaagatatgggaacaatgagtttctggtaatgtcattcggattgactaatgctccttcggcctttatggatcttatgaatagggtattcaaggatttcctcgatagctgcatcatagtgtttatcgatgacatccttgtataatctcagtcagaagaggaacacgaccatcatcttcgaatggtattgcagcgacttagggatcacaagttgtatgcatannnnaaaaagtgggaattctggttgtctgaggtatcttttctgggacatattgttcgaaagaatggaattatagttgatccaagtaagattgagtcagtgaagaattggctgaggccaaaatctgtgacgaaggtttggagttttctcggtttagtagggtattatcgacatttttgttggaatttattttaccaggatattagatctgctcacaagtatgttg

SEQ ID NO: 109007 - DNA, 1624 bp, Cannabis sativa
atttgattacgaggcttgaatgtgtttgcatttatattagtgttcttttttatttcatagagtatttgagcattaatttcactggaaaatattatcttctatatatatgctaattagttagatcaccaaaaattggtttattatttattcttttcaatcgtattttataaattattcaaataaaaaaataaaaataaataatatacgcatcactaatgcttattacactactataatgttgggcattcctatcggtcaaaatacacatagatctcatactagggtgtcttattgaggttgactttttgttggttattatgttgttcatatatattctgcttttactggttttactgttatttttttttgggtcagtataacacttaattttattttattttatattcttttaattaattaaacacttactttttgaatatatgtctcaatatcaatagaaggtaattataatttcaattctaaaatattttattatggtaataaaaacatgattatcatctctaagtgtccacatacattgttattctttctgcactaacctcttacacatttttttactagcctctcttataatgttctatggaattttcaacataatttgtggccaccgtatctgaattttcaacgtcaattggtattgttttacttgattcgaagccaggtattatttttctactaatatcgatctaaatattcggatgtaaatattgtgttacatatatgaaagataaaatgaaatatcatgtaaaaaatccccaatatattttccctttattttatacttaaataactttttgtaaactacatcaatcaacaccagtaagcatgtaggtttaatcaagattagaaagattaggaagaagtttcactatactatttttagtttttctaataatattccatatattaagatttttttttaatacttttttcttctattttaatatcgcacattctctttaatttctgttacataatatttgctttaaattctgcaaaacttttatcttgttcctccaaattttctataagtaaataataagtattattttgttatggcttatatatacccaattctatttgaataaccaattataatagcacaaatattactttaataaaataaatcattcgcatgatcatatctttagagaaaatctaaataagaaaaaaaagaactaaattttaaataaaaccacgtaacttctaactagtatatatatatttatacataagggtgactattaaatagttacattaaaaatgtaactatgattgttacatttttttatgacctgttataacaagttactaagaaataaaaattccaattttagactcaaattaattatatacttaaaataaattaattttttaattaaaatatttaataagacatttttcataactaatttttataattattttttattttttatttattatttataaaaaaaataaataaaatcagttagtattaagtaataggtaatttattaattatttttatttaatttctaaattaatcacaactgtttaataatgatccaatgactaaaaataaatgtaaccaccgtgtttacatatttgatgtaaccattga

SEQ ID NO: 109008 - DNA, 514 bp, Cannabis sativa
acatcttgggaagtgaacttaacaggattatagcctgatcttcatcctcaattttcactcccaggttattcagatctaaaatgaccttgttgtagtcatctaggttcttccttagttctttagtttcatccattctcaatgtatacagtttcttcttgaggtagagtttgttggctaaggatttcttcatgtagatagaggccaacatgttccaaaggcctagagccttttcttcatcagcaacttcccttagaacctcatctccaagactgagcaagatagcactgtgtgcttttgtctcaatttccagtttctttcttttgtcatgaatcaggttcaatgcatcaggattcagagcctcataatttccttgatgcaccagaaaatatctgattttaatcctccacaaaatgaaatcataagagctagtaaatttgtccacctcgaaccttgcagaagtcatttcagatcaggttcttgaagcttgaatctgattcttgatgacttgaatttg

SEQ ID NO: 109009 - DNA, 648 bp, Cannabis sativa
  modified_base (36)..(37): a, c, t, g, unknown or other
  modified_base (99)..(100): a, c, t, g, unknown or other
aaaatgcatctcataattcaataataacagtataannaattatttaaatagctataaaattattcataattaaacatgattaactgctaatttctaaannaaactaagcggtctttacagttgacgtatagaatcttctaaactaatccgggttagccaacaccctatccaacttctcaaaaaccagatttatgtgaggcccattacaccaagtaaactcgcccccttccatcctaatttccttgaagttacaatatgaaatggccttttgaaagtcacgcatcagagagtcttgtttcaaacatccccctttcttttcgttgaccttaataatctcattatagtcacctccacaaatccaagctccctgtaacatatctcagagtctctctaagagctgccaagagtacttcctaccacccggatcaggacttccatagaacccagtaaatctccaagtaaagcccagaccattttccacaatagcgtctatgtcagaaacagtaaaggacttaacactcacctcaaagggctctttccacaagagggccaaacctccacttttacctttggcagccaccacaaaacaactatcaaaacccagcacaactctaattctctccatcgcagcttcattaagtctagttt

SEQ ID NO: 109010 - DNA, 645 bp, Cannabis sativa
  modified_base (324)..(328): a, c, t, g, unknown or other
ttatactcacatacgataatcaaccatacactcatgttgatcagacatgaggtaatctgccctgccttgtgttattctcgcacttggcatccaatatgggccatcaagtaccataagttgtactcatccatgataaagttataacctccaagtgttatgctcacacaagcagcgagcccctaatactattctcatgctaacgatgcttaaaaaaatgtaaagagatcatcacaacacgtaatcaatttaaatagcaaaccaacccaagttgtatgcataaacatacaccatgtgcacagatgcccactcttcttacctcagttnnnnngaccacacttgctacctcgagcacctcaacaaattttcttgttgagaacaagatcctaaatatttattaacacaacaatacactcaaaatatattcaagtatgaatctctaaactcatacagaaacttacgtaaaaatacgtacacataagtcaatctcacttgcatgacacaccatacataagcatttattattttgattcacacaaacatattgtctttactcaaataaacatttttaacgtgtaacatgaattcatacaacacatttttacgtaaaattttactaaaatactatttattctaattaaaacccaa

SEQ ID NO: 109011 - DNA, 505 bp, Cannabis sativa
  modified_base (344)..(347): a, c, t, g, unknown or other
  modified_base (463)..(466): a, c, t, g, unknown or other
ttaatgagttattccattaaaagatactgcagtgattcccattccctctaccttgacacgtgtcctccagccgaattttgggtataacacagagcattatcatgatctaaacttggatcttctctccttcagtttggttaaccaatgtcttctacactatgattaagtacttgacttgctatgagtgggcatggtactctatcactaaaggctcaaattgatggagaacaatagaaggagttcaaaatcactatagaaggagctctcatttactagttgtttgatagagaatgaaaactaggtttagataggttggatgagaatgagagcatcatgttcctttnnnngtatttcaactagggtttaggatttaattatatggattaaaaaaaaaagataaaataataggcaaaaataacactaagtgacccaccatagtagttgttatagtgagatttctctnnnntagaaactcgagaccagactcctctttaaaggacacgtg

SEQ ID NO: 109012 - DNA, 546 bp, Cannabis sativa
gtcatgccactttttggttctttccttgtagattttagcgttctcataagcctcatttcgaaactcctccaattgtagtaatcttttctctcctgcatccgttaaatccatgttgagagtcttcatagcccaatacgccttgtgttttaattccaccggtaaatgacaagcctttccaaacaccaaccgatatggtgacatcccgattggcgtcttgaacgctattttataggcccacagtgcatcatctaactttcttgactagtctttcctggatctctgcactattttctccagaatcatctttatcttccgattagaaatttcagcttggccattactttgtggatgatacggtagaacagttctatgacgaacaccatatcttgaaaggagtgctgcaaactgtttgttgcagaagtgactcccttcatcgcttatgattgcttggagagtaccaaaccgagtgaaaatgctcttttgaaggaagcgaagaactgttttaccgtcattggctggtgttgctgcagcttcaacccattttga

SEQ ID NO: 109013 - DNA, 536 bp, Cannabis sativa
gcccccaaataaagagaaagaaaacactaaattccaagtgaattcgaaaagagtcgaaatctcaaaagtgaaatagaagcattagaagaagttgggagataaatacctgagaaaaggttgagttaatggaggaaatcggatgagagtgatcgcagagacactctctgtgtaaacaaatgaatcaaaatttcgcagaaagtgaggggtttgtctggttttgggctctctctttcttctcaagtttctgtataataatttaaatacgacaccacattatattaatttatatattcactcaatttagatttaaaattaaaattaaatgataataattgatattcattctaataataataataatttttttaattattatgtttaattatctaatcttttttttacttgatatttagtaccgttctattcaaataaatatattaaaatgtaaatttgagtttgaatattatcttctaatttaatttattttataattaaaaaaataaaagtgttattaaatcgtacctaaataaatattt

SEQ ID NO: 109014 - DNA, 770 bp, Cannabis sativa
acacctattctacagtcacaaaaagtcaatttttggtgtctgttttaaaccgacaccattaagttttggtgtcgttttataaccgacacttaaaatgtacagatttatttttttcctttagtgtcggttttaaaaagacacttaaaggaattaaaaaataaaaaaaaaactaaaatcagtaagaaaaaaaataattttaaaacataataaaaatataatttacaataaattacatttaataaaaagactactatcattctacataaaattataaacttatttattcactactacaaacataaataacaaacttattgaatcaaattaaatcaactagtaacttcaaaaatactgccaacatccaatccaagaagttagttgacatttgactagaactagtgaaaactccttgcttgattatctttaatatatcctgttcaataaaaatacagatcagaataaaaaattgattagcttataatacaagatagaaaactacttcaagatccaacatacaataagcttagcttataattagtgagtgtacataatccttaccaaccattaataaagttctataccaaaataaatatattatttacaaatcttaaataatatgtaataaactatccaaaaaaaaaaagtaagtacacaacagtaatcctaaatcaaaataagaaatgttacaaactaatttctaaaaatatagtagatcaaaaagatgcccccaagcaacaaaaagaaagtaccacaaataatcaagtaagtta

SEQ ID NO: 109015 - DNA, 650 bp, Cannabis sativa
attgtgagcaataagtgcgacttttcttttatagaaaaggaaagttttgctccgggtttctcctcaagaaatctgatcaatcaaaatgggaaactcacacaagataaaaatatcacaactgttagatagaaaagaattgagtaaccaaacttaccctttttaccttattttccataaataggaaagttagacaactttccttccaaaaataaaatacttaatataaaagtcacatacaaaatatggaaatcaatattaacaccagccgaatttaaacaataaataataaatatttttgtcacattaaagatgccaaaaatggaattaacaatctccccctttggcactttgattgacaaaatattttattcggagaaaacctacatcaagtgttagaaataaaaacaatagagtatagaaagtactcccatgcatgaaagcactctaacacataaaacaaataactttttaaacggaaaagttcacaaaccacaaacaaactaactctccctaaaacaagggtccagagttgtaaccaacaatccaaaaaataactactttttccctctttttgtctatcaaggagccaaagacaacaaacaaaatagacaaagtcatcatagtacaataaaaacatagataaaaaagca

SEQ ID NO: 109016 - DNA, 648 bp, Cannabis sativa
  modified_base (147)..(147): a, c, t, g, unknown or other
  modified_base (362)..(364): a, c, t, g, unknown or other
  modified_base (436)..(437): a, c, t, g, unknown or other
tccagaatacaatacagttcaactttcacaagttattaatattcattttctatcaatggattcaaactgtatgttaatgtatggaatttaagtttagtattgtgtgaccaggttccacttggattattctaagaactctttgatgtnactagacctaagtcatcaaaagattacaacgacattttagtatctatggcatttatctttgttcatagtggttttgacaagatccttctctacaaagagtcaatatgcctatatccactaaaagtaggatcatctatattcgaatatggatgtacattcaagggcggatatgagttatcgtcaaattcttagacgatcactctagattttacctnnngcaaagaaatttgaaatgtttgtgaaatttcatgaatttctagcaacggtggaaaaccattaaggtaagtgnntaaagatcttgcgaactaatagggctggagaaatatttggtagatatgcagtttaaaaatcattaaattgaattttgaattgtatccaaacttacctccctagaaattcagattgcaaattgatgaaagtgaaggtttatgattagttactagttgttgcctaagtccttctagggaaataccctagtgataggaaaatttcagaatgatg

SEQ ID NO: 109017 - DNA, 603 bp, Cannabis sativa
ctaataatttttttttatttcgggccccaaaaagagtgggcactagacacgggcctagctcgcctatgcctacggccggccctgtaaccaagttttgatgagtcttcttaaggaaattttggaatgtcttggtccccaagttatcacgatgctcaagttttgtaactttataaatatgtgttctgtgtatgagagagaggtgtgtgtggagaaaaatagtgaattgtgaaatgataactgtgtgaatttgttgtgtggtgagagtgaggaagaagtaaatggtatattagaatttgggtgaagagattgagatagataatatatgtaattttgaagtgataagtgaactatatctctctttgtgggtttggtagttttaccaaactaagtaaattgctttgcttcgtttctttgttatttcatatcgcttgaagtttattattttttccaacaagtggtatcagagccaaggttcagatctacatcgaatatgtcaaagatggtgtcttccacaaaatttgagatggagcttttcgatgggaagaataatatcagtttatggcaaagcatggtgaaagatgtattggtacaacaagggctcct

SEQ ID NO: 109018 - DNA, 708 bp, Cannabis sativa
  modified_base (161)..(165): a, c, t, g, unknown or other
tactcgggggcgagtaaagattcagtttgggggagtttgttaggctatttttagcctatattttggatcaattttatgttcgcttttcactgtttcagtacggaattacgcttgttttctatgttttcaggttctttggaataatagaggtctcgggatgnnnnntccagtaaaagacgagttgagccaagaaaaacacctttttgaggagagatgcatatctggccgcggctagattagcttggccgcagctagatcacgaaggcagaacccagagtttttgaggctccagtcgccgcggcgagatactccctcactgtggccatataaaaactacagaagcgtgattttaagcatctatctggccccggtgagacatagcttggccgcagcgagatcccgtacagcccaggggtaaaattgtctgacgaaccctaaaaatcacttataaatagaaaactgcgattggaagttaggggaagcgatttggggacctaaaaacacagcagaaagcaacaggaagagcggagtgatttaaagtgaagatccagaattcatccaccaacagtttctttctatattcctctttaattcatttatattgaatattgtcataggaatggttatggatttatttctgaactaaattttccatttagggaggatgatgaatgttgtttaatgtttttgcctagttaatgcatagtt

SEQ ID NO: 109019 - DNA, 1518 bp, Cannabis sativa
  modified_base (1450)..(1464): a, c, t, g, unknown or other
tatggacagtgcgagtatcttggctagagagcctcgatccatggatgcactcatggatgcttgcaagcatgactcggcaagagttcttcgagacacggaagtgtgcacgaggcacacggttgagcgaaaaatgggcccattgttactcggatggttggaaggctaaccttgacatagagaagtcaaggagccacacgggtgttctgctgcctgaaaaggtgagcccgtgacacatggcatgtgggtccagaggtattgtctttttaggaaacgtaaaccccatagaaggtatctttgggagggcataaggatggtacgggtggggatggaaagcctcaactgtgggtcgtggcgcgaggagtggtcccttgttccagaaacaataatttcatgccttggtattttcctgccagtatcacgtacgcccacaactttagaggaaccagattcctccatcatagacctaaccgtacatgcaagggtcagcatatagttaggcaggtcagcatggggctagaccccacgtctctctctctctggtaaaggccatgtacatcgtgccaacattcctagaataagtaactgcatgcaacatgcacccttccaactcctcaaaaactctgggttaaataaacaatgacaaagaaaacttaccagttgacatgcaaaggtgagatgggtgttggctatgttacgttgtgtccagcaaagtgtgtgtctaggaatgatccagttagagaagtcttacaagataggagagggaataaagctaaatgccaaaactctgatgcgacaaacgggaaaaatgtgaagtttaagatggttgctgtgagtatttattgagcatcaagaaagtgtgccttccacgaggggcgaacaattcgaatcattcaccaaagggatgtttgacgattggatgaatggggagttaggaagattccaagcatttaacttccatcattgcatgcttcgtgaaaagtgttcagtaagtgaagagtctactcaatcagatcgccactattttggtacctcatcaaacacacatccagcttgcgcgcaaattacaaaagtcaatatttaaggttcaaacaatgagcaaaaaaaaaataataccttttgacagtaacacttcagttagcagctgctggcataatgtaataagaagctcagatttgtcccatgtgcctggaatcaatcaagaggtaacattgcaagctcccgaatcgtggcacttcccagaagcttgggaagtaaatgttgtctagatttttttaagcttgacacgtggttctcaatcagggaaggctaagatataatcagttgaacaaccccctttactactattctagggagataaatgccccaacttgtgaaaagggcctccgtgattaggaatctcctaccagtaaacaatatgatggatgtctgctgttgaccgaggttttcggcnnnnnnnnnnnnnnnattataataaagagctgtaagaaagtgagatgaagattttttacgtggttgggg

SEQ ID NO: 109020 - DNA, 857 bp, Cannabis sativa
  modified_base (222)..(230): a, c, t, g, unknown or other
tctctctctttctctcttctattttcgaccccttagtgatagagtgtttccacacataataagttagtactcaatcatagtgtgtaagattgtgaagaatccaattcaagtgaaggagaattggctcagattttggtgatactctgttacagagaggatacaagggttagagatctgagcgtaatgagtcatttaattctcctgcaaccaatgtaaggtttnnnnnnnnntatatgtgtttaaattacattgtttaagaaattcatatttagggtgttaaacaacatacatgcttgtaaatctagattctagtaaaaactataatccaacaactggcctcagagccatggtaatgatttactttcttgaaatatggatttaaaatgatgtttgtgttgatttggatggtttcatgttggtttatgtgcaaatttgatgattgtatggaaatcacaatgcatgttctaaaatattttttgttttgttttggaaatattttaactggaaagtagacaaaaaactaatgaatttaggcttttatacaactaaatttagattttttatgaattagttataattttttgaatttggatgaaaatatctgaaaccgagcaacacgctgtgtgcgcgcggatagggcttgacacggcttcagacacgcttatgtccaaatttactcggacaagggcagtcctaagcccctcctgactgaggttttcccctcaccccaagaggcagctagcatccctttcctcgcccaaatgcagccttgtgcgtgcatggggagtatgcaatgcatactcccctagtgcaatcttgttttggtgatatcttttgattcaaaaatcgtttttcat

SEQ ID NO: 109021 - DNA, 529 bp, Cannabis sativa
catcttccacagaccgattttttttatcctaaaccagttcgttcctcgccttccaaatttcccaacacaatgttcccgcttgagcaaccttaatctcatcaactctgcccattagatcttgcagccactctttaaaagagtcccatacccgtgtaccaacacccagccccaacctcgaccaacaaccagcagcgaagttgcaatttaaaaggcaatgcgatatggtttcacttgatactaaacaaaagggacaactataatccaaaggaacctttctatcaaaaagtctcttccttgtaggcaaacaattcgaagcagccctccaaagaacatccttgacagtaggcggaacttttaagctccaaaggttcttccaaaacattgaatcaatgtcactcacccctgcattagtctcttggtttatgagcaattgatatgcagacttgaccgagtaaacaccagccctttctttaaaccagtaccaagaatcacgagcctctccagcagcaagaggaatgcccaaaataac

SEQ ID NO: 109022 - DNA, 964 bp, Cannabis sativa
  modified_base (241)..(243): a, c, t, g, unknown or other
  modified_base (891)..(893): a, c, t, g, unknown or other
atgtcctggaaagaacataacacttatccaaggtgtaagtatgctttatcgctaactatcacatcagggtaaatcatgtgcactgatgaatcatgggacataaacttttgaagcatataatcacaattaccttccactgtgttgacatcaatctaattgtgaataactatatgttcttaatttatcagaaattgcatattaacccataaacataaaaaatacatgtaaacataaatgactnnnaatcttctattgataacaaataagcttatattcaaatgtgttttatttagggcataaaatcccaacatatatggtataagccatcactatactccaacactccaaaagataaatcccaaagtcactaccgacacttcactctacgagcatgggattttaaaaaatttttccatgcatatttttcaaagtttaatctccaataggcagcaaagtcagtatatcgataagataaacataaatctcaatgtcattactaacacgttactttaggagcatgggattttaaaaatatttgccagaatgtttttttcaaaatttcaactcaaatagcgggcaaagtcattatatcgacgagataaaaataaatctcaatgtcgttactaacacgtcactttaagaccatgggattttaataatttttgccacgaatattttttcaaaatttcatcttggacaggggcaaagttggtaactagctatataaaagacaaatgagggtgctccatggagccataactcaaaaaattccacttaccaaagacatatcaaatggcctacattggagactttgacaagtgggttacgtgctaaaaattgagtacgcaaagagttaagacccataccgactgttggaaatattttaccagnnncttagatttactaacaagtatgctgtttaaacatcctaaatatgaacttttaaaacgatatgaaataaaca

SEQ ID NO: 109023 - DNA, 950 bp, Cannabis sativa
tccttgcataacagaaattaaaatcgagcccttaaatgaaaaacgccattaacattcagactaagctttaaaatgttcaatactctatttctaactcaaaatcacctcaaattcaacaagtaaacattgatactagtcccataggtaccaaagaacaattgtacgaagtcagaatctccataactattctaattcacagaactcctatataaaatcaatcatttttagcttaaaacttaattaaaccataccttaagttttctctcttcaaggatttgctatcccgctactaccagagcttagatcgctaggttttgggttgaaaatcgaagaaaatgaatataggacgagaaagctttgtcgaagggagagaacgagggtttcgttcgttctttagttactgatatgttttaaaacatataatatatataatacaataataataataaaattttaagattataataattattataatataatataataataatattaataaaatttttatttttaattgttattttattattttttagccactaagaaatctttatttctagggtatttagcccacttcgagtatcctaaaataccttgatatttctaaaatcaatttatcccaataatcccatcaatatttcttactaaaaccattttgacatttttttgcctccaatcgagtctctagggtcggcgaatatgaaaatatttttattttacaaataactcatattatatccacgtatttgaaataaatctccgtaattaacaaattacacttatttatccacttatcagatcttcaaggtcgccagacctgaaaatatttttattccacatatagctcatattaccatgatatataaatctccgttatttataaattgcgcttatttactcacttatagcaaaaattaaattttatgctgaaatagattagtaggatc

SEQ ID NO: 109024 - DNA, 568 bp, Cannabis sativa
tctttattattatttttggaatagaattacgcttttattctttggtttcaggttttgacacttggaatgcataaattggataaatttaggaaaatagtgacctataaaatagagaaaattttgaaagaaaataaagctaaaactttaagcctgaattcgactatattctgatcatattttacaaattgtcaaaacataaaagttttagatctcttttttatctttctaaaacatcttgaatctgcttatttggagtatggataagaaagttatgaccattttactgagaggtcaaagtagaaaaatgggtccaatggttgcggtaagacttttggccgccgcagcgggggactacagaaagcccattttttcacaattctacagccgccgcgacaaggatattggtcgctgtggtgccgacttcatacaagtcaaggataacttcatcttttctcattttttgactgaaaaactcaatttaatgaaagggggtcgcgaattatagaggggagatgtgacaatcagtagtctcgtgatccgtaaagggaaataccgggtaagctgtgca

SEQ ID NO: 109025 - DNA, 612 bp, Cannabis sativa
gagtgtgattggttgcgggattaagcccccttttacctcttttatagcagaatatattccaagtggcatgagatttactgaagctccattatctactaaagcacgtttaattttcaggccattaatcttcgcctcgacatataacgatcgattgtgaaggaaaggagacgtttgtatgtcagcattggtgaaaacaattgctccttcagattttttagcaatattatgcattgggcgccccaccatataacaagaagggccgtgttgttgggaaattttaagcaaaacttctgtagcctcagttcttgcatctttcccaaattctaagcaatcaaagaagttactcgaaacaatttagtctttaacaacaaatctaccatgctgtctggttttggtggttcttctataatttattcgatatgtatgccccgtgatatccctattgaaatgggggaaactcttctgtgcacgtcatagcagctcctccgttttgatgttggggaaacggtatttgttccacttcatcttgatctaagataatttccccttttgctaatcgctcatgaaaaattttcctcagagtgtagcatcccatggttgggtggttaatct

SEQ ID NO: 109026 - DNA, 991 bp, Cannabis sativa
tggcacacattatatatgatggggtgtcacagtatatatattgtatttttttttattattttagataattttatttaaaaatttaaagaagcttcctcacttatttgttgcatcttttatacttcatgccactgggcatctaatctataatatcttctttttttttttggctgaaatatcattttatttcttttacaaaaaatactgtattcaccctatgccacaaaatcagtaaaatgtgacttaaactaattaaaagtaattatggtaagtttgagaaaaatgaagaagaatttgaattcatcgtcttcaagaactcagacaaagtacctgtccgacttgggttcttgttgttgtagttgctgctgctccaaaacaacgtcataattaataaggtgtttttctactaatactgaaattttcaattttgttactattgtgaggcaaatttttttttcaaaaatattgtgtattgtgttaagtttttacagttgttctacgattattttttagttattccactgttgttttaaataatgtattagcagttggaatgttttttaaatgtaaagatcgtgttgaccttcttgaccagtttttatagttttggaagcttgaactacatggcacatgctgctctacttgatttgttatgttggctgctaattcttccatgagctgctctacttgctggttggtaatacttttttggactgttataacatgagcctaactctttgactgagctccttgagtagctagcagattggcctactttgaatggtcttgactgagagtctgagactcccagttattggtgatcccttgaaaaagtctactctttgtttttttagaatggttaatgagtttgtgtttattagttcattagagttaggatatttataaaatgtaaagacagtgtttacttgaccactttacttacatatagttctacttggtttgcttctaaattcttccattagctacaaat

SEQ ID NO: 109027 - DNA, 1407 bp, Cannabis sativa
ggtccgattggtcggaccccatggtccgaccatcgaccctgggcctttttttttttcattcggttttagggaaagagaaagggtttgagttatgaggggggtattttttgggttttgaaaaaagtgtcatattttttgtagtgtaaaatgtattggtttaaaaaaaaaatttaaattttttaagtatagaaaatcaaatttcccttacttaataaatagataaaaaaatatttaaagttagcagagtacacatgtacaactttttaatctttaatttttttctcccaggaaagaatacttgataagctataaagctcaaggatagtggaaaagatcagctatattaaataaatttaaaatcaaacaaaaatcaaaatagaagcatatcttaagagttttaaagtatattttttttccactaaaatttttgatggttgcagcttagtcaccttcaatataaaatatgtctacattttctcatgataacaataagagcataaacttgtggagtatcgccaaccagagagtagagacttcacaaggcaacaaagtacaccccccacaagtattaagagtcacaaccacccctagcactcaataatttgatccacaaaaactacatcaaaattcatttttatcccatcaatatcaagagaaaagaaccatttatataaggagaggattttcttataaattcaagatggcatgcagaaagagataagatataataaaagtacaataggaagaaaatttggaaaacatagaacctaaaagatacaaacttgttcaaacaattaattagcatgccaaaaaaaaaaggcaaacggtaaagcataatataatacagtaaataaacctaatataataaagtactaatacctaaacggctaaacatacaacaataccctttttagtcaatagcaattactttcacatctatgaacaaaagcaactgctatattatagaacaaaatgtatggtgcaaaaacttaattaaggatacaaaaatatacaatactatacaagcatacattacagcatcaagttttgatacctcccaatgtcttattttaatacagtattaagcatacaaaaatacctagatgaacaaagttgtatgtatacataaaaagaaaattaagaagaaaagaaaatatgacctgacatttagaaatgagtttgcattccaacacttgatcaattccagtactaatgtagcaattccttgactaatacgattaaagaaactataattctaaattttcataatgaaaagtagctgcttctgttgagaatcatgtgatttcatctcaaaactaattgacaatgagtggagtagtccatgttcttatatatagctcaattctctactatttattctacgtggaacaatgtccacaatattac

SEQ ID NO: 109028 - DNA, 752 bp, Cannabis sativa
ttgtcatccactcgttgggagagttgtgtagaaaatgttaaagctataagatctcaaatgtcagattttagagaagctttacttgaagtgtcagaaaatgatgaacttgattctaaaataataagaagtgaagcaaaatccttggcaataaataaacttagtgattttgagtttttaatagcaattattatttggtttgaaatcttatctgcaattaatttggttagtaaacttttacatcaaataatatgcttattaatgttgctatggataaaataaaagggttaatttcttttttcgtggaatatagagaaatatgtttttataatgtcttggataattctaaaaaaattgctattgaaatgaatatcgatccaatatttcctcaaaggtacacaatttgaagaaaaagacaatttgatgaaattttgaatacctcatttgttgagttatctagagagatatcttttaaaattaatttttttatttaccttgttgatcaatccattgcttctcttactaagatatttgaacaatgtcaagaatataaaaatatttttggtttcttgtttacttttgacaagctacaatcgcgagacaatgtaaattttaagtcttgttgtagtcattttgaaaaggcattgaaacataatgaacaatatgatattaatgggaatgaattatatgtggagttgaagctattaagacaaatcttgcctggagagaagatgagagctatcgatatattaaag

SEQ ID NO: 109029 - DNA, 581 bp, Cannabis sativa
gttagttagggtgttacagtatacattattatttatgtgctaattacaaaattataaaaattattatatatttaattggtactgtaaatactctgtaggaggtatttaatttttttttcttcttttgttaaatcaataacgatataaattataaaaagtaaatgaactaaaaaatattcaattaaatactaaattatataaatttttgataaaaatgaatgttatattaatattaatataattagtaatttttttttaaaataaataataattgatgaagattttaaaaaataaaatatataacaatttttatataaaaaaatgactgaataatgttcaattgaagtaagaaaaaactagcctatttgaaaaatattaaaaaaaaataatattttaatatatggactatttagaatacaaatagatatgtgtaagactaaataatatatgaatatagtatataaaattttttatagcaacataataacaaaaaatttaatcggcattacagtagagttataaatttttataaatgacccttgttattgttgggctttgtgccctaaataaaactcatttta

SEQ ID NO: 109030 - DNA, 537 bp, Cannabis sativa
  modified_base (466)..(502): a, c, t, g, unknown or other
aaccaagccctataaggtatcccgctgaaggaaatcaaaagaaaaaccctacttctacccctgagagaaagaaaaaggtgcaggaaccgcgaaaggttcgcttagattttccgaaagggaaaggtccgcagaggggcaaactccaaaaaaggagtcttggcccccaggatcgagaggaccgaaaaagcgttttcgtgcaccaggaacccggaggtagaggaagaagaggacagaaatgccctcccctcgatttaagaaatcaaatcaatgggaatcaaggtgacctccaggatcaccttgaccaaaagaaatacgggaccgcggtctccacgagaacgttaaatgaaggaatcatggcagaactcgccatactccgaaaagatatcccccgagtctctcggagacaaagaggcgatgactctgactccgactacgaggactaggagccatgtgccaagcacatccnnnnnnnnnnnnnnnnnnnnnnnnnnnnnnnnnnnnnaatggtagcttataccgggaactccgatccaagcg

SEQ ID NO: 109031 - DNA, 502 bp, Cannabis sativa
  modified_base (200)..(201): a, c, t, g, unknown or other
gcttgaacaggcttcttgctattcttccacttcttcttgttctttggtttggaagtaggggcaaagtttgccccagctttagtcgccccattaccatttccagaattttgaggtttacttcctttcttcttcagtcctccaatcaaattttcatatgtgtgaaggtcattgactaacgtgtgaaagtcttgttccttctnnttcatgacataatttgaagtgtagggcagaaaggccggagtcagactattcaagtaagactcacttgatttgtctgatccatttcagctccatgattctgagcttcctggaaataacttgccatctggagaaggtgatcacgaacgttctgatgaggttccatccgtgcattgataaatttctttgtcggatcaaagcaaaactgaattgatggcattctgaatagttcagttaactgtgtcatgatttctgcagtcgtgacagtgtttacaaaccatgttttcaaggtgtcaaccatgct

SEQ ID NO: 109032 - DNA, 500 bp, Cannabis sativa
ccatgatgccacatcgagtttacttctattcgcattccagccttataagaaacctctacaaagtttttcaacctcctttgtaacactatgaggtaatataaaaatgctcatccaatagtttctaagcccaagtaaaacaaagtgaataagttgagccctacccgcaaacgagagatgcctagtagcccaagtatggaatctttgcttgattttcttgattatcacgccacaatcttcagctttccattttgttggtcttagagagacccctaggtacttaagaggataagttccttcttgaagagccaattctgtcatcattgcctatttatcttcctctttgacccccaaagtaaagatgagatttgttggtgttgattgcaaggcctgaagttgcactaaattcatccaaaacctcctttatctcatgaatagagcttaagtttcctttacagaataacatcaggtcatccgcgaaacacaaatttattatcttaaga

SEQ ID NO: 109033 - DNA, 1110 bp, Cannabis sativa
aaatggatgtgaaaactgctttttctaaatggagatttgtatgaagatgtctacatgacttaacctgttggttttgaggagcttggaaaggagcatatggtttgcaagctcaataagtctatttatggacttaaacaagcattaagacagtggtatttcaagtttgatgcagttgtcattgcaaatggtttcatggagaataaagttgatcaatgtatatatatgaaggttagtgggaacaacttcattttcttagtactgtatgttgatgatattttgcttgcttctaatgataaaaatctgttatatgagacaaataaattattatctgaccattttgatatgaaagaccttagtgaggcttcatatgtacttgggatacagatcctctgggatagaactaaaggtatcctttggttgtctcagagaacttacattgatcggatattgaaaagattcaatatgcatacttgttcacctggaaaggcaccaatagtgaaaggtgacaaattctcaaagggcccatgtccacaagagatgaaatgaaagtggttccttatgcatcacttgtgggtagcctgatgtatgctcaagtatgcacacgccctgatattgcttttgttgttggcgtgttaggtagatacttgagtgatcctatacttagccattggaaaggatctaagaaggtcatgcggtatcttcagggtaccaaggatcatatgttgacttatcggtgagctgacactcttgatatagttgagtttagtgatgtcgattatgtaggatgcgtggttgataagaaatccacatcatgctacatttttatgatggctagaggagttgtttcgtggaaaagtgtcaaacagacactcacaacatcctcaacaatggaggcagagtacatgacatgttgtgaggctacatgtcaagtaatatggctgcgggacttcatttcagcattgggtcttatgaactctatctcgagcccgctgaaattgtattgcaataatttcgtagcagtagctttctctaaaaatgttagaagtacttcccgctctaaacacattgacataaaatactattttgttaaagagaaagttacaaagtctc

SEQ ID NO: 109034 - DNA, 3093 bp, Cannabis sativa
ccttttgtcaattctaccacattaccccctgaacagcaaacttttttctgtttacctgagtcatcttccactgcctcaggttcttctcctcatttctcatctaatcctgacaccacttctgtttcttctctgccttcaaccagatctgttagacacactgttaaaccatcatacttaaatgattatcattgcttcttatccactaataatctttctgttgcttctcaccagatcaacatgttattcggtgtaagtgggtctacaaaatcaaattaaatgctaatggttctgttgaaagaaacaaagccaggctcgttgctaaagggtacattcaaaaagaaggcatagactactcaaatacttttgtaccagttgctaaacctgtcacatttaagcaacaacttgatgttaacaatgttgttcttcatagggatttgcatgaagatatttatatgactatctccagggtatagtcctaagggggagacaccattaccacaaaatgaagtatgtaaactgaagaaattcctatatgggttaaagcaagcttccaagcagtggtttgaaaatttttccactgctttgttggaagaaggcttttctcattcagctacagactattctatgttaagacattcttcaactagtttaatcatcttattggtttatgttgatgatattatactagcaagtaacaaaatcacagagctggtagttttgaaaaccaggttacataacaagtttaagctaaaagactttggagatttaaagtactttctcggtttggaggtggcaaggtcaaacaacgggattttcgtgtctcaaagggcttatgctattcaacgacttcaggaccttagttatcttggaagcaaaccagttagtacacctatggagccaaatttaaaattgtcacaagatgaaaatgacatacttgctgatcctacattatacaggagaatgattgggaagctacagtatcttacaattacaaggcttgacttagcatactcagttaataaattgagtcaatttctagccatgcctaaagccaagcatcttcaagctgcccaaagagttctaaaatatgtaaagttctctcctggacaaggaatttttctctctgctacatcagaaattcaactaagggcccccactaatgcagattgggctgcttgtgtagatactagaagatctataagtgggtcttgtatcttccttggcagctcaatcatatcctggaaaagtaaaaagcaacaaacagtttctagatcttcagctgaagctgaattcagggcaatggcaaacactacaagtgaattggtttggttgctatctctactcaaggaattaaaggttgacaactcaaaggaccaactataatgtactgtgacaataaagttgcacaacatattgcagctaacccactctttcatgagaggacaaaatatattgaaatcgattgtcatatggtaagagaaaaggttcagcaaggaattgtcaaaactgcccatgtttcatcgagagaacaacttgtagacattctaactaaggctctatttcctaactagttcaagacacttaaagacaagattggattggtaaatatataccatccacatcttgaggggagtatcaagagtaggagaatcagttgctaagctgtcttgagttagttaggaaagtttgttaaagttgttgtgtcagtaagaatcagtcagtttccattgttgtatctcaatatacagagcaactatatatagctctctcccctgtttttccattgacattaatgaaaacacagagttttcttctttctcttctctctttctttctggtttacttagctaacagttactgtcgatcaagaaaatagatctaatttggattggaatttttatttttaaaaagaaaaattacgtagcttaagattatgtttggaaattaggattgaattaagctgtcccattgggattattgaggatattagacccaaactcagcatgcccttgtcttcggtgatatatgtatgttttagtaagatcacaattgctcgaacacgggccaaattcataaattaattgcccaatatgttagggattcttggaatttgctttgaataggtgatgatctgtgagaagtttgcgtacttggacagggattcaagctgagttggttctaggaaccatagcgaggaaagagagcaaaatgggtgacagggattacttggacgatagggttagcttcagtgaggataagctgatggactcagaaagcaaggcggttatgatggcttgggagaaaccattaatggaggctcatgctaaagctgtttgttcaggaggtggtcacatattgaacattggatttggtatgggccttgtggatacagccattcagaaatatgaacctacttcacatactattgttgaggctcacccagaggtttataaacgtatgcttcaaactggttgggctaagaagaaaaatgtaaagattatatttggccgttggcaagatgttctgccacaacttgatctttatgacggtgagtcgaatttaagatccattcttgcctttgttgccatatgtataagtatatttttctgaactataagtttttgacatgttttttttgtgtgtatccattcaggtattttctttgacacatatggagagtattatgaggatctaagggagttccaacagcatcttcctgtgttgttgaagcctgggggtatctattcgtttttcaatggcctttgtggtggtaacccattttttcatgttgtctactgccagttagtgtcgctagaactggagagtttgggatactcaacgcaactcatctccttgcctgtcaaggattgtcttggagaagaagtttgggaaggtgtgaaacacaaatattggcaacttgatacatattatctccctgtttgtcaatctatagagaaatccgagtaacacagaattttcagctttttccttatttattttgatttagttatatcggatcttaaggactacagaatccataaagtattgagttagtagggcatgttacagttaacctctctctctctctctctc

SEQ ID NO: 109035 - DNA, 530 bp, Cannabis sativa
tggtgacttcttgtgccaggtataattttattaaagagttttaagctttcaaacaaataatatagcttgttactatacaacatttggaatatttctttgtttagttatgcaaaaatgtgcagttacctttgagattcagccttaattgtcatgaaattttgagtaatctacttcccttgattggaaatcttagattcactgatgcaatatttgttgcacaatccaaacctcatgtttatttaataaatttttggcaaatacataaacatggctgctttggatggacaatagcagaatcatgatagttgaaagtggcaatactaagctctgaatatgaatttggttttgtctgagaaaagatactgacaccgataattgcagctaggcacattaagagagcttcaaaggctctacgatgagcttgttgattcagctaatatctgtcgattggatagatacatagcttccgagaaagttggaaggtaactcttttgttctcattctctctgttttgaaccaaatttcctact

SEQ ID NO: 109036 - DNA, 518 bp, Cannabis sativa
ggatttgggcaacacaggtggctgagccaatctatcacttcagctcctggagtgaagtttcacattcctttgtccactcaaatttgttgttgcttctgcttcatgttaaagaatggtacacatttgtctgtatacttagacacaagtctgcttagtgcagcagtgcatcccgtttggctttgtacttccttgattgttgtgggcgacttcatgttcaaaagggcttggatctagtccaagtttgagcttcttcatgttgtagatgtggaggattttgaaattttttatcggtcctccatatgccccagcccttttggacttgacaagctcattgtccacgcacaccttcatgttgcggctgattggatcattgaacatttttttcataagcttctgatgtgtgacccctgcattcttcagccctggggggcgtgaatttatagcagcacatacctaagtttgtcacgaagcttgtatgctcatgatttggtgggtgcatcttctttttcttggctttg

SEQ ID NO: 109037 - DNA, 599 bp, Cannabis sativa
cccccagccatttctttaggggccgagctaaccttctaaaatttttaagttgtgtttttcgtgcgggtgaggtcatttatattattctcgcactttcaccacactgaaaagatcttctatctttcagatgagtgacctgtcggatagccaaatgctcgactcaggaggtggtgcttttgttgacgagtaggataaagaagatagctttataccagcttcactctctgaagaagaaacccctatcaccaaaactatgactttaggctcgttatcatccgaagacatagaaagaatggttcaggaactcgttgaaccagggataatcgagattcgcgatagcaaatccacggtgtccgcccgtgaaaaacctcgttcactctaggcatgcccccgacatcgaagtcgatgaaatgggggaagattgagagatacctgaccgcgagtcaggagaagaggaatatgccgagggaagcgggacaaattcagtggacagtactgttgggttttatgccctaaataaaactccatttcaatgtaatctttattctttaaatatcaataaagaaacataagtattttcatcactcatttgtgtgtca

SEQ ID NO: 109038 - DNA, 662 bp, Cannabis sativa
taatagaatagaatctctaattataattttaaatgcatttataaattaccttagtcaaattctgatgattgaagtctaatttgaggattatatacactatactacctactaatataatactattgaggtcaagcaatgtatctctttctctttctgttgttttaattgaagaatatatctactaaaataatgcaataatattttttgcattttgatcgaggttgcaaatagatgatgaaagccagctggttttttttttctcttagaccagtttgacaactgagcttttgactcaagaaaaatgttgagaggtattgatgtactaatcaatatcattattaccatctattatactaagtatcgacatttatatattttaattgaattattattataaaaattagagtcgaaccttaaaagcagtttgtgcctaaaaatccactgggagtaaaaaaaaatagtgttcacaataattttaaaaaaatattgtgtatacatatctttttaaaaaagaggctaatatttattttaaaaaaaaaaaaaagagagagaaatgctcatctcctggtttgaaatattatatgcatattttataatgtttatagtattgtttgaaaatattacatatttttttcaataaagtgaaaacatatttttttttt

SEQ ID NO: 109039 - DNA, 930 bp, Cannabis sativa
taatttagttttactcgtgtttggagtaattttacgcttgttatcttttatttttgtagatttaaaatagaagaagatttaaaaaatatcaaaagaaactaagatgaaaaaaaaaaagataaaagatcgcataaaagatagttatgcaaaattgagattcggcctaagaaaaaaagatttgacaccttgaaaatgtgggaaagtacacacgggctgcaacccgtatcgtgaaaagcaagccccttcgtgtgaaaaatgcacacgggtcgcggcccaggaaaggcatgccgcagcccgcccctattctgaagcagaaaaagatttatttctcaacgtgggcttattgtggtggcctaattcaaagctgaataggatttttagcatgtgcaattgttctatcttttgtccctcaataactatataaggagtgaacttcaattgatttcggtaagcaattcaaaaggaaataaaaaggcagaaaaaaacgaatttcagagaccgacttcaatactgaaggcattcttcagagggttttcagcattcttttcttcactattttcttctcttttcttaagttaatatgtgtgattttgctacaatgaacatgagtagctaaacatttaattagggtctagattgagattgtttggtattgttttatagttctaatatgatttattttcccttaatttctatgtattctatttcattcgtacttaattacttttaattgactgatcaccaattaactaactatgattttgatgcgagatctgagaagtgagtgtcaattatgctacagtgaaatagaactgaatgtgatataggacgatagtacttgtatggtttagatagcttatagggtttctgtgtttaatgtctgttgcatgtttaatttatcacgagagtagaaaaattgcatgtaattga

SEQ ID NO: 109040 - DNA, 1003 bp, Cannabis sativa
aattttaaaattaataatatttatggtagtaataatcattaaactttgaaagcataatagtgatttaaataaaaacaaaaattattatactttgtaatattattaaactatcaaaaaattcaaatttaatttaaaataatattaattctaaatactaaaatttaaaaataattttaataaaaaaataaacaatatgaacaaatttattattaattgcaacacttaaagtggattaattatatttatgttaactaactatatgaatgctgaatggcaacatttaataattttttattttttttatttaaaaaaaagtcacctaataatttctcataaaccaaaaattctgttatatagtcacatattatatagaatagatatttaaataattataaataaaattaatattttaatgtaatataataataattaaataaaatctaatacatataatacaaatatattttaaaataaatttctgaaaataaaattttaacacaaaattaaaaaaaaaaattatgcatacaattttctccttcttcctctaaatttattatttattattttatttattttaatttattattgaaaacaaaaatcacaataatttatttcattttactattagttatgtgaaaaaaaatatttttaataaatattaaaaaataattaatttaaaataattgatccaattcacaattttgcaaattagattagactgaatttaaattattataggaattaaattagattaaatccaaaatataaaattctcacttaatttaaatcaattaaactataagtaaaatagtaccaatttaatttgataaacccctactgccatcttttttttttgaaaaaatgaaatatcaacttcattaaaatgagcattcagattacaagatagcttgaagatcagccagaacattattctcaagaatgctacgatcagagtaaaatcgagagcgtctagccacaaaatgtgccactcgatttgctgatc

SEQ ID NO: 109041 - DNA, 1008 bp, Cannabis sativa
  modified_base (740)..(744): a, c, t, g, unknown or other
  modified_base (909)..(914): a, c, t, g, unknown or other
gaagtttgaaaaccttggcgctctgataccaaattgtaacgccctaattcattaggcacgctacccaatatacttacaaaaaccctaatcccctaatcgggattactattaaaattagtgcgaaaattaaactttaattataaacgaaatgaaaataaacttgtaatactttttcacttacaaaataaaagatacatgtgttgggatcccaaaaataatttacaaaatgttactacaagttcgtttcctctagaccccaacccgcttggtctagtgtggcctgaacatatacactcttcgtccagctcctacactcatggctgaccagaaacaactttaccctttcctgcacagtagagcacccaagagccaagcccaacaagacagtataaaatatcaatatcatgcttatcatactatataaaaaataattccattcatatatgcctgtgtgacacaaacctgcatgttgcgctcagacctacgtgttgcgctcacacgtctatttatgtctacatgacatagacctacgtgttgctctcacacgtctaaatacaataaggccttagaatagttcatctcggttctggttaccgagtccaacttgattatgccttgtacgcatagcccttaacctcaatatgtataacacataattaatggtgccactgcactatttgtctatttgctatagacctgcatattacgctcacatgcctatttatgtctacatggcgtannnnnacgtgttgctctcacacgtctacataaaataaggccttagtagggtttacctcggttttggttaccgagcctaacctggttatgccttgctcgcataaccctattcaaatatatacgtaatccatacattacattccttcgatggtttatcctggtgatatatannnnnnctaacccagttatgtcttatacaaatacctcttaacatatatggatgtattcaatattcaccacatcatataaaatcttagggtaataacccta

SEQ ID NO: 109042 - DNA, 571 bp, Cannabis sativa
  modified_base (313)..(320): a, c, t, g, unknown or other
attttatacgcgtgtaaaataggctgtttgaatattgttttctatattgtaaattattccgaatttctcaaaatttagtaagatatctaaaataaatataacgtacatgaatatgaaaaaaaaaaattagactaaaatttttttctggatgtcgaaacaaattaagggtgcatcagtacatcctttttaagagggtgcattgtagaatcaccctatgatatatacttgattatatagatatattattttattatattttataatttatttattttgatttttttgctgcgaattatttatttatttatttatnnnnnnnnattttaattttaatttaagtttttctttttctaaaaagaaataaatgaaatagtctattctatttttaaaccaaacacatgattactttcagcataatctaatcttgtccagtctagtctaatccttttcagtccaatcatgcgtaccaaacaggcccttatggtatttatattttatacgcgatcacagagatcaagtggtggatgctaagcagggccggccctagacataggcaggctaggctcgtgcc

SEQ ID NO: 109043 - DNA, 698 bp, Cannabis sativa
aaataaccaataggtgactatacacttgcatgacattcataataaaatggaaagtctctttaaatctcaacaagcaatgtgtttacaccgcacttagttaggtctcttttgttttgaatttgaaatgtaatcttactctaaactaatttccactaaaatctccaattgtaccatttatacgttccgctaatcatttgagtaaactaatccccattcacttctacactatacgtgcaagtccaactagatttttttaaaattttgaatttttgatagccatctacactacactttctttttttttagttggagtagcctaactatcttccatccattgctcgccacctatagactatttcaaacttgtcccaatgtctatatggtaccatacgaccactaccactactattacaattttaatccaataataacataataattctacttaatcatttttttttgttataaatactatacattagtatgcttatattcatctttgaactaaataagtgctaatactcaaatatcttttattttagaaaaataacacaagcatatacttactcataaacatactatttttctaacaacttattctatgaaattactatttccacatcgagatttctatactaacaaaagaaccaaatatatattttggttattacacatccaaatcttttgacctgtgtgag

SEQ ID NO: 109044 - DNA, 4401 bp, Cannabis sativa
atttagggtacaaaacccaacagtctctgtgtcatcataggtagatcagttgtgcactcacctgtaagtgaaagacctaaaatctatacatggagtgaattaaatttcaaccccgctattatggtggctatcgggttcgactacccagtttttggatgtcgctttctatgattggtattgagagctaggggtctagtagatagtgtgattcacatttgaagcttgattttgtgattagttgtggtctctctattttgtttatacactttgacaatggtgatgagatattttatttttaaaacctaaggatgcagaaatttttattaaaccaaggattctttgatattatattagttgatttcttactaggctttataagctcacccgctattttttcccaatctaggaattcagtttgatgatagtggatgaggataataccgttgaggaagaaatttgttattagtttagtcttattctacttatcaaactttctaatgaaactgattttgtaattaaccttgaacgaatggtctagatgacttaaattaactatgtactagttacaaatgaggaatgactgatactagatattattttagtactttattgaattattaaatctatctatttaatgactaaactgtagaaatattattattttacaactaataatattttttttattgatatagaagttaattcacttatttttaaataagtactttgtgatataagttaaaagatcatttataagagttattttcttacgagagttaaagtgtgacttttaaccacattacatatctatcatggcttaaaaataaataaatgaatagatgttatgagtttaaaatgacatttgataaactagatataagtttttgttatgtattgctacaacaacaaaaactaaatgtcgtgcaaccagctaaaacgaatctaggattttttttttcttttaaaaaaagaaagaaaataagttacaacgaacaatacgacaatttgcttaattagcatccaaatcttaaaatcccataccggctagctctcaagcaaagttcttattgcgttgcattactcatccaagaatcttagaatttagctctaggtcggccttgcccacttcttactctcaagtcaaccccactaataactccaaaataactctcatttactcgcgcgtccttccacattccttgcgtttagttttttttcgaaggacaatataatattctgaggaagacttattccggtgtttgttctataattttgtatttattttattttatccatcctatttagtagaatatacatattcaaaatcttatcatatactaatacagcaaccagcaaatacgacatcaaatattttaatatagctttacaatttcgctacttttttttgagtcgcccactatccaaagtccaaactaatataattatcagctttgagtcccttcaaaactcatgagcttcttatattttttttttttatttgttcttttttcatttggaattttgacaaccaagacatatgattactaacagaaagtacggaacatggatttttggattccaaagatcgattcattatggccacggaggcagcaaaagggcggcgctggtcttcctcttatttgtaatcctcacgttcgtgttaccacgcgccgccgcacagaccggagatcctccgcctccgtatttatacggcccgacccgacctcaaaaagttgacctcaagatggcaatcgtaatggttcttctagtcacggtcttcttcgtactgggcttcctctccgtttacacccgtcaatgcactcaagaccggtttcgaggcagcgacgaaatcacgctcggttatgtcgggaactcgtcgagggggcgtggacttgaaccagaaatcatagagacatttcccaccttcgtgtactccaccgttaaaggtctgaaactcgggaagggatcattggagtgcgcggtttgcctcaacgagttcgaggacaacgaaacgctgcgtttgattccaaagtgcgatcatgtgttccaccctgattgtatcgacgcttggctcgtatctcactccacgtgtcccgtctgccgtgccaaccttgttccccaaccgggcgagaccccacgactaggctacacaaccctcgcagatgtcctcagcccaggcaacgaagcgggtcgatccgaacctagaccaacacccgatgagcctacaccgaatcctcaagtctcaatacggattgtcacagaatcaccagagattactttgactaatccaacccaagatagggagacgactgaggaccgtgcgccgagatcaagatcaaccgggttcggggatccgagatcaaagtctaacggttgggggctcggcgggatatttcaaaggtcgcactcgaccagccggttgctggttccgccgggtgtgagtcaggaacggttcaccctaaggttaccagaggagataaggacccagcttgttaattcgacactaaaccggaccaagagtaccagcggaacggtgcttccaagggtctgcagtgccaggaagggttatcggagtgtgagcgcagggtttggtcgctggaaagataacgctacatcttacgaacggtttgaaaatagtgggcggccggagcggtgggttttctcggtagtaccgccatttttttcacgctcgggttcagctacgtcatccatgaagggttcgttgatagaaggaggagatgatatggcagcccatttgaaggcggcttcgtcaaaatcgaaagaaccaccgtccgatcagttgtacagagggagggacgacgtgggtgaaaggtcatcggatccgctccggcggtatgattaaatttaagattacgcataaggtacgtgagcgtacgtacgccacacttgatttattagttccaggctttgtgtacaaaacaagaaaaaaaaacaattatatttcaatttaaattattctttttttactccttatttgtaataaaaatcatcagatttgaaattttagcacttttgtaatttggtatgaatttagttttgagatgagatcagaaaccagaaagacaaaagaaacacaatatcacatggatttgcaattcaactccgctgtccttttcatctttccctcaatctttgtaatattaattttgtatttaagaaaaagaagaatcatttttattgatgaaagaaactggaatgaataattaaacagtagaggaggtgagcctttaaataggagaacctcagtttataaccgaaaaaaaaaagctaaccaaaataatagaaaactgtctcaacaacaaaataattgatccaactaatttgccttaaactagctaactaacttacaaggaaaaatagagaatcttaatagctctcctcaagatgaagcttatatgtgatagactgacatcttggatacatgagaagtataggagaagtgagtggtttggtgaaggcatccgctagttgaagtgagctgaaaatggaaatgagccttattgagcagttgttaattttatccctgatgaagtgacagtctagttcgatatgcttcgttctttcatgaaatggtgggttgttagcaatatgtaaggttgagtcattatcacagtaaatgaaagcaggatgagattgtggtatgtgaaaatgatggaggagatattgtataaccatgtaatttcgcttgttgtggctgctaaggctcggtattcagcttcgaatgaacttttgtagatggttggttgcttctttgtgtgacggtagatgaggcaatctctcagaaatatgcaaaagccagttgtagaacatcttgtaacaggacacgacgcccaatcagaatcagagaacccacaaaggtgtaatgatgaaaactttgaatagagaagcccctatccagggcttcctttgatgtatcgaagtagatgattaatagcttgagatgtgtagtgtgtggacttgccatgaattgactgaaggagttcacggcaaaacactactataaaaatagtttttcctgaagtttttaaacagtcgtttatagtattcccgtcggtttctataactgtcgcctatacgaccgtcgcaaaatgggcaaaattggcgacggttacaaaactgtcgctaatgtggacttcccgacggtttaaaaccattgcctatagtataaggcacgatttaaaaccgtcagatgtaaaaaaagagaaaaaaaaaaatacatattttcccccatttttttcctgcattagttttctaattttacctatattaaaagaaaacaactaataaattttattacaataacaactaactttaaaacacaataaatttatacaataacaaaataaatatatatagtaaataaaaaagtatataaataaa

SEQ ID NO: 109045 - DNA, 786 bp, Cannabis sativa
ttcctccttcatctgatgaagaacgggtcgcagagaagtcctctcatcttgaatactgtttacctcagcagacaagatctcgatggtctccttaaaatggttagcaacctccagatccttagtcagcacatcaaaaaagacttaccctggtgaactccttcaaaactccgcccaccagcacatccaaagaagagtcattgtcagcaccagccagttgttcactgacctcaggaaccagccggttcatgaaataggccagcatctccttgcccttttttgcctctggaagcactggcaaaggttgagttggtgcccgcacccgttcaggatcactcctgactagttacgacccaaccgttggtggtccagactctttggacttgggagctttgggggtagaggggtttgcagcagtcagctcctcaaaaagatcaatgacctccctagaaggcctcttttcctttgaagaggacctctcaccgcccttaaacttcttggccggaggagaggcactagagcttccgcccattctcttccttagagtgtcgagcatctgtcgagacatgtctgcacagaacaaaaatagtatggttagaagacagccatcagaaacacaaggcatgaatgtcaagaacctcaaaaacaagataaagtaaaatgcaaggtgaccgcccgaacaagactcagaagcccatcatcacctgacatcgatcttatgtcagacatgacggccttccctattcctaacacgggaggagatggccgaataggtgaaatgggctccct

SEQ ID NO: 109046 - DNA, 840 bp, Cannabis sativa
tctctaaaatttcaatacccttaactgaactcactaaaaagaatcagcgttttatgtggacagataagtgcgaagcaagctttcaggagctaaaggagagattaataacaactccagtgttagccctaccttctgacaaagagaagttcgtggtgtattgtgatgcattcagacagggtctggggtgtgtactgatgcaggccgatcgagttattgcctatgtctcccgtcagttgaaagaatatgaacagcggtacccgactcatgacctagaacttgccccagtagtgtttgctttaaagatttggcggcattatctctacggggagagatgtgaaatttatactgaccataaaagcctcaaatatttctttacttagaaaggtttgaatatgaggcagagacgttggctagagttggttaaggattacgactgtgagatcctttaccatccaaggaaagccaatgtagtggttgatgccttgagcaggaagggtcccgaacaagtaactagtatggttcagatttcacctcaattagcagaggacatggtcagatctagcatcgaatttgttgtgagcaagcttcataacttgacgctgcaatctaatctattagaacgaattaaaactgctcatttaactgatccagagttagtgaaaatcagagaagaggtttcaactagccaagccagagattatatagtgtcagataatggaatgttgttgtttgttagatattagatgtatattagctgtaagagagttagatatttagtagatatttagtctcctaactctgtatataaatatgtattattctatgaaatcaacacacaat

SEQ ID NO: 109047 - DNA, 644 bp, Cannabis sativa
ccatggctaatactttgcccgacgattcaaaaccgtcgagtatagtgtattattttaaaaaaaaaaaatcctacacttttaaactgttgtctaaacgagtgttaaaaattgtcgcctatagtatagtataggagacaattttcaacactcagttaatttttttagcgacggtccacaaaaaaattgcttttggaaccgtcgcgaattctaccttttgtagtagtggaaggatctattgttttaggggcctagttgattggccttccttgattaagctgcagtcccagactatctaaagtctggccgaccaaccctaagttggcaaggggttggctgcccactcctccttggttggcttgtggagtttgtccattgacatggggtaaatcacataaattgttggagtttggtggatccaactgtctgaagtgattaatttcacttctcaaattgttgttttgggtgtttctacccaatcctggtccttgtcggcataaaattgatctttgggtgactcgctccccttggggagggagtgctcctctttggccagccatagggacttttgaaggtctctggctagccatgggggcttcttcagatggtgtgccaaccatagggtctcctgctagtggctggctagc

SEQ ID NO: 109048 - DNA, 640 bp, Cannabis sativa
  modified_base (127)..(129): a, c, t, g, unknown or other
  modified_base (161)..(162): a, c, t, g, unknown or other
  modified_base (478)..(496): a, c, t, g, unknown or other
attggaaaaagcctaccaagtggcgggccataatgttaatgggccccacttgatattttcctattttgacaattttcatttctattttctcaaaaacgatagtttttcaattctaaccatttaaatnnnaaaactatttatttaataactaaaataaattnntaaataatattgtcattcaatataattattaattagacatataaagtcacttaattaataaataaaacctagaatctcttttcttcacaatttcgtccttgcttagtgaaaattcataaactatacatagtctaattttaaaattataattgattaattagaatcagttatctgagtcttacaagcagtatggtctcaactggaatggggaccatgagcttatattactgagtttccaataagctgaattgaatttaccaagtaaattccctaacttattaattctttgttgcatccactcttagaacttagaatnnnnnnnnnnnnnnnnnnnaacgctctatatgttccaccagatagatacgctatcacatttaaccattgtgataatctaaatgatcaaagatcctctatatagatgatttacactgagtagggataaatttaccgtttcacccctcaatgtattttgatcctt

SEQ ID NO: 109049 - DNA, 1493 bp, Cannabis sativa
tcatagtatatgcattattttctagatttctcgccacgagcttatttgttcttgaactgttcttgactgattgtagaatagatagtactagggcttgaaactttaaccaacatttaactataacttgtagttctctaactgcatatcaattttgacttgacattatccatttccactcattaatgagactttaaagactgccaagtacctttgaaagttttgaacttctgggtttgggaattctatttttcaatgaagccctttctttatgtctttaatgtagcttggtcggcatataaagtttgtttttcatctcttcctcctccaactcttactttcttatctcccatcttttgtagataaatactggtgatttttagggaggcaaacaccacatcaactaggatttactccaactcttatacgaagaccaccctcgacttcgtgctagttcatcttcatccagtgataatctctcaaattctagctttgaagactgagagaaaagtagtgaacacacgccgtctacatagcccaaggtacaacatcacaggtaccctaactaaatacgtggagaaaggtacatacacttcatctgggagttaaagaaaggttggaggcattacttgctcgcttcttggatgtatagggttcaacttggtgttgttgatactctgtccaaagccatccagccccatctactatgggaactactgtcgctgaatttgttgtaaccgttgctcagcatacaactgaactcaaatctctgcccaagcatagagtgatggcgctaacaacgtaaacaatgagaaaagcttcaaagagtgacccctatttggctagactatttgcgggggctggtgtggagcaagccagacctttgattgaggaaggagagattgttgaaggggactttgaagtctaggaagttgaggactagggcgaggtccgtcatgctactcctcttgaggccaaaggagaagaggaagaggaggaggaggcaatttgggtactgccttttggtggcttcaccgaggagggagtacctatctctaaaactggagaagtcctagaagctggccaagattatgttgaggaggagtgtacagaggcccatcctataaataataaggatccaaggggtgcccggtgggtctctccaccatccatcctgacatttaagagattgtctaatctctatgaagagggttttctaggaaaggttaaggctttcctcccttctcttggggagctagccacagatcctagtgaaggcttctgtgcatggtggggacctcacgctaaatagggtgcaatgttgtcgttgtatttgtattttaaggggattgcaaactactatcttattagtctgacccaacttacttcgaagggcataaaatacttgtctgcccttttcgtgttgtacgcttcccaaggatggggtcagccatccgcccacgacaacaactagctgttcgaatttaagttagccc

SEQ ID NO: 109050 - DNA, 527 bp, Cannabis sativa
  modified_base (411)..(417): a, c, t, g, unknown or other
atgtgagggagggctgggttcaatatgtcgtacccactactaatggccccctaactttcacacaaggcccaaaggagaggacttaacgtttcattaaataatttttattcattgaataacccaatactaattgggcctaaataaaactatcaatgatgatattttatttaagcaacctagtccatttaaatatctagaaataaatgagctttctatatgcatctaagtccaaaagtaaatgtataggctcacacaggtcaaattaatttagatgagccctatcatattactaggtttacacagatgaaagaaattacaaaatttacatgttacaaattatttataggatctattgacaattcgactatgattaaaatacgatcattgaatctgtcaacaagttaatcatannnnnnnagatcaaataaataataggtttgctaaaaaacattgaataaacaattgaataaaacaaacataatatccatgtagcagtatgtgaaataagatattaatataattaaatt

SEQ ID NO: 109051 - DNA, 808 bp, Cannabis sativa
tagaaaactaccatctttatagtagcgagctttgaaaatacgtcccaccaaagagtcaggttgacttaacaaacgccaaccttgcttgctaagaagacttagattaaagtctctgagatttctaaaccccattccacctttagacttatgaactgttaatttttcccagctcttccaatgaatccctttattattcttggcagatgcttgccaccagaatttgcacatcagttgttccatttcctgacaagtttccacaggtagaaggaagacattcatggcatagctaggtaatgattgagccacagatttaattagcaactctttccctgctttagacaagaacttttcttcccagctctgaattcttttcctcattttgtctttcagaaaaccaagcatagatgttttattgcgtcccaatgtgttaggcaaacccaagtaaaagctattctcccccgcttcagcaactcccatcaaggaacatattgcattcttgacattcggatccgtgttgggactgaagaaaatagtggacttctgatgattcacttgctgacccgaggcttcttgaaaacaatgtaagagttccatcacacttctagcaccttcctctgtcgcttggcaatagatgtaactatcgtctgcaaataacatatgggacaccaaatgagcacccctcgcgactgtacaacctcagattctaccccttctctcatagtcatttaacaatgccgagaaaccttccgcacacaagatgaaaagataaggtgacaatggatcaccttgcctcaagcctctagttgga

SEQ ID NO: 109052 - DNA, 631 bp, Cannabis sativa
agacagatctgtcatatgaagaacgaccagtacagattttagacaggaaggaaaaggtgttgcggaacaagactattctgctagttaaagtactgtggtggaacagaaaggttgaagaagcgacttgggaattggagtcgcagatgcgagagctgtatcccgagcttttcaggtaaatttcgaggacgaaattcctataaggaggagatagttgtaatatcccagaaaataaaatgatacttgttgcccttgatttttcccaaaatacgtggacatggatgaggctgacacatggatctgtaagaaccaacacttatggaaatcaactaagtcttagacgaaaaaggagtacctcagggaaggtgcctcccgaaggagagcataggatgtatccttactctctgggaggccagaagcatgctaaggtagttccgggaggtacagagatccctcgaacagtcacttcacatttaatgccgcatgcgggaagacgtattgaaatctccataaatgacatgacggatggcgtaaacccccttttttggctattacactataatcaataaggctggtgacggctactttatgagaaatcacatcagtcaaaaggggataaaagattatatccacc

SEQ ID NO: 109053 - DNA, 3032 bp, Cannabis sativa
caacagcaccaatcgtatattttttttttagatttaatgagatttattttattatatataaataaaaagtgatacagcgtttatattggtattggatgttgttaattgcttgctaagtactctgttttggataatttgtgggttttgtttatttgctacgtatagttatccacctaattttgagttgtatctaatttgagctatattatttcaatgttggacttgaaattttttattgtgttgttcggtacccagttgagggtcttaatcatagagaacagaaatgagaaaaaacttcagaccagaaagaactgctaagattttggtgatcatggacggagcagatcttgaaagcgaaagattttaattaataagagaatccggggcagatcttgaaaaccaaagatattaattaatgcgagaatttttctaatttttctctgtggataaatttcttttcccgaccatattcaaaagactttttttttctttctaaagttatcactgatacaccacacatgtgtgttgttagagagtctacagagtcgacatttgataatgtgtggtaattaagatccatagcaatttgacttattgccagttagttttgagatgaaactccataaattttattttaccactcgtgtgaagttgtaatatagttctgatgtttttccttggaagctcatatattctttgaaatgttatagaaagatagtgataattgatatgtcatggtggacttgtaaaaaatgtgaaaataaaatcttggttctgaaccacacataatgtcaattcatattcattgttcatttcttctttctggtattttcctattctttccctaaactcaagcatcacacggcagctctagtaaagtagttacgaatatgtgggaaatagccgacttatgtcataatcaggataaacatttggtgatggcagtactttaacattattttctatgttgatctacacttcatttttaaacaggaaacttttagtaaatgcttggatgacttcagtatatgttttgaattatagatgaaccttctgtattctgctggattaacctcctttgtgtgagttcatagatcttcattgttgttgcaggttatgcagttgccgaagggagacctgtaagagagcgccgtcttccttgttgtggtattggccacggctggttcctgtaagctgtctttcatatatcaattgccctcctttctttagtttcttttttggtactggttttacttttatgggttaccatcttgtttctttggcagctgccaagtttttttcttctaattgagcaatacataatccatacatctataagaactaaatattagtaacaaacctctaagtagcaatcctgagagtgaaagcaaagtacttaagacaactaagcatagaaatggaatttattattttaaatgcattcttctagaaagataaatgcggctgattttgtaaattagtttggtttgcaaggtctataaaattctgtacttaggacttggtatcagatcaacagaagtgacagaatgttttagagggaggagagagccacaagtcattgtgcggtctgtgaaataattatagaaagtaaaatgaccttggggaacatatatgaaataaaaagtcattcctctttggcaattgacagtagtagatgggagaacaccccccagcccctttttctttttctttatttgctattatttctgtgatctttatctctccattcttgtgctgtttttgtttcgccttcagttttgttctaaatttttgtgttttaaaagatgctggtacttttgaaggtttataattggtttcttcattgctggactcccttggtatcttggagccgtgctttatttctgttccaggaggatggactaccgagagaaaccaggatacatcgcctgcatagttgctgtgagtaacttctttctttgctcaccttttttacttgtatgtttttgtggtgggtgtttagtgtttaataagcaagcgtgagttgcatatatactaagtatatatttatgcttttgctatgtaaacttcctttcttattatatgtaaaagcttcttgatctgtgctagtggcattgaacttcttttcctttcgtttaaagttagatgtaactttacttaccgtgtgcacttttagacacttatcaaatccaatgttttagtatgtttctttgaattgattttgctattaagatttagttaccatggactgcttttgtgcaggctattcttgccacactggctattgtgttcggggtaaccaagggagctgatgattggtaaatttgtgtctgtcgtgaagatttgtatagtttgtgaaaggggtcgtatacatatttgcagattcgtattactgtgactattttgtattttattcattgtgtgaatttacgagattgattatgatatctcgagaatagtcgagattgattttagatgctcccaacttgaattatttatttaatatacttgatgttaatcttgttcatcaataatgtatgtacatgtatgcatctggcctttaataatcttgttggggttttcatctactgactaattttcaaaagcatcgacaggtgccccctcccaacattacatttttattagtatagtctattccaaattaaaacttcttgtctcgaattgtaggagctataatttcagggctggctttgagttaatttgaactttagaaaaaataatttttttgaatctttttataacaataaataatattttttaaaaattatcaaaaaaatatgcatatttattgaaagtttttttttttatttgagcttctaagaatgctaaaaatttatacattatctaaaaatataatattttattttatttatttttcacattatttttggcactgttatagtcttacttttaaaaatattctaatgtataacactctttaaaaatgttataataatgatatcacacattattatttaatatatattttaatttttagctacaataatttt

SEQ ID NO: 109054 - DNA, 611 bp, Cannabis sativa
aatttgttgtggaactagttttgtttttaatttatgttccagtgttttatgaactgattttctctttgttttaattataactggtttgagttattgtatattatttgtttgtattcatcatattatagaaccggttctattttaattataacttgtttgagttattctatgttatttatttttatttattatgttatagaaccagctctattttaatttataaatggtttgagttattttgtgctatttgtttttattcattattttattgaaccggttctattttaatttatatttaagacttctatttctggtgactttttagatgactattccagagacagtgacttttttagcgacttttttagtgattttttcgattacttttctggtggtaataactttttcggtacttgtgactttctggcaactttttcgatgccggtaatttttctggcgaaacttattattacaaattttatcaaatttatttattattttattatatatattttaaactttaattatgttttaattttatatttttttcattatttatttgtgtcatagagtaaactctattaattacattgctcttttccaactttcaa

SEQ ID NO: 109055 - DNA, 1776 bp, Cannabis sativa
tagactaaaaaaattttctcgaggccgaaacaagttaaaggtatatcagtatatcccttttaagggagtgcatgatagaatcaccctaagttatatattaacaataaagcaaattaattgcagcaatataagaggacatagttttgttcatcagatgcaacttggttgcaaacaacgacttatacattacttttttttttagctaatgttatttttttcattaaaaaaatttcatgtcaagtttgtcaaaagtaaagcattcaagtaaattacatatttgtttaaaagctcatcactatttatatactcaatttccagtttcaattgttatttgattaattagtttttgctttctgactcatctcaccataccaataaaaagagtattaattacaatttttttttttaatttctgcaccccgaaaaatacatattagacttttttttttttttttttttatgacggtatgtattctagttacaacataattcttttaaatttttaaaaaattataaatagtttacattaataggtttgaaattttttgaataaggatggaaaactggaatatcatgaactctgttgttgatactgtaaattatttagaatttttcaaaaatttatggtagtgatattgtatctataacaaataccactatataaaataaaaaattatttcatcaagtatttttaaacgccatggttgagaaaaagattgtaattagtattcattctttactaataataataaaaaattattaaaatattagtaattttactaaaataggtattgcttacttggtccctcctaaattattctagtttaatatatcagtaggatctatctactaaacaaataatgttttttttactatttttgtgcttttaataaagaaagaagaaaccccactaagctaaaataataattttattattattatggttagatttatataaatcttggcattggcattggtgttgttagttgttttttttttttttttttaaatatatatagttgaactaaagtccagactaatatgaataaaagtacactaaatatacctacaactgggacaaatgttttattttaaaagaaaattaagatcactacaactacaagtggataatttgtattaaaaaatttgaggaaaagtcatacgaagaatctagcataatcttataaaagatgtcaaaatgattgaagctaatgtttactatgtaattaaaaatttggatggagttcgatgaatctaaggccgtgacttatgaccataatcatttgtagttttttatatgcaaagaccaaagactaagactaagactaattgggattataataaatatcccatgctttaatctatatgattaattattaatagaacaaaaggttaaaagagccttatgctctacccatgttgtcaatcagatcgaagacattgctcacccatttataggcccatttcatctcataacttttattgaaagtaccacttttaaggttgaaaataagtagcgttatcgggatttgaacacctgaaagcaacttaggcagggctctaggttaggcatcccatccgttacaccgcaacttggtgccatggggttccttatgttttgtttaataaacgattggatagtaaatattttcaaactcacttcacaacccttctttcgaaaaattctagagtttgttcgtgtgttgttgacgtttttgtgcacgttgattgctccaactaaaaggaccttgcctttgtgtttgtacggtgtccaac

SEQ ID NO: 109056 - DNA, 502 bp, Cannabis sativa
  modified_base (226)..(232): a, c, t, g, unknown or other
caattccggtctgggtacacgaccgtgtctggccccgagttccaatctcagtttgggtctgaggctaagtctgtgttcggttctaggtctggctcagggtactggtcacggtactaatcactttctagggtcctggttcggtgatttttgttcaggttctaatttttggtcccatgtttaggtctgggttcaggtttggttcatcatctgggttctggtcctagtnnnnnnnccagatctagacaccgactactggtttattccaggccccattacccaaatcccgagtctagatttggatcactgtcacgggtctcggtgttattctggtgcaggtcctaggtcgcattttttagtttgggttcgggatcaagacttgggtgcggttctaggtcccgagcttggttctctgtacctagtctggttccatgtttgggtctgagttcaggttcgggttcgagtccttagtctaggtttgggttgggattcaggtccggctccc

SEQ ID NO: 109057 - DNA, 1488 bp, Cannabis sativa
ttaggattcaaaaacaacacaaaaacctatatcacataattgactaatactaagtaagttatgtttaagattatcaacaagaagcacatttttgatacatgaagagtatacattaccgacatcaccaatgccaaagattttcctttttgaattgtctccaaaagtgacaaagccactttccttgcttttaaagcttgaaaatcttgatggatcactggtcataatatttgaacatccactatccaagaaccataagcttcaactctttcttgttgattcctacaaaaataagttcatttgttggtttttggtacccacataactttggatcatttcttgttagttctagaactattggtacccatttagtcttgtctatttatgcatatttcttcatatgacaataggaaatagtatgaccatgttggttacaatatgtgcatgtaaaatgaggtagactagatgatttcacaaaaaagtttctcaaaaacttttgttttctactaggattatagtcaatgccacattttaaaaaacttcatgattgactcctagcatgagatcataataatggtgccagtgagtattattataaattgataatgtctactagaaatttaaaatgtcataattctttttttaaagtgttaatggttttattctcttattaattaacatatatctatgtcaaattcattttaagaatactgattcaagcacaatttcttcatgttatacaaggtaaataaaatattcttatactatttaaaaatcacacttttctaaggtgatattcatgcatcattcaagtaattcaattaaccctattttatttttttttccaaaatcaatattagctagtacatactaatggtgatcaagcaaaagtaagcaattacataaaattctcttaaatgaacaaaaccaattcactaaacgtaacaaaaaaaatacaaaatcataatttttagtcaataaaataactctaacaaaaagaaaattaactcataacaaattgtgcaaaaattacaaagtacaaaagtagagaaatagaaaaaaaaccatatggagtttgtcacaatactctaagttttcttttgccaaaatcctctacttcttccttcaaatatatgccaatctctcaaataaaaatgcaaaattaaaaccctaaataacaataaaatgaactctctattttttttccttttttttcttcatttttttctttttgtttttcagcgtcaagagatccactaccagcgcctccttttctgttttcatgcctgcttttcttctttatacatacatcatatatatatgataggaaaattatagtaaaagacctcaaatcatagaattatgttagtaaatatctctattttaaaatttgtaacaaaatgtctatttttttagattatttattatttatattgtcttttgtcacataagaaaattaataatttatttttcatatttttttttttagaa

SEQ ID NO: 109058 - DNA, 553 bp, Cannabis sativa
  modified_base (260)..(264): a, c, t, g, unknown or other
gaagaataagtggttgaaataaagtggcaaaattgtaactagagaatggtccttaggtggctggccttagtgtgttatttttgcccaatattttattcttttttaatctgtataattcaaacctaagccctagttgaaacactataaaaggaacacgatgctctcatctcatccaactcaactattgtcttcaaccaaatcaaacctagttttctctgtcagacaactagtagatgagagacactttctatacagttttnnnnnctccttcattgttcttcatagtcggcctatagtgatagagtgacatgtccacacatagcaagtcaagtactcaatcatagtgcggaagacgatggtaaccaactcaaaggagagaaagagatccaggctcatatcttgataatactctgtgactaaaaggaacaagaattagagatctaagcgaaatgagtcatattattctgctgtaaccaataaaactcttatgtgtttaattttattattttagagatattcatatttaggatattaattcaacatacttgttagt

SEQ ID NO: 109059 - DNA, 934 bp, Cannabis sativa
gggatcttgagtgttggaatcgagggattcaggtattcgaagggatttcgaatctagctagtgaagggattcatctagcttactcaaggggattttaagtgttggaatcgagagattcaagtttaaatctgtaatcgtctgaggggaggcaaggtggtcctttgtttgaggggaggattgttgggtgtacaaccaaagtcccacattgactaaaaatgggaaggatcttgggtatataaggatagacactatctctattggaatgaggcttttttggaaggtgcccaaaaataaatctgtgagggcttagcttagtgctatttttaggtggtgccagacaccactaatacttaataaaaatgctcacttattgtacatggttggcgatggagcccacacacaccctactctattttataagaaacttggctcttcttttcttgtgaaaaaactcaatttcttctattaagtatttgatcaacaaaatagagctttgaagagagttggtggcccctaacttcaattctttaaatgttttcaaactatatgaaaaatatgccactctcttataaggaaagtgttatttccctcagcaaccattgattttaagttgaaatttcagttctattcataattaatctactcttagataatgtgatactatcgtagaggaaatgataatgtcaataagttttaagttagaatcttaattttatctataaataatctacattcaaacgattagtttactcacaaaattttcgatggattttttggtattcaatatacatattaatttttttttgtgtgtgaaaggtctatcaaataattattctacatagaaccaattagtttaagaactacaatattcttcctatgtgttgtgattataaagcatgaacttaattagtatgctagtttttttttttttttt

SEQ ID NO: 109060 - DNA, 656 bp, Cannabis sativa
taaaaaagagggtaaaaataaaagagaacaatataaaaagggtatagaatataatttcctctttatttactagttcatgtatcatgcacttcatcattaattaaaagtctttccctcttttataaaataaaaattatatatatatatattaaaaataaaattcctatacaccgcatcacacatggataatttaaattaagattataaatttatttattatttttgatatgtttaatcacaccaaaataaagaataacagaaaatagtcaataattttttttttcaaaaaataaaaatcaataaatttagtttccatagcatcatatatatttgagaaaacccaagttgtacgcaataataaaaccaatgtgaaaacattataattcttaaatagtaattatgacaattgatgaagtgaaaggaaggaggaccacatatagagtttattaacgcaacaaaagctaattattatgtttaataattaattcatttgatccttttcaaaaaaaataaataaataataattcatttgatgtacgacaaattttcaaatccattttcaaaaatatttgagacttttttttttgttccgatccaaactcgagttttgaaaaataatttcaatttatttaggaatatatgatgatgataataat

SEQ ID NO: 109061 - DNA, 620 bp, Cannabis sativa
  modified_base (501)..(520): a, c, t, g, unknown or other
caacactataattgtagactatatatatgtttgagatttagcataatttatgtatatcaaataattaatcatgaaataaatatgtaaacaaagcaatagacaatagtccaaaatgatctttgatcttttattgatattaaataagattatattgaaattgacttttatttagggcataaaactccaacaattagtggatcatgatttatttgaagtatttaatcgtaattttaagaggttttcattgtagtaattgatttgtcattttcctattcataaaagaagcttagtttacttcacacacattgaatattaaattattagtgcaactattggatttagttgaagttttcttatgagatttgttcccattgaaaattttaacatgttagtacgggtgttgcttgttttgagcatgttatgagagagctatgtcaatcgtatctatcgctcattaaaaccttaggcgtaacctcaactattaagagttagtcccacatnnnnnnnnnnnnnnnnnnnnttgtgatatataagatgaaagggctactcctcccatgggcaattggttttgggatggaacctcattcatcttattcctcaaattctaacatggtattaga

SEQ ID NO: 109062 - DNA, 618 bp, Cannabis sativa
tgtcttcattagattgtgagtcacgtcagtttgccaaacatcatcgtgttagtttgagtcctcgagtcaataaacatgttagtgttccttttgagttagctcattctgatatttgaggtccttctcttattttgtttcaacttggattcaagtattttgttacttttgtggatgattattctcgtgtaacttggttatatttaatgaaaaaatagttctgagttgttttgatattttgtgctttttatggtgagattcaaatcaatttaatgtatttgttcgtactttgagaagtgataatgccaaagagtacacatctgctcaatttcaatcttacatgacctctaatggcatgttgcttgaaactttttgtgttgatactgcacttcaaaacagtgtcgcagaatgtaaaaatagacatcttcttgaaactgcacgtgccctcttgtttcaaatgaaagttcttaaatctttttgggccgatgctatttctatgacatgctttcttatcaattgaatcccatcctctgtacttaatggtgagatcccatttaaaattctttttcctagtaagtcattgtttccagttgctcctcgggtatttggcagtgtttgttt

SEQ ID NO: 109063 - DNA, 531 bp, Cannabis sativa
  modified_base (301)..(309): a, c, t, g, unknown or other
aacttactcaaagattcaagtgtctgggttcaagcaagctagaaatcgtctgtaagctcttcagcaactttgaagccaaaaagctctctcttttcactctgaagtttgcttaacaacgaagggtgatgaaatgaggtaatgtgccagtactccaagtatttataggcaaaagggtaactgtacgtgaaggaaccttagacgcctcaacttcccgccttgaaagcgaatatgggaaatcaaaataatcgagtgcaaccgtcagccgtggggagagaaattcagattttcaaaatattaattnnnnnnnnnttaattagccgaaaactgaagggatgcccagtcaacttccattgagtctcgaacggtcatgctcgacacgtgtccccttacgaaggtagagccaactcggaataactttatacgcaaccttggaggtcccatacagacttgggggtaaatgttatcccaaaattggcactctgacgtggcatcacgagaatggtgacacgtggactctacttagaacatctg

SEQ ID NO: 109064 - DNA, 648 bp, Cannabis sativa
aattccttcgatcaacatcagcacacctgagtcaggttcttttacaccaataaatgttgatcactgccccgagaatgttccaccaaatacttcaccaacagccattgacatcactactgctgctacttctcctaagcatttgagacgcaccagcagagtgtcaaagcctcctggataccttagagactacgagtgtcactctgtccttcatgacatatcctctacacctcactcacttgataaattcttatcttaccataaacgttttgattctcacagggcttttatacttgcagttacgacactctttgaacccacaacatacaaccaagctgtgcatatcaagatatggaacgacgctatgcaaactgagctctttgccctcatcaaaaacaagacatggactgtggttccattgcctccaaacaaacgtgccatatgttgtcgttgggtctacaaaatcaaatataatagtgatggatctgtcgaaagatgtaaagcacgtcttgttgcacaaggctacacacaacaagaagggcttgatttttttgacaccttctcttcagttgccaaatggtcaccttcaagttactcttagccatctccaccatcaaacaatggcctatccttcaacttgacatcaacaac

SEQ ID NO: 109065 - DNA, 783 bp, Cannabis sativa
ggaccagaatcggccaaagaactctcaacaacccttttctgccagttttttgtcacaacatctgtgacatcccttgcatccacaaccatgggtgccaccaccttaccaaataagcagagggaagacaaaacctttagtgaagtggcacttggggtcagagagatagaagcctctacgcacgaaaaagctttgcctttaagagattcattatgagtattaactacttccatacctacccgacaacaaccgacaaaaggaatgaagaataaaagcttcacaagacaaaaggaatctaccccaccttaacaaaaatactcacacactcacacgaccttaaaaaaacacacttaacacaaaccaagttaccacaaagacaacaacacaattagcacacgaagtcaaacaggaacagactacaaaacaaaacgaaaaaagaacagacacattaaaccaaagaaatgaaagacagggaccaagaaaggcagggaaaccacaaggaacaacacagggaccaagaaaggcagggaaaccataaggaaaaaacttaagtcatgagcaaacacgcaaggaggataagtagaagaccagtcctcaagaagagagaaaagttaaagaccattctccctgcctacaagactcattacttagatgtctacataaataatgtgttttctaacgatattaatgtgcactaaataagtgaaaaggttgtctagtcctcatgtaaaaatatatgtgcacaaattaaaaagatcaacaaatgagttgaatgacaatactacc

SEQ ID NO: 109066 - DNA, 662 bp, Cannabis sativa
cctagttctggcactactaatggtacggccaaggctgaggcaaaccttgcctctacttcgaaacccagcaaaaagaagaattggaagaatagcaaaaggcctcttaaagctgtgaaaacggctaataataaaaaggttgttaatccaaatgcaaagcaaaaaggaaaatgcttctattgtaacgaaaagggccactggaaaccccagtgtcctaagtttttagcaaaaacacaaggtatttctatttatgctataaaatcatgtgttttagagaattattatccccttgggttattaattctggatctactaaccatgtttgctttcttcttatttcagctccagctgcttaaacttggattgcaatcctagcgagttgagtcggatggttggacagaagggtgaagattgtccaagtgaagatgaagctcgaaatctattttcaatttttgatttaattgtttcaatttatgaacaatttagtttcaattattggtttggggttttattccctatttcatattattgcagacgattcattatgacaattttgagataataaattttctctttaagatattttgttatgaattgagcttcatttttctttaacttgtatatgccaataccaattatatttatatgtttatcatgtttgtatg

SEQ ID NO: 109067 - DNA, 674 bp, Cannabis sativa
gcattttaaggggttaagtcgcatcttaaagtgtcgtaggattctgaacatggcttccaagtgagcgacgtggacttttgtatgttgagattttacgagcatatcgtcaacatacacctccattgtctctcctattagatctgtgaacatcatgttaaccaacctttgatatgtagctcctacatttatcaaaccgaaaggcattaccttataacagtacaaacctcgatctgtgatgaaagaagtatgcttctggtctggttcatacatcaaaatttgattgtatcccgagtatgcatccataaactaaggagttcatgacctgcggtagcatcaataagttgatcaatgcttggtaaagggaagctgtccttaggacatgctttatttaaatctatgaaatcaacgcatgtgcaccatgagccgtttggctttggtagaagagtggggtttaataaccagtttgggtagaatgactcccttatgaagccacacgccaaaaggcaatctacttcttccttgagcgcttggtacctcgcggggtccattttgtagtgcttctgtcggatacctcgcacttctgggtcgatgttcaatcgatgacacatgacctcaagcgatatcctgaccatatctgaatgtttccacacgaaaacatccagattctgtttgag

SEQ ID NO: 109068 - DNA, 714 bp, Cannabis sativa
tgatttatactaatcagtaataaaataaatatttacaaaaattaaataaaataattttcaaaataaaatattattaaaaatgtatataaattattatgaaaataatgttaaataagcttttaaattaaataaactaaataattttcaataaacaaaaataataattctaaaaattatataatatttatgatatataatttattattctaaaatttaaatttcatcatattataaataacaacaaataaataaataaaaaccttttcaataaaattaacatggcttataatttgaaatatttaaagcttattattttattattttaaatatatcatacgttacatatatttttatattaattttttaaaatcaatttagaagtagaaatgtgaaagaaaaaaaaaatccctattggaactattttaatccaccctctaaataagttaaaatagtcccaattgtacaataaagtatattaaggtgatcaaaaattttattcgatccctcaaaaattaaaaaataggtcatatggatatggattaaattgtctaatttcatcatttagatatatgttattaccaaacaagttcgtagttaatagtttttatacaagtataaagtattgttattatccctaatacgacatcttataaataattggggactatttataataattattaaattattattaataataattaataataataa

SEQ ID NO: 109069 - DNA, 655 bp, Cannabis sativa
  modified_base (592)..(596): a, c, t, g, unknown or other
gggcataaaacccaacagaatgtgatccaatcacatttggagaatttgatttagatcatgtcaactaccctcacaataatcctttagttgttgaggtgtagatagcaaatatgatggtggcaagagtgatgatagatggcagagtaccttcaaacatcatgtttaaataaaccctagagaggatgggtttatcactcaaagacttagagccatgcaaacagctgatgtatggcttcatatgagctgggataactccacgtggcaagattaagctgccacttaatgtcaaactgccccaagatagactaccatcgtggccacattcatagtagtggatgtgatgtctccatacaatgtgatgcttagaaggccaattttgtatgacctttgaaccatctcgtcaatataccacttgcgtgtaaaaaacctggtaagagctgatatcagttgctttcttggtaatcaaagaactgctcgtgagtgttacaatgctttactaactctcgttaaaagacctcctctgttgttcttgttggaatttattcatagttgtgacttttgtattagtttgaaactttaagttaagactaannnnncaacatagcagactagtatttgaagtgaaaaatacatgccacagattaagtaatcaaaa

SEQ ID NO: 109070 - DNA, 729 bp, Cannabis sativa
agtgagcctggctaggatgggattatacatgtcgtggcacgtgacctggagtgtccggtctcgggacatctggggttatattttgttgtcgctgtattttggcatgttttgtataaaagtttagaaacgggatctcggtgtttctaaataactatgtaaattataaagtttaatatttattataaaagttttaatttaacacgttttttgagaaaaatatttgattagcatagataggactaaaattaaaaaaatactatagcgtgcctaagtattagggcattacaattttggtatcagagccgccaggtttgtctactgaagcttgccaagacatgtacaatcttcatcaaagaaagcttgattcacgattcagtaagcccctacttttttagtattttaaatgattattaaagtgtgataggaagcatattagattatcattattaattttttaagtgtgttgcctttaagtccataagagtggtattaagttatattatcgctgtctaacctgcctagcttatgggttcgtaggctaagtcctataaaatggacgcccagcataatacaagaagtcaaggtaatatggtttagactggaggcggtcagggaaaccaaattccccagaatccccgtggtcgcggccgtggctgtggcatagctcaaggtggtcgttctataaatccaccacaagctcttctcgattgggagcagaggtttgcggaa

SEQ ID NO: 109071 - DNA, 909 bp, Cannabis sativa
tcaaactactaaacataaacatagcttcaccgccaatatataaaatattttaaattatatataaaacatgttgtattttaattaataataattacttaataaaaatatattaaaattttaattttactattaaaaaatttgtgacataaatatttaaaatattaaatttgtttctaataaaatatcgaaattcaaaaaatagtaatataaattctcatttatggtttaatttttattttgatgtgtgtattaagttctgggttcgaattttattatgtgttttcaatgtttgaattttagtgttttactggagttctaatgtttgagtttgtgtttataaaatctgtttttatttatttatttatttatttttatagattttaagaacttgaaatttgatgttgtttctattgattattgggattgaaaatttaatttttcatacggaaattaaaatttatcttttcaaaatctcacacctgttttttttagttcaattcataataaattttttctataaataaatacttttcttatattaaaatattaataaaattaagagaattaaagagaaaaaaaagttttggagagattttaaaccgtcacgttaccgcctcatacttctcttttatatagatatataaatatatagatcctttatatatatatatttgtaccgttttgattgtttttcacacctttatttattttttaaaaaaatcgttcttccgctgttttctactattgtactgatatgttattgtttagctgtttggtataaatcttgataaatatagtaatttttttcttttttttcaataataatagttttttctactattattttttataaatatagtagttgtagttgggaaatttggatgacaatgttaatttggtgtttatttt

SEQ ID NO: 109072 - DNA, 1040 bp, Cannabis sativa
cttagcaaaataaacaaatttgaatctaaggtatttatggttaggatattattattttattttaaaaaataaataaaataccctataattttaaaaaaaattaaggttagaaaatataaaatatctattcaaaaaaaatatcaacttaatattcaaaatttcatgttattataaataaaatataaattaacaaaataaaaatcaaatcagataaaatgccgaataaatagcacttatctaatcttataatttaaattaatagaatatatttaaaaaaataatgttttttgaaaaacttatatttatggttagcaatttaaaaatatctagattatctttaaattttattactattttaatgtataaataagatcatttcatattttattaattcaataaataaaatatgtaaatatttgatcttataattaaaattaataaataaaatgaataaaattttttttaaaaaaataactgtaatagaaaatttgtagaaaaatcaatatttcaaatttaaagcctactaatatctaaaattaattcaaattaattttaatttggtaattatatttttatttgaaaaataagattttgcacaaaaatctaccaaagtttgaattttatttcataaaaaattatttttaaaagttaaaaaagttgaaaatgggacaaaatattgcatactcccccgcgcacgcatgaggtgtcacggtcgagtgggtagactgcaatggagcatttgcgtgcgtgtgatctcggtcaagggaagacacgggggcaaaatttggaaaaggccttgtttcaaaggcctcttgtccaagcgagttgcccaggggatcctccatccgtgcgcgtgctaggggaaaccctagcccgatatttctaaaatttcaaaaaatcataaatgttgcccctaattttgcccaatatatgtggaccaatcagacagggacacgtggatcaagcaattcacactattttgctaagtctttaggccataagataacatcccggacgtaggtcccggagaaggcacatgg

SEQ ID NO: 109073 - DNA, 535 bp, Cannabis sativa
  modified_base (38)..(57): a, c, t, g, unknown or other
ttaacaggagatcaaacctaatcgttaaatttaacagnnnnnnnnnnnnnnnnnnnntatattctgttaaaccaaaaatagataggcacttttaatatataaagatatatttatatattaatgaacccgaatacaattaaagagaatgcaacagaacgtttaaatttgaatatgcttggcttaaagaggaagagtgtgataagattattcacgacacctagaataatttagcgggttagccaattcatgtgaaaatttcgacttgtggccatcaacttttacattggggcagaaatattacttaaaattttaaagctagaattgcttctgtattgggtgttattaagaggcttgaaggttgtttaaataatctttctttgtcagcagtttgaggcggccaagaaagagctatctttcattcttgatcaaaattaaggaaattttttggcgtgacagatcaaatcaactttggcttaaggatagggttagaaacaagagattcttccactctagggctacttctaggcgaaagaac

SEQ ID NO: 109074 - DNA, 1034 bp, Cannabis sativa
  modified_base (74)..(91): a, c, t, g, unknown or other
ttttcttaaacccttatgtgtttactttcattattttagagaattcatatttaggatattaatcaacatacttnnnnnnnnnnnnnnnnnntggtaaaatattcccaacacaaaggtggttggctaatcagacccgactgtatcccaagcctatgaacaaggaaacgggacttgaaatccattttaaagcagttaacccgaatggtggtgctctgggagcaagcacatctagaagagttaattctcccttctgcttccatgttatagacttttcatgttcttttttgcataaaacccccagaccgtccaaatgggtcttttttatgagttttataggaatatttccaccaaaaccagggaagccaaggaggttgcgaggacctcgaggggaaaggcaagttcaaaacatcttcccaaattggaattaagtaatcagcacctccaaccaaggcgtaagaggttgttcctcctgttccacccttaaaagctatttcagagtctcgtaccccaatggtggtggcataatcaactatctaggaagttattcttggttctcaaacttaggaagcctaggctcaagaagctactgaggctttagttcttcaagtggagcctttgcaataggttccacttgttatccaacaagttatcattattagggaagatgatgattgtgacagacttatcttcaacaagaagaggccaggatccagcctcaacaaagggggctaaaaggctaagatataggttgtccaacaactggctactcaccggaggtaggaaaaagaagaggttacgaggacggaagtgttgggattttatgccctaaataaaacccatttcaatctaatctaatttgttatcaatataagattagaagtcatttatgtttacatgtagtttccatgtttatggttttatatatacaaaatctattatagtcattcacaattatagtgatgtcaacacagtgaaatgtgattgtgattatatgcttcaaaagacaaagtccctgattcatcagtgcactggat

SEQ ID NO: 109075 - DNA, 535 bp, Cannabis sativa
acactaattaaattaatcattataaaggaaaagaagataagaaaagttatagaaaaatataaacaaaaaatcatcaagtatggaagactaacccatcaagtataggccaagtctgcaaaatcatcctcctcaaataaagaatttggtgagtcattgtgtgattgcgatcgagaactattcatttctctcataaatttttcaaacattagttgcattgcctcgcatttcgcttgcaaagcatcacatttggcttcataatgtgctgttattttacttaatttttcatccattttagacttcatttcttctttcattttctgcatctcttgtttcttggctgccttccgagttgagccaaatcgttgtaaatgagaaaacttttctgaacctaaaacagatgagaaaatctcatcttcactccttgaagtagctccattctttgagagtttactagtaacctcatcattatattttacctaaaaagattaaataacacatgactttatcaatattgtcagaaagttacttgttcaat

SEQ ID NO: 109076 - DNA, 657 bp, Cannabis sativa
atttttgattacaacttcagtgaacagactagaagaataaatagttagcattcggatcaattggttttaatttataattttaaatttaattgatttacgtattgatgataacacaatatttttagatatttatttagttataaacttttattcatatttcaaaaatttattcaattatccatctttatattctaacatactcatattattatttttatactatgatcaagcttaaatataagacggtgatataatgttataaaattactctaaatatatctatttattatccttttaattctttctcaactctaattttttattaagttcatgaatattgattgattaattaagttataaaaaaaattaaatttataaaaattttgctcctttaaataatattctaaatataattgattagttaattaaaaatatatatttatatatttaccttatttgtgttattaaacttaattttttaatatttattaatcaattaatttagaaatgtctttaatttataaatattaaaaaaatcaatctatatctaaaatattttttattttttttaattatattttaaattaaatagcttatgtataacttgctaatattattaaaaatatatatcaattgtatatattgttgctaatacca

SEQ ID NO: 109077 - DNA, 567 bp, Cannabis sativa
caagatcctaaagttggtggctgcttgttaaccaactactcatttagcaaagtccccatgtcagcgtaagtaccatggcctccaggatcatgaacgagctttcggactcacggaccaaaggcacttactgtagacgctttcggataggatataaattcgttgaagtcgactatctggatctatcattctaggagggataactagtcagttggaactcctttccaaggaagactagctatcctgaagacttgacccagtgtgaacatgatagacattcggaaactctcttccggatacgagtatctctccacgagactccttccgggaccacgagtaaattgacgaaagcgaagatttatttagaagaattataccacacataacatactcaaaattcgaattctcccgatcataaaatttctctaacttatttttgattaactaaggactttttccctttaatgtatattctcttttaatgataaattagtataattctcctctttaagataattagttagtaagtgaccttatactgtttttcacataattcgtacttttttaaaa

SEQ ID NO: 109078 - DNA, 503 bp, Cannabis sativa
taaaaatctatacttatgttatacttctagctataagcaaaagtaaacagagtcttaatattgatgtgtttacattctttccaaccaaacacaactttaaggtggcgtttggttggaggtaataaaatagaatgaaatgtaaaggaaataatttttattctgtttctttgtttgattgcattttaatatattagaaacagaatgtcattacaatggaatgtccttttaactattttggtggaatgactatttcattttgaaatagaagaaatgaccattctaatataacattaaaaaaaaattaataatttttttatcaatttttattcatgtattttaaattttattctatttcatttctatttttattgtcattctcatttttatttctatattttcattcctcgcaactaaacgggacttaaaagttaataagtaaattatagagttataaagtgattactaattaattataaaacaatatatatatttttttaacatta

SEQ ID NO: 109079 - DNA, 582 bp, Cannabis sativa
ctataaatataatgaaaaaggggaggttgttaggtgtaaagcccggttggttgccaaaggctatacccaaaaacacgggataaactaccttgatacttttgcccatgttgcaaaatttaatactctcaaaatattatttgctatttcaacaatcaaaaattggtccttatatcaattggacatcaataacgacttcttgcatggtgatttgcatgaaactatctacatgcaactccccaaaggctatacacctctgggcattgtccccaaaaatgtcgtttgcaagctaaacaaaagtctatatggtttgaaacaagcctctagataatggtatactaaacttagtcaataccttttagctaatggttttaaacaatctcctaatgatcatactttgtttattaagaatactaacaatactttctgttgcccttgatttttcccaaaatacgtggacgcggataagaacgacacgtggatatgtaagagccatcatttatgaaaatcaactaagccttaggcaaaaaaggaatttctcagagaaggtgcctcccagaggagggcataagaagtgtctttact

SEQ ID NO: 109080 - DNA, 601 bp, Cannabis sativa
ggactcaaatgtaactcctacatacacaataacttctatagcattaagaattttaaattaagatgtgtaacatctttttacattcttacgattggtgataatggtggaggttactcatagtaacaagtaactctctaaatattacaaaaagatgacaactaatatacattgtcatatgttacatacttattagtttattacacatatttattctacatattatattattctaaataatataacatataaaactatattttgtgccaaatatagatcaacttttgcatctcccattggaggtggtcttagagcatctcaaaccatgctctttaaattttagctactttttaactattttagagagtcatatttttccatctcactcaaaccacactctactttaactaatattcattattttaatattttatttaaaagtttaaatattaaatatgaattagtttattaattactttctattacttcagacatattatatttgtaattgtggcaattatatttctaacgtctatatttacaacttataatgcctatatttctaacgggtattgttgctccagaattcgcccaaaatacgtgg

SEQ ID NO: 109081 - DNA, 556 bp, Cannabis sativa
gttagcattattattatctaaatatattaatattaatgttttaaaaattaaaattaattttaatcgtataactctaacagggaaagccaaatctaatttctaaatatgaattgctcatcccttaagatgccatatgcaataacatctctagaaatccctatagtatttttaatcgattgaaatcgacctttttccgtcgaagaaaatctgcataattttgttcagggactatcgacttttttttttggcttccttcgcgctatctctctctctctctctctctctatagtatttctcagtggtgagtttttctttcaatcgatggtgagtttttcttcctaaaaatcacattcttttctaaatttttaataggtaacaactcttactcttagtggtgagtttttctttcaatcgatggtgaaagtttccacttgaatctgaatttttcaatcaaacaatttctagttttcatgctttttttagcagcaagaagatcatgattcgacactggagaatacagaaagaggattttggtggagtgtaagtagcgcttgga

SEQ ID NO: 109082 - DNA, 830 bp, Cannabis sativa
aactaattatattgtgttttccttaactgagaaaataatagatttaatatggagaccacatttaaatattattgtattttgtttatatctgtgacttttttttttttttttttccattatcattatttatacttggtaaatttaatttaacataattatttggtatcatatatatattatataatagtttgttttaatttatcttaaaagtaacatggcgtagcagtgacatcgttcataaatttagattgtggattattttttataacatctaaataaattttctcatttttaatagtactatattaagaaataggttaactaactttatatagttatttcaaataagtgtgttttatttcgctcactcattctctaaaacacaaagattttataaaaataagttttattataattttttttaattattttacttaatttgattttaatctatttttttttcaggtagatatgttggtggacagaaacacatctcataataaagttttattctgtagctttttaaagtacatctttttttatgtaactggcaatattaatgttgtggtttattaattaatttaagatgtccttaagataaacagtaagttttaaaggatagtttaaaggatagaaggaatctattttctttttcctttcatatatcattttttctctaaagtatgatgattaccctcaaaaaataattattagagaaatgttatatttttgttattttcttaaaatttttaatatttataatattcccatgccttcataaattctccaatattggttaattaatgtgctacaatgcgtatattgcttgt

SEQ ID NO: 109083 - DNA, 3344 bp, Cannabis sativa
acttcccttgagtatttatctagactttctctgaaaattttaataagggtaacaatcaaattttgttttaggtgtagggaaatagtaaagatttaatttttgtacctaaaagaaataggccaacatctcatatttctgtgtgagagaggaagagttctaaggaataacatgtctccccagtcaagcttttggtcttcagaatgaacatatgcttggccatagccttcaacatcatttggctgctgtgcataagcatttttcttcactaatgacagtttgaaaaattcttctatgtcaatcttcattttgtcaatgatttcctcaggaaccccatgattgattaactgcttcatcatcatggaaattagtcatgatcaaattatgcctacaactgaattttggacaaaagttgtgtttgagtttacctgaaagaatccccagtctttacaagctaaatgaagttttgccaattcatcattgtgccattgatgttggttgtcagctatcagtttggtcatatcaattactggaagctccaatgattgtaggacagaaactggattgagttcagcttcaggccggagatagcgaggtgggatttctttatggttgtttgaagctagatcttggacattctcaaccgggagagaaccaccataaccttcactcaaaagctcttgatcttgagtctccatttctgtttagctctttatatgatcacagctatctttgtaatcacaatttgagttttttttttttttataataaaaatgaccaaatgatcattagtgagaataatgaatgtcaaaatttaaagtgaatttgtatgtttggtgagactaaacaagaagaagaagaaagtaataagacatataattgaaaagacagaaaataagaatctaaagatgacccgtggcaacaggtaagatatagtttgaaattatccttttttttttacaaaaagaatcacgtggtgcagatctaatctcccaaaaaagatgctttaataataccgagtatcacatgtcagctataggggtcttatacttcatcctgctttacttgagttgacattacttacaactcatgagggttcccatcttaaagatgacccatcacaataagctagccttcgagggccaagtatattctctcacaatgaggggcatactaagagttgaatcagtgacccaaacatataaatacttctctaccacaacaccacacagcacatgacttttgaaattatctgttagacaataaaaatactataggaagttattaataatttgcaagtatgaaggcctagatatgtagttgtgtagctattattagatatggaatgaaataatagaattttggttcatttagaatttaacattgacttgaagaatgtattttaagaggtttatcctgtctcgaaaaaaacccgttatcaaacattatcttttaggttattttttttttttaatgttctattccagatttttgtttttgttttttttttacctaatgctttgtttttttgttttatttaattaagataaagaaataagaaagaagttagcatgtcattcgaaatgggtccacttgaaattagtggagtggggtttgatggtgttagttggatttattatttattttctggtatctcaattatttttttagtaattagaattgatttctccacttctagtagtaattatagtcatttggaaagttaatcctaaatctatgtggtgttgtttgttgttaatcttttgcgtgtgttgctattggtcaaattaatatgattttgctttgagtcttgacctttatttataaaaaaaaaaaaagtaaaaaactagtttggtttggtactagcttgtgaaagacctttaatcatatattatgcaattgcaaatctcaaaccatggaacaaatttgataaacaacttgtggtgttatagtacaaaaagtaagaagaggctatggtatttttgagccactactactcactccttgagaaaatctagttggctcttaccatcaagctttttcctaaacactagtttaagataatcttctgtaataatagttttatacttagccttactctttgttactaaatcttgtaaaggcccaataatgtctttagcatgtggaccatgaaatgcagcaatagaaagacgttgtttcattgggttcaccacaactctgtgctccatgctcttgtattctccattgctcattatctactacatatatacatttatgagttgagtttcaccctcaaatagtttctcttatcattcaagagtttcatgtaataatcattagtttacctcaatgacatcaccaatgttgactatgaatgcacctgggacaggtttcacaagtatccatttaccatttttgttgatctgtaaaccttgtacatcattcacttggagtaatagagtcaatccagtggcatcagaatgtggagtgagccccattactttgttagcttgaatacaaggtgggtagaaatttatcctaattgcttgtcttccatcctcaaacttgctactaagtgtgtctaattctagccccaagtttctagacatgaatttcaaaacacataatgcaactttctgcacttccctagagtacttgtccagattttctctgaaattttcagtgcatgaatgatcattttaggatctaagttttaaagggtttgtttcttataactattttatggtcttacacttgttatttgcatataaaagttctatagtacacttttcaaaagtttataatgtcgaaaataaatttcagacagttacttactacttgtattaaaaaacagttatgcgtgcaacaaaatatttgaaccttattttcagcaatgttaacgagaacatacataattttttaaggggtgtattataaaatttcctttttgttttgtatgtaagaaaataatgaagtttgattaaaattttacctgaaagaaataggttgagtaggccaatatctcatatttctaagagatacaggaagagctctaaggaataatacatcaccccaatcaagctttttttgctcttcaaactgaatataggcttggccatagccttcaatatcatttggctgctgtgcataatcttttttagtcactaatgacagtttagagaattcttctatgtcaatcttcactttttcaatgatttcctcatgaacctcatgattgattaactgcatcatcattattatgaaaattaaaatattattttaaactctgtatttttgtaaaaattattaattggaccctatattttgttaaataataaaataggccttgtattttttaaaatagt

SEQ ID NO: 109084 - DNA, 1171 bp, Cannabis sativa
gggattgcacagcttacccggtatttctccttacggatcacgggactattgactgtcacaagtcgtatttcaaaattaatattggttgtgagtagaaaagctcatgtatgttatttatgatattaagttatgacaacacattattaatataagattggagtttttacactacatactgaaatttttaatttttttatttttttttagtatggggcagaatttttttaaaaaaatactgtgtaagttttatactgtgtactgtgttaagttttcacggttatttcatagttgttttttagttgttccattgttattttaattattttgttttgttgttttacggttgttttataaaaaagacagtatttttgtaaaaaattctactccacaataaaattataaatttttgctcaaaatttaatatttttgtaaaaattcctataagattctctatagctagtaaatgaatttatcatctcatttatataaatataaatgttagcagtattagataattttttttacaatgaaagacataaaatttacttgcattaatgttaaaaataggataaataatagtataaatactatttaaagttttgattttgtaaccggtatagagtcgtagactcaataattttctttcaatgacataaatattcaatgctgataaaagtataatttttgtctagctctatccattcgtaaggacttagtttataattttattaaaagaaaatttgaaatgatactaaatgttatgcagtaattatctcttaaaaaaaataatgaaataatttactattttattcgttatatatagaaaggaggaattaaaaaaaatggttcagttaagtggctatactaaaatatacataaatctttagaacggccatattctttaattttaaattcctatgccctttttttttttggtgtgtaatcaaactcacattggcagaaagattatgagtattaaagatggatactatttctattggtacgagattttttggcaaggtgctcaaaaataaaaccgtaaggacttaatctcaaagcgaactatcatactaataatgtgtattaagagttagtcccacattgctaatgtgtgtaaataaattgtgatatataagatgaatgggctactcctcccattgccaattagttt

SEQ ID NO: 109085 - DNA, 1681 bp, Cannabis sativa
acacaactatatcaatataaataacgatcagcaaacttgaataccccgtcttaactaagagaatgccttaaagtactgtttgtgcttgacattaggattacgtaaactgaaggttgttaggttaaaaaagactagtacaactaatgaacctcaaaccagcatgtcataggtaagactatggactattcctatgacatgctggccaataggaaagtaaatggtacgggtcagtcccgactcgctaccgacccactccgttaatattttgacccaccccacgccaccccattaaccttcatgtactgggttgagtcagtcccgacctggattaactgggtcgggcttgacccaacccggccctatcgctagttttaattacaatttctaaaaaaataaaataattgtatttttttataattatgaatagaaaaaaaaaaactaatacaccacacaactgaaagttaatatactatcaccacgcagcatgtcatacctatactcttttttttagttttttcaaaaatactttttttaatgttttatttacaattttacaacctaaagttttatatataaagtacgattttgaagtttcaaaatacaaaaatacgattttttcaacaaaagataagaaaacaactaaaaacaacaagaaatcaaactcataactactataagtcaactttaaaaaactataaaacaaccaaaaacaaggaaaacaccgacctcataacaactataaaacaaccaaaagaatatcgaacagtttactgaaatccgtattttaataaataaaaaagttcaaaccgtaaaaatgaaaatttctgtgtttaacgtatttttgtaattttttttaaaattttaatctattatgtaatttttttttttttggtaagaaatgtcatgcctatacttgttagtaaaatatacattaaaagttattttgtcacacaactgaacaatttacatacaaatacaccacagaacggaaagttaatataaaatgaaaacaattggtaaatgcattaagaagaatagttcaatatcttaccagtccatgtaagtaaaggttgaagagtagttgcctgacttagtgtaaagtaagcgatgatgatagtcatggaaatcagcactgcagaataatgaagctgaagaactcagtaccaaataatttgagtacagaccaagtggctacacggttctaagtaaactcaaaaaggaaggtatacacactgacccgccatataaaggaaggaagtttgagaggctccatggaaaatggtacccacaatgtgcctcaactgtctccagcactcttactaccatccacaaccaaagtgttattagatggggaccagtgatagcaggaccaactatagtcgcaaagccaaggaacaatatctcagcagggtgagcatattcagatgtcagtccaaaaggtgttgcatatctgtatgttttaatacaccaatcagatcaccaaagtctaatcagtcataaaaattattgattattcgaatgaaaaagcaaatatataaagtaactctcacttactcatgatggacactgtgcacatgtttgtacagccattttgtatggagaaccctatgtccccagtaaaatacaaaatcctctaagatgaagtagaaaattatctgtgttaaaactattttcctgcaaa

SEQ ID NO: 109086 - DNA, 595 bp, Cannabis sativa
tgatggaatgatgagtaaatttattgaaccagctgcttgctgctccaactagtgacgtgggaaacaaaatacaacgtagattgtttgtaacattggtagcttgcataatagtgttgaagttattcaaatgtgagactggatcggtggtcccataatatgacgagacgtgggggtttttaaatccctagggaaaaggagtgttcatgatatctagatgatatggctcgagttcttcatctgagtcatatcccgattgttttccttgctccccgacttgatacctcctgaacttatcctctaactcatctatttacaattggattggatccccttgcattagaccgagttgttggcgaatatcaagttttttctggttcaagtattctcgcagatccggctggttattattgctagcggacctcgttctactcacggattgtgtcctacttacggacctcgtccttgagtgacttgcagtcttactcgtgcttgtgctttttcgatcattgttgcaacgagtactttctgttgggctttgtgccctaaataaaactctatttcaatttctatacaattatcaataaagaaacaaatt

SEQ ID NO: 109087 - DNA, 1210 bp, Cannabis sativa
ctctctctctctctctgttttggtatgaaatctcaactcaataactaattttctaaggtgtttaaactcaagcagaaagatcactttaaaccgaaagtacgattcttattccacaaaactcgctcatcctgttataagtatcgcacgtatatacactcggtttaaacgtttcatacaaaatagtaataataataataacaataataatataatataatacataatatataaaaagtgtgaaaaagtgtgtcaaagtgtgtcaaatatatcatttaatactataataatatttaccaatattattatacaaaaaataataatcacaaatattattatattattgtaagttaacacatttcattattattattattcccacactaatagtaataggtaccaaaatcaaataaatcaccgagatttaatattcagatatatatttattaggcattatgcacatgccaagaaaatcaaccattatattatcacgaaaatttcatgcatatttaaacccataaatatataaaataacaaaaatactcttagcaggaaaaatttacaaaaatactcttctgagttcgcggatattacataacaacctacactttttgtgatgttgtctttgggctatttttgtttacttgtttatccattgtgagtctaaagctttttgttcgtcttatagtcgatgtggttttttgtgtgtttgatcatcttattttgagatgtgcaattttttctctgccttgaccatgtagaccgttgttgcgattaatcttgactgaaatttctattataaaaatatatatgtttatataaattatttgacactttgataatttctagaaatgaatattctcatattttatttacaataataataataacctacaaaattgagttagtttaatatttgatggaaaatagctattattgttttatattttataactgttgttggaggaatttggagaggaccagattagcgcgagtattcaaagaaaataagaatgcccagtaaaaaatgtgcgagtactcacttagaatagcaagtactcaaattatcgactactaaatagagaaaaaaaaaataaaacaaagagaaaataagagaattgtaatggtttagtcagagctcggtctgcttagtccattattgcaaagatttcaacttagtttatttgattcggatcactcatatatataaaaa

SEQ ID NO: 109088 - DNA, 4364 bp, Cannabis sativa
taaattatcatttttatgttgtgattaaaaggtctgtggctaaaagtattaattactaaaattataatttgttgtgactaaagtatttttacacaatacttgttgtgactaaaactaaattaataacaacttgtatctaaatactatattttaatcgcaagtgaatttttattgtgattaaaaattatatttagtcacaaaaaatttatattataactaaaaaattatcactaaaagtagcaattttttaccgtgacagtttttcttttcaaaaaatactaataaatattatttatatcaactacaagacaatgttttgtcaaaaaaaaactacaagaaactaagtctgtagagtatccaaaggaaaagaaagtgcaaaatattaaaaaaaaaaaaaaaatcaactgctttcaaatctaaatatgaataaagatatataaaaatttaaaaggtaattactcttttcattatcaccaagttaaatatacagttccattgggtctaaatcagtaaatcttattaatgattatttggtgttattggctgagttgtgctgttatcataatttagtcaaaaaaatttaataaacaaacaagaagctttacacatatacaaaacaagttttttttattattattatttaacatttatttgtatcagtattcagtagtcagtacaaaataaacgaatcttgattagaataatttcttactgtattttgtagaacaatataaattgtaaataaataactgctaatttttattttaagcataaaaaaagacactgatataattttgaggcaaaaataataatagataatgtagtttaaattagaggagtattattatcaatcttttattataatttctgaaatatggattttttttttttgttacgatagtattggtttaatttcaacattatcttgtaaatttttaaaaaatttcgaatatattaaaaaataaatttaaaatcttttaaacatgtgtggtagactataaatttttttaaaatttttaaaaatttgtgaaaaatagtattgtaattatatttaatattcttataaaaaaattgaaaaaaaaatattttatcatgtaattttttttttgaaataattttaacatgtaaatttaaacataaaaattaattaaaaggttttaatacgttacagtgaaaatgttttaatacgttacagtgaaaatgattaacatgtaaattaatttaaacttaaaaattaattaaaaggttttaacatgtaaatttaaaaaaaattaattaaaagttgtaattaatcttactcttcaaattaataatgtaatacgttacagtgaaaatgattaaaaaaaagcaaaaaacaaaagcaccaatcaaacaacaaaactaaattctgtgtgagtgtttttttttaatgataaaattgtgttttttattatttgtttttgattaaatcacattcagttattgtcagtactttaagtaacaataatcaaatacataagtttgacgggcctcaatccatctatacgaacaaaatttaatcacaaccgttagatctaaattacagcaaagctaagaaaaatccaaacaaggtcacaagaaaacaaacataggctagaccacaggagatccaacccactctgaacagaggtaccgtagacacgataatcgagtcacgcgtcaattcggccattaatgtgtcacagctgtagaaaaacccaacctttatctccttcctccatgtgatcactctctctctctctgccatagatcttgggcttaaagctcaaaaccctcaatacccatttgtttccccttgttctcttcttctttaatggctgctctcaagtttccggtagtgctctgtttcgccatcgccgccgtagttttattattctccgtcgaggcccaactcgacgacacgagcttgaagctactgaccgatgcattcgagtggccgacgacaatgtctctctacgacgagttagccgaggcagaagacggcaccggcgaagacgatgggttcgtggaccgtagatctctgttctggaggaacacccactactacatttcgtacggagcattatcggcgaacagaatcccgtgtccaccacgctccggtaggtcttactacacccataactgcttcaaagctagaggcccagttcacccttactctagaggctgttcctcaatcagccgttgccgccgctgattaaggtttcgggtcgggttttggaaactctttggttgagttttttggttacgtggcatcgttttattggttgaagtggactcttttttaatggttcaagtgtatttggatttaaattatgtgttcactcattaatgttatgttaatgagaatataattcatgttcttattatatcttctagtttttttttttgttatataatatgtatattaatatatttgctgcctagattgatgcattatagatttcaatttcatgagttgttttattgtttattgtccctaattaagttgtctttttgcaatgctattttgaattatttattttgtcattattatttatgtaagatatatttttatttaatttcaatttcaatttcgagtacagtaaatttattagaataagtatagatatggatgtattaattattcaatagcaaaacccaaactgttttgaactgtcccaactactaaactaactcactttaagttttacccaccgacgttgataaataaagtcaacaagaagctgataaataaagtcaacaaaaaagtgaaaactacatgcttttaaaatctttgtcacttgtctagtctttctaatcctacaaattagaatctagatgataattttgagctcaatagaatcgacataatcaaatttgaaatactgttctaaaattttattttctctattttattttacgttatacatttacattaaacttatctgttatatttataaattaaaaaaatctgcagcataaatatcaattttgttcattttattaattactcaaagtttaatatttgtaaccgggataaactcaatttttatgtttagcggcataagtacccaatatttataaaattataatttatttttaattttttcatagaaatatgtagtatcaatttcagtcaagttttgagattaacttataatgctattattctcgctaatcgttgtattttacaattttatcgcttttatttaaaaactatattataataacaatgtgagacaatacttcattatttgtagtacatcatgtagtgagaaacatatctcattcttcaggttttatatgttatcgatataaactagtagcaagatcagtttaccattgtgatgtgaaagaaaaggcttgtgcattctaacagactattaacattgataaattagggattttaactttttgtattttttacatcgtttttatgggattatttaactttgtgcatttgttatttttaaagaaattgatagtagtcactgtcacatcaattatgaaaataacccactactagtgttgaattagttttttgaaaatttgatatcgtggtaactaattattatcatataattaataaaggaaaatgaaagattattgtaagtagttattatataacacaattaatttgatactagtagtaaccagttatttagaaccgagaaaaaaaaaaagaaaaattggaaaaaaggaaaaccccccaaaaaagtcatatttttgtggcattatttataagcatttttgtaaatttctattttcagatccaacttttttgtgggcttggaccaataagagtttaaaagccccaaataaaaatgaaaaaagagaaggcttgtgtgtaatttgatttgggctttgtcttctctcacgtgttgggataattaaataacacaattttttataaaaaaaattagattttttacgttttaacttttttttttaaaacatttttacagtttttcataaagacaacaagaaaattacataaaagtaacatgaaaataatattaataaaacaaaaaaaaaaaataataacatacaggtaacaaaaaatcaataataaattaacaagaatacaacataaaatgatcgtattttgtaaataaaatcaaaaaaatcgaaaaaatatttaaaattttttgtaatttttttttttgttaattttgtgtatttgtgaaataatcctaccccaatcttccatatataacatatgcaatattttggccaaaaaaaaaaaacaagtaaagtaaatttaatatattttgtggaagacaaaataaataaataaataaatcaaaccaaccaaccaaatcacatatgaaaattgaaaacccatgtactcaaaaaaaaaaaaaaaa

SEQ ID NO: 109089 - DNA, 853 bp, Cannabis sativa
  modified_base (125)..(125): a, c, t, g, unknown or other
aggcttgacctttaatcgctgttcagggttggaagataatctcatactgacccaactccactacccatttgagcaaccgtccagaggtgtccagcttttacaatacttggcgtaatggttggtcngtgtatacccgaacaggatgagcctgaaagtagggccttagctttctcgttgctaggattaggtaataagtgagcttttctattaatggataccgaccttcaacttcaatgagtcttttactgatgtagtagaccgggtgttaaatattgttttcttctctgatcagtacgacacttatagcatgttccgtgacagccaggtatattcttaattcttctctgtctagaggttttgagagcataggaggttttgcaagtttcatttttagctcttgaaaagctttttcttattcctccatccattcaaattgcttatttccttgcagaatgttgaagaatgggacacacttgtctgttgattttgaaacaaatctgctgagtgtggtaatccgaccagtcaaactttgaacttctttggtttttgttggggatttcatatccaggagggcttgaatcttctctggattggcttcaattcctcaggcattgatgataaagcctagaaacttacccgagccgactccaaaggagcactttaggggattgagtttcatgttatattttctgaggactttgaagcactcgtccaagtcatctatatgccccccaacctttctaaatttgacgactatgttatccccatacacttccatatttcgtccgatatgatctttgaacatcttgtttacaaatctttggtatgtagctccggtgtttttgagaccaaa

SEQ ID NO: 109090 - DNA, 769 bp, Cannabis sativa
gccttaaatatcacactgatgaaagttaatgtccatttttttttaaaaaaaatgaagtaaatggctttttataaatgttaatacctaaaattcccttggttatataaatgaagctcaactccatttttttcgatttgttctactgtttgcgcggtgaaaaaataatatacctccaatgaacaaaaaatcaatatacctcaattaaatataactatacctcatacttaaactaatatttcatgttttttccctctttcgttcattatataccatagcacattaaaacaatataccataatattaaactactatatttttttttcttagtatattacaatattacattttttcccgtttaatacattttttttaggttttaaatttaaattttgtcccacttaataaagatatattatacaaaataaaaaaaaagaactaaaaactaaaaacttaaattaatatttaatagtttttttttctctctatccttcacgatatacgatatcacatacaaacgatataccttagactaatatgaatataccataaaattaaaataatatactattaaatgttttttttttccacgatatacaataacatataaaaactatattctgcaatcagatccataagtactctagtgaaaaattaatataccaccagtacagtggaaaaagtatatatatatataccaaaaacttaatttaatattccagattttttttttctttttctttcattcatgatatactaatgaacataaaga

SEQ ID NO: 109091 - DNA, 666 bp, Cannabis sativa
aaacttcaaccacctccgaaaaccaagaagacggttgagatagctctgcgttggtcgcgactcctgaagtgagaagtactgaccttttcccctatataaggggtcacccatgacttggaaaagggatcagcaattttgagcacttagagaaaaaacactctttatttctttgcattcaagggtctgttcttgacttttgcgactctaattaataaaagacaaagggagtaggctattaccgacatctagagtcgaacctctttaaattttggtgtctttctttacatttattacgaattctggtatcattatatacatttactgttacgattttggtttaaatctcatttcatacgacttcgtgtcggctggctaaaaatctagtcagtattttggtactttcattgagagctttcaccaaaatcttgaagtttttaccgaaaaaacttgtgttaactagaagatctcaagaacaactggatgaggagatggataatgcccaacaagttccatcaacgagcaatcttgttggaaataatggagagtaacccctgcgtcctggtaattgtaacgccctaatactaaggcacactacagtgcttttttaattacagtgcaatctttgctaatcaaaaaattttcttgaaaaatgtgtttaattaaaac

SEQ ID NO: 109092 - DNA, 646 bp, Cannabis sativa
gacctcgttcttcacaatctccatactacaataaagattcgtgtgcttgcgagttgataaatgtaaaacgtaccacattttggtacacaacattaaatctagaggtactcatggagatatcttaatattataaagtactgataatttaaaaatgataacattgatggaaacggtactctagaagggactccctaaagaagttaaaagtaacatatttgatcataattgatccattgaagtggttctatacaggtacttataaatgatacatatttgaaaaatatgtaatttaaaaatatctctataagttaatgtcaatataagagaaaattatcatataatgcgatttttgtcagcaatagatattgaatgcttgcatatacaataaactaacatgagatagcaaggatcattgtattatatttatcgagaattatcaacgtacattttgttttgggccaaaataatatgacgcagtctatgcaagtttactcgcataaagtgaaataagacatgtatggtgtgaaaatttatatttctaatgagaaatttgcatatatgtatttgtacacaaaatgaattattgtacaaagtttgaatagatatgagattgattgaaatatggcttaaatattgagaaaatata

SEQ ID NO: 109093 - DNA, 541 bp, Cannabis sativa
  modified_base (489)..(498): a, c, t, g, unknown or other
tggtggtatgggatgaaaagggatgtggcagactatgtcactaagtgcttaacctgtcaacaaaataaagcagaacatcaacgacctgcatgattacttcagccattaacacgtccggaatagaagtgggaagacattgcgatggattttgtggttggtctacccagaaccactggcatgtacgactcagtttgggtcgtggtggatcactttacaaagtcagcacatttcttgcctgtcaaggtaacctatacagttgatcagtatactgaattgtatgtgaaagagattgtttgtcttcatgggttaccaaagtctattgtttcagatagagaccctaaatttacctcgaagttctgggtgagtttgcagaaagccatgggaactaacttgaaattcagcacagcctttcatcctcaaacagatggacaatctgagcgaaattttcagatacttgaagacctgttacgagcttgtgtcatggatttnnnnnnnnnntggagcaagtatttgcctctgattgagttctcctacaataata

SEQ ID NO: 109094 - DNA, 595 bp, Cannabis sativa
actcccacttgcactaatatagatttaatcagtacatctcaattaatcttaaattctgacggtgtttttcaaatgcagtcactgccaagactttggtgaatggatctgctaagttatcttctgtgcccactttttccactagtacgtcccctcttgccacatattctttgatgatatgatactttctttctatatgtttgcttctcttgtggcttcgaggttccttactgttggctattgctttattgttatcacagagtaagactagaggcttttccattccaggtacgacaccaagactggtgaagaactttctcagccagacaacctctttggcagcttctactgtagttatgtatcttgcctccatggtagaatccgaaatcgcggtctgtttagcacttctccaaaccactgctccaccgccaagagtaaacaccatcccagatgtagattttttgtcttcaagacatgcttggaaatctgacttagtatagcctatggaatttaaaacaccacccttgtagactaacacataatctcttgtgctcttcaagtatttcagaatatacttaacaacattccaattttcctg

SEQ ID NO: 109095 - DNA, 2361 bp, Cannabis sativa
taatgaagaataggcaaagagagataaagataacaatgccaaaagggaaagcttagatagccaagaaaaagccatttggtactattcaagaagaaaagggaagatgttttgatattggatgaatgagagggaagggagatggggtggttatatatataggtgtatttttagaggtagctttaaagtgaagtggtataatatgttttgttaattagatgagtaaatctttaagcttggttctcatttgcttggaatgcttttcttccaagcatgatcttgatcatggctaaaaaaggactccatggactaaacattaggaaagtaagttataatgatatcatacaaatattatatttggatttttaatagttgcattatagttttaagaaaggtgaaaatataattaattttaatgacaaatatgatagaatcacactgcatttgcatattgttataaaaattattttgtaaactatttagtgcttttgttgaaatttagaataagatgtatggagttttatttcaaaattaataggagtagttcattcatcttatgtatggtaatttatttctacacattaacaatgtgggactaactctaatatactctcttcacatttggggttggaaagtgtaagtataatgaacgacctttaaagaccacagggtcgaacgtgacatttaaaagaatctcgcaaagccaaatatcgaaaaatttgtaagtgtacacgtcggaaaatttgtagattttgaaacagatcaaagaccccaatgttgaaaactagcacacataaatcgaaaggtctcaaatggagattaaaggagagacagtgaaaatttttagtttgactctaataccatgttagaatttagagtaagatacatagagttccatttcaaaactaattgacaataaaagaagtagttcattcattttatacactgtatttttttttctcaataatttctagtttttggagttatttttataccattttctaaactatatttgatggtaccaaaaaaattattcatagtacttgccaaatgtgtaggatgaattttatttattaatgatgagatgatgtctttgtaactttatggacgtagggacattgctataaagttatgctgagatacatgatgaagatttcaagtaggatcttgtgaaagtcttggtggaccacctatttccattataagccaaattctttttttcccatatattcaagagctccaccatgcagggcataatcactaaaataaaagaacatctgtttttggttttataaactttttttattaaaaatattctgtgtagattttaatcaaaaataagaaaaacgtaagagttccggccaacaagttaattgtctagtcaaaaagtatacaaagtcaagatattactgactacaagtaagacaactaatatttgaccaaattgcgtaaaaaatttagattttgtgtagctttaatgagtttttaagtcaaattatggaaaatttgtatttgtaaagttcataaattggtggaaaatggagcaaatcttattcacaaacctctaatttgattctcattatgaatttgagtgacataaggttaaatctgagcgacatataactaatttgatgaatatacaacaaacctctaatggagcaaatatttaatgctacaaaaatacatattttaattttcaaaagtttctctattttcttcaacattacattttatgatgatgatgattgtgtgatagtatatgtgttaaacataaattttaggttcagctataaaaattggatcaaaacctctgtaaatactttgaaaatatactaattttgacaattttttgcatattttaccctattttatttccaaaatgtattttatgaacctgttataaaaactcatgtgaatgcctaacaacatttttctgttatcttctttcattctatggtgattttaccaagtaaaaagagctcaaactcaaagtaaagtttctttcatgccaagcaagcaaatatcccatgcaccaaacattagtaaacattgttcttgtttttgtgacaaaatggaacaagatattgaaaaaactatatcccaatttaagaatgttatttgtcttagaagattgttgtaggttatgaagtgaagagtctcaagaatttggtttaggaattcttggtggaatgaaataaataatgtcctaaaaggaaaactttatttcaatgggttacttgagctacttgcattcttattattaagcttgcaaaagttttgttgagtgacaatatatcattcttacttagttgtataaatcttgtataccttgggttactatatcctcttatttacataatctac

SEQ ID NO: 109096 - DNA, 1459 bp, Cannabis sativa
tttatgccacatagacataaataggcgtgtgagcgtaacacgcgggtctgtgtcatacagacaaatgtgaaatggcattaatgtttatgtgatgtgttgattatgactattgatattttatattgtcttgctgggcttggctcacgggtgctctactatgcatgaaagggtaaatctgtctctgatcagccatgagtgcgagggcttggcgatgtatgtacatgctcgggccacactagaccaagcgggttggggtctaccagcaatgcacttttgtaactctatttttgtcgcttaggtcggctagtgaaaagagttgtaatattttgtaaaagatttttgggatcccgaaacttgtcacttttatttgtaaagtttaatgctattacaagttttattttcatttcgctttagttcaaagtttaaatttctcgcgcttttcttcctagtaatcccaatttaggggattagggtttcataattagttgtcgtggcgtgcctaattgttagggcgttacaacacctctccacaatcagacttatctaaaagagaaactatatgaaattaaatgtaagccaaagattaaaaaatgtatatgacttaatcaaaagttaataagtttacagcagcaacatgattcttaagactatcggctataaagactagatctccactcgccattgtaaaaaacttatcagaacctaatctgctacacataacagcatttaggtccaataagtttgctgcaaacttagccagatctgggccaaagcctctcagcaatcgcttgacgatcaaaaatgtcaagaagtggctcgttaaattttgtagcatcaacgaattttgcacctggcctagtgtaaagcgaattcgcttttttttccttatattttcatactcaaaaatgattttcttgctgaaaaatcaatctaatgtctccaattgaatacatactacttcctctggtaacgaagaataataaaccggtaagacaatgttaaaaggaggatgtggtagaagatctatcttgtctctaggcaactgggcgaaggggcttggattggctgagatggcggaacttgagaactgatgacctctttgctagaacttgggagtctaatatgtatgcccaagtttgtagcagttttttgtagtgactgaatatatacaatatatgttgggtcatcatgtaaatgagtcaaatttatgtggtctatttcagaataaaatttatgactcaagggcatgattgtcaggattttaatatgtggataccataagaaaaatttctaatttgatgagggaccaaattggaaatagtaaaaataggattaattacttttttttacagttattgataaacatgtattggtcctcattttgcactgtatctgaaaaaccgtgtttttgcaaatgtcagttgtatatgagaaaatataaaaactgtaagcgtttgca

SEQ ID NO: 109097 - DNA, 1080 bp, Cannabis sativa
ttgtagactaacacataatgccttgtacttttcaagtacttcagaatatgcttaactacagtccaatgttcctctcgtggattttcctgttcacaattcctactgcaaagcagatgtcaggtctagtgcataacattgcatacattagactcccactgctgaagcataaggaacccttctcatgtcctttatctcttagggatcagtaggagactgttccttagatagacggataccaaatctagaaggcatctatgcccctttggtatttgtcattgagaatctctctaacaccttatcaatgtaagttgtttgagagagagcaagagatttgttcttccggtttctgatgatctgaataccaagaacataaacagcttcacccaaatccttcatttcaaattgagtgtcaagccattccttgatgtcagtcattttcttggcattgttaccaataatcaaaatgtcatcaacataaaggaccatgaatactaccacttcactatccttgagttggtaaactcaaggttcatcatcgttttagtgaaagccgtaggtcttgattatttcatcaaaccttttattccaagagtgagaagcttgtttaagtccataaatggacctattgagtttgcaaactttcttttcctgtctcggaagaacgtagccttctggttgctccataaagatggctagtgctgagtgtttcttcaaaggttctagacggccttctggcaatgtgtcaagaatgttagcctggaccttatacgcccaagtagcgagcaagtagtgcctccagcctttgtttaattctcaaatgaacccgttgtatccttctctgcttatctggtcattctttgacttaccttgactttagtgggtcaatgaattcgcggagggacaaggctgctagcgaccaagcattgagtcaagataagggcacccccccattccaaccaacctataaaacaagttttcactaggttttatctagaaggcgagaagagctctattggagcatttgtcgtgcttctaggcaaagtgttacgtgcagtctatgatggcatgttacaagctaag

SEQ ID NO: 109098 - DNA, 1351 bp, Cannabis sativa
  modified_base (791)..(792): a, c, t, g, unknown or other
atgacttttggtatttgtaactagtttttttcgttcaaaaattaattttttaattatatagaattaattagtttattaatttaatgtcttaataaaattactttaatattatttgaatttctattaaaaaaaacctcaagtgagataatttttttctttattatagtgttttatttttatttttatttttttgaaagaaaaaaaaaagaattaaaaaaaaaaaaaaaaagagaaacacaatttaaagtttttgtatggtattcctctttattttttcccatattttaaagtttttttttagaagaatgtcatatttagtataattaagtttttatgttatctatatcaaaacttatatttttttcctatatttttgtaaaaaataagttattaattctgtaccgtaattaaatgaattactaccgcaggttataaaaatacctttatttgtgagtacaaaattggtgttcttatcaaaagaataccctatatatatttaggaaaaattctacaataaatatatccttaaaataggtgcattgatgtacccttatttattttggtatctaaaaaattacttggtctaatttttttaggtggtatacattatagttatttaagacatctgataaaattttgagaaatttggaaacatttaacacgtcgaaaatagtgttcaaaaagtttattgcatgcgtgacttttttattttatatgcttgtgaaatagactatttaaacaatgatttcgatattgtaaattatgacaaattttttaaaattttgcagganntcttaaataactataacgtacactactataaaaaaaatttagactaaaaaattcttatagataccgaaacagcagggattgcagcaatacacccattttgataggatgtattgtagaatacacctccttaaaatagttgtattgatgcacccttatctatttcagtatctaaaaaactacttggtctaattttttttatggtcgtatacattatagttatttaagacatctgacaaaatttggaaaaatttaacacgtcgaaaatagtgttcaaagagtttattccacgcgtgacttttaattttattttatatgcgtgtgaaatagacggtttaaataatgatttcgatattgtaaattattctgaatttttcaaaattttgcagcatgtcttaaataactataacgtacacgactataaaaaatttagactaaaaaattcttatagataccgaaacagtcaggggttgcactcccttaaaagggatgtactgatgcaccctctacttgtttcggcatctagaagaatttattagtctaatttttttttcatattcat

SEQ ID NO: 109099 - DNA, 857 bp, Cannabis sativa
  modified_base (46)..(64): a, c, t, g, unknown or other
  modified_base (380)..(383): a, c, t, g, unknown or other
tgacactttgtcaaactaatatcaaacttgactattcaaccaaccnnnnnnnnnnnnnnnnnnntatagagatttcacctccttcattgttcttcacattcaaaccttgagtgaaagactgacatgcccacacataacaagtcaagtacttaatcatagtgagtaagacggtggtaaccaaactcgaaggagagaaagaaatctaggttcagatcttgataatgctctgcgactaaaaggaagcaaggcctagagatcttgaacggaaggagtcattatatttcactgcaatcaatgtaaggttttcttaaacccttatgtgtttattacattattttagacaattcatatatagaatgttaattcaacatacttgttannnnatctagatcctcgtaaaatattcccaacatatatgcacttatccattacatgaacaatgcaaaaaaagaaataaaaaaaatagcgttatgtatttaagagcagtagtaagagtgagaaaaaaattatatacaatatagaatatatgagtatgttgatttaccttgatcattaccattctatatacaaataataattgatgagagcttacaagtaaaaaatgagttaatgttagagctcgatccattcacttctagaacatgggacaagaagtaaatctggaagagggaaaaaaccaaaacaaaaatatgagttaatggaacaacccaaatgatatttatcatattacccaacacaataatattttcataaaattaaaaataattatatataaatatatattataataattgttcaaacaaatcctttagagcctaaaaggtaggagtttgaattaacaatcgactactagaatg

SEQ ID NO: 109100 - DNA, 641 bp, Cannabis sativa
tatataagttcagaccaaagaaaacagatgacaaatagttatggaaaatcggttaatggaagttagaaaagaaaatgacataaaattgggtagtgaaaaaatgggttttaattgtggtttaggaaagtatatcagttatagagatttttttttttaaaaaaaaaacctgaaaagataatgataaaaaagaaggaaaaaaagatagggaaagcatggattgataggtgtcaatcagctgacgtgtgtagtcacttcacttgcatttaaagagtgacattatgtgtacagtgtgtgtaagtagtaaaattgtaaataaaaaaacttaaagtgtacaaaagtaacaactgccgtgtaggagtatatatgtaataaaaaaaccattttgtatttttgatgtaaaaatttcaaaaaaaaatagggaaattcgattttatatacttaaaaaattaaaaaaaaaattattcttaaaccaatacattttaaactaaaatactatgacacttttttcaaaaccccaaaaaaacccctctaataattcaaaccctttctctctccttccctcaaactctctctgcatctatctctctctctatctcgcatcccacaaccgcccacctacaaatcgcccccaaccctcacca

SEQ ID NO: 109101 - DNA, 580 bp, Cannabis sativa
aaggacattcttctagccctgtacccagccataggatgatggctcttacaaagaaaaccacgcgtctggctgacgcaactgatcctcaagtggcttagcttgccattttgcctagtgccgaacaggatccgaccatccagatggaggaggatcgtgaaggggacgctgaggtctaggagatggaggagctggatgatgtgcgtcctggcagtccctccgaggcggaggaagaggaagaggttgaacccccaaattacggggggtacaacaaggttggggagccagttgatgctgacaaagacgtcttgattgagggcgtggactacgtcagtgaggagcttgctgcggcggttcctcataaaaggcagggtgcctcgggcgccaagtgggtaagtcctctgtccaagattatagaggcgcgccttcgaactcttgaccagggcggatacctgggcgagctggactgctacattcccacccacaataatcgtgccacaaaccctgacaagggggtgtgcgtctggtcgggagcccatggtcagcaaggagcgttgatgcccttgcataagtacttcaagga

SEQ ID NO: 109102 - DNA, 563 bp, Cannabis sativa
  modified_base (85)..(98): a, c, t, g, unknown or other
ttaagtgtcatgttgtttaataaacatatgttgttgatatgaatattttataatcttttactcctttgggttagtgggagtttcnnnnnnnnnnnnnngagattacatttatatgtaatttttttttattgatgttatgaactacttgatttattttgtgggccaataatttttattattggatgtttatgctttatgctttattatttctcgagaatgtttgaattgaaaatatgtagttcataacttgttgcaattattgttttttaagtttatttacttaataacaataatattttgttgacttaattttttaagtatgtttagtgacactacttatttattaagtagtgtatggttaatttcaccaacttatttattaagcatcacgatatcagtgaagttgagaaccgataaaaatactatgttattttaaattgatcacatgttaaatataatttcgtaccacactactagacttattgaccatgtcgatttaatactttggtatttgtgattatgaatgtcttttgttgagttaaaaacaatatgactgtcatagt

SEQ ID NO: 109103 - DNA, 1003 bp, Cannabis sativa
aaaaaaaaaagacaaaaaaaaagtaattgtctgtttatcaattaaaaaacggcacaataacattaataacggtgcaaagaaagaatattgaatgagattgctacgttattattaataataaaatacaatttacgtttgtaaatgtaaatttcacaaaaaataatacattgacattactctacaaactacaatccatgtcatattttgaggcatggtggaattagcatatatccccggcccattagcaaaaccattggccatgaattttcttttcttttagcgttgccaaatttaatgggtttaatgccaacaaaatatatggttttgcaggtctagtcactaatgttcctctttagtttaaaaagctaaatatatcaattttgtgcttgaattgaaaataaaatattgtaggagtaaagatttccatgcagatccaatatattactagttaaatccattaacttaacacgcacacagtacatatgtaacaaatttgtacagaggatttaaggccaaacttcactaggatgattgatcggtgcgaacattcgagacccttgatctcaaaaccttcaaaaagatctcctcaaatattttttaggtaacaccaatctttgctttatcagaataaaagcagaatctccatcacaacaacttatataaaatatatattaatctatgtatacttctaacttccacaagccatgcactcttcacgatttgtcagagaacaaaccatttgtgccaaatcagtatcagcaatatcctcaacctttggcttttcctggcattggaaagaaacaaacttataaataaaaagcgtgcaaatattcaaacgtgaggaagaagttgaaaagtggcaatcacaagcccttactttcatgccagtagtatcaacagtgaacttgatagcatcagctgcagcccgagatcttagatagtacattcctgttttcagaccctaaaaggaggaaaagataaatttagaaattttacaccaaaa

SEQ ID NO: 109104 - DNA, 759 bp, Cannabis sativa
  modified_base (206)..(209): a, c, t, g, unknown or other
ttcagctatggaggttactatttaaaaaaaattgaaaagaaatggaaaaaaaaaaaagaaaaaaagagagagaaatgatgggtggttgattgataggtgtcataggtcagcatgtgtaccgatgctttaaatgagtgtgcatgtggtaaaatagtaataaaataaagaagaagagtaaaaaagttgatatagccgtgtagtgatannnntataataaagattgcattttgtatttttgatgtgtaaaaatttctaataattttgtgttttttttcataaaaaaaattgattgtttaataataatgaaatggaatcacaattaaaaagaaagaaactcactcatcaaatagaagatgttgactaataacactagctagcttgggataacaacacattctcttctctctcaccagatgactaacaacaacacatctattcactacaacaattacaacaatttgaggcggaaggatctgccagtaataacattttttttttaaaaaaaaatgaaagtcatcatttattaaacgaaaaaatctgttaccaagctcggtaacacagctcaaccggaacagtgtccaaattgaaaatgcgatcatggtgagatatagaggcccttgcaaaggaatgagctgctatatttgcttatcgttttacaaaataaacagaaacattacgcaaagtacttagtaaatccttgcaatcactaacaactttgccaaacaaggaaagcataaccacagagctacggatagcttg

SEQ ID NO: 109105 - DNA, 1497 bp, Cannabis sativa
ttcatttcaatttcaaatatggaattcaataattcaaaaggtttactggaagtgtgtgtatatatataaagagtaagaagaataataggtgaacaaaccttggtaagccttctcctgttctttcttcagctaattgttctaactgttctcttaaagtagcaacatactgtaaaacaatgagaggacaaaaaatgaagctaattcaaaacttaaacaaaagctagagaagttaagagttgaagaagtatatatacatgaataagctttgcttggttctgctgtttaggggcagtagcaagtaatcttcttagatttacttccgttttgctagttcccatttttcagaaacctaccaaaaaacaatcaaaaactcatttttaggccccaaaaagataccaaattatctgaattgacagtaaaaccaagttttggggcaaaacttttaacacataaataaaagactaattaagatttttgacatccgaacattgacataagccgaaccaagtcttattgagaatgttagatttcgggacttttatccaattttaccaatggaaatctgacgtggattaaagtttacggagtaagatatggcagatatcaagtttgaaatgaaacaattcacattactagaaatggacagaactctttaaatccaacgatctcaaaaattgataggaaattcgaactgcctacaaaatttaaggttgatggacaaaattcctaatcagcctaaataaaacaaagatattacataaacacaaaaacccataacaccaaaaaagtttcaaagctaaaattccataaatttcaaacgattgaaaattttgccgatcaaccaaagcttacccagttgagaatttccaggaatcaaggcaagatcacccaaatcttgatgatccaaaaacccagtacggtgaacgtgctttccggcgccggtttcactgaaagatgtgggctttttccgctgggttttggcgcttcgcggtggaagaagaaaaaaatcgaacgagcaaagaagaaagaaaagaaaactgctggtctgctaatccccaaattccatcttccagaagggttgaagcttctttcagagtttgcgaccttagagcaaagaagattgttcaataaggaggtgaggaatggggttcataatggaatttgctgagaatttggcactgaagttgatggaggatccaaaagaaagggatcggaaattcagggaacatgtatatgcggtgaaggaccggtgcggtaagaccaaggagatgtggagctaccctcttcgtccgtacgggttttggaccttcgaacgtcacaacgctcagctccgttgggatgctcagattagccaggttccgggtcgtagggacccctatgatgacgtccttcaacagagctacaaaatcgacaccaggtccaaatgagataaatgagtaagagaatattctgttaaatttaacgattatttgatctcccgttaaaaaataaacccaa

SEQ ID NO: 109106 - DNA, 1220 bp, Cannabis sativa
tttggggttttgggtggggaaattctttttttcttgtagttaagtaatgtactctttctcactccctagctttcttttctcactctctaacttctttgcttcttgctcttcatctgctactggcaccactctgtaaagtgctgctgctgctgctactactaactcctacaacagctgctaaattccagaaaaaacctgccatttcaatctcagatttataaacccaataacacccaaattcacaacaaaaaaacaggaacaagaaatctgattcttacttttcaggtttatgaattcagagatttcactctttgagatgtagggaagggactttttagattttagggtttttcgttgtaaagactcaaaagttatatgacaatttaacaacagagaaattggaatgaacaaaaggattttggtgatatagaataaaagcactcaaaacagaattctgaagaaggaaaaccaatatcatatgatgagtaatttgaccaaattttttgtgaatgatttttgggggagaaagaaaagaagtattgaaattggtttttgttgatctgttgtgtttatctgaaaaggaaggagtagaagaggagagtgaagatgcaaaagaaactctttaccttgtcctgcgagagcttttgatgcttctgcaaagggtggcagaggttggtcagagaggggattataaatctttggtcatctcatcagccccacaaaccacaatataacaaaccaaaaagaaaagaaaaagaaaagaaaaaaaccaagtcacaagttagaacctaaacctcataccaagtcatatttctttctaaccaaactatggctaccactagtgagctagtcttaactagtaaacttttcttccctttataattataacacccacagtggtagatttattaattaactttgttaaatccccataattataaatgtataacaattacttataattaaagccataaagatgatagagaggtgagtctcaatagccacctcttcctacacccactatttttgagttttgaaggctttgataatgatatctaacagctttttgagggtttttcatttcattttatttttaatatagctatggacctgtagctgctttggtttgttttctttcctttaattttattgtacagactgtttattttaactttggggatgaaaagaaaattttcatgtttttaattttttgttttttt

SEQ ID NO: 109107 - DNA, 560 bp, Cannabis sativa
  modified_base (35)..(48): a, c, t, g, unknown or other
  modified_base (257)..(280): a, c, t, g, unknown or other
  modified_base (415)..(426): a, c, t, g, unknown or other
atagggattgtgctgatgactcacgatgcgaaagnnnnnnnnnnnnnntgttggtcgctctgcgcggattgctcgatactttgctctgggcatgccagggagatatcctgctcggactatgcttcccgagcagatgttccaagtggattccacgtgtcaccattcatgcgatgccacgtcagagtgcaaaatttgggataacaataattaagttgaaaattaattttttttgaattaattttagatcaacttaaatnnnnnnnnnnnnnnnnnnnnnnnnttagaattaataattgagttgattttattcaagatacttaattatttctattttaaagaatttaattaaatagaaaattatatttaagttggaaattttttcaatttcacatcaacttaaattagaataattttnnnnnnnnnnnntattttattttaataatcattttgccacatagtttcgaattttatttatttatttatttcaaatgcagatatttcgaaattttccaattttgaaaattagattaaagttaaaaattaattttttaaataatttt

SEQ ID NO: 109108 - DNA, 671 bp, Cannabis sativa
gcaggaaagactaaaaatttcctaactcattaaaatcaaccccaatccacttgaaaccttccagacctgttctaagcatcctaaagatcattttccaagcaacaaaagacagctacaagcaccagaacaaaactttccattaatgagccaagcttgagttttaaaactcaaagcttgctcaaacactaaatcagccaccaccacaagcctaaaacatcatatattagcataatttatccatagaaaacaataacaaacactagcagcagcaacagcaaccaaaatcccaactcatgcaaaaattcactttcgtacaattcaagaaaactaagaagaggttgctagaaatataccttcgcttggataacacttagaactgctgaaaatcacttagaattgatgaagaaaaaacacaaacgctagctggtctaggggttcgaatgagagagagcttgaaagagagagagatgagctttgttttccaaattttgatttttcttagaaaatgaaataaaggaatggtttattaaatcatttcagctaaataaacttttttaaaaaaatagattaatacaacccacaaaagacaaaacacttcttgctaaaaagaccattttgccctttaacaccaaaaatcactaaaagtgactaaggggtaatttggaaaattc

SEQ ID NO: 109109 - DNA, 845 bp, Cannabis sativa
actgaagcacgatttcaactccaagaaaaacatcaaagctgtgtaataacaaggtcacaaagtagatctcaacaacaaaatgattaacctagacaaatccaaaaataaaaagataaaccagaaaaaaaaggaggaaaacatatatttatacctctattaattcgaaaatacataaaaacaacccaaaaataataattcgaattatattgtgcagataatttgataacaatacaaaaaaaggagaatcgaagcatacccaaaaataatttagaagaatttgaaaaaaaaaaaatacaaggtaccaatatttttagtatttttttttttcataattaggttgttatatagtgttattgtcaatcatatcaagcataattcatagggtaaatcagttgatctgaagaaattgatgcaatcaatttacaattgaacaactattgatgtatttaaggtcatttgttgtttgttgtcaggaaaagttgtttacacgttgtttttatggattaaaatagttgtttagaaatactgatactcataacaaatgtaaaaatttcaggatatatatgaaacttttgcaagtattggtacagagcaatgatcattaggatgacaacaagcactatattaattacaaataagtggagaattaatatcaagagattacacttatgttgacttagtgcagataatattgcaggaactagaatacaaccctaaaacaactaaaatacaattgaaggaaagttgccaaccactctaaatcaaagatgacaaaagtttgttgttttacataaagttattaacaaagaaaattgatttcccacgatatctattgtgtgtgaaca

SEQ ID NO: 109110 - DNA, 710 bp, Cannabis sativa
  modified_base (63)..(63): a, c, t, g, unknown or other
  modified_base (212)..(223): a, c, t, g, unknown or other
gagcactttaagggatttagtttcatgttgtacttcctaaggactttgaagcattcgtccagntcatctatgtgccccccagccttcctggatttgatgggaatgtcatccacatgtacttccatgtttctcccgatctggtttttaaacattttatttaccaatctttggtatgtggctctagcatttttttagaccaaacgacattactnnnnnnnnnnnnagacccatatctgttcggaaacttttatgttctaggtctggtggatgcattttgatttgattgtaccccgagtaggcatccatgaagtttaatatttcctgcccagctattgcatccatgagctgatctattcttggaagtggaaaacagtctttggggcacgatttgttgaggtctatgaaattaatacatactcgccatttcttgttcggcttgggtaccagtaaaggatttgcgacccaagcagggtagaaagcttcaattatgaaattagtgttgcatagcttctctacctcttcctttagggctagtgctcgctctttgtcaaatagccttagcttttattggactggtcgaaagttaggatcaatgttgaggaagtgcgaaattacagaaggatcaattctgaccatatcctcatgtgactaggcaaaaacatctaggtttgctctcaaaaattttgtcagtgctgattttacttcgagca

SEQ ID NO: 109111 - DNA, 666 bp, Cannabis sativa
  modified_base (283)..(288): a, c, t, g, unknown or other
  modified_base (547)..(560): a, c, t, g, unknown or other
aaggaattctttctttggcctttatcttttctagaatagttgaaacgtttccttagataaataaaatctatggctagaagtcgagaaacttctatagatgtagcaattaagaaaaatgctccagcatcttactaaaggaagttgctagcactagagtaagtaaactaccaagtgtaccacaagccacaggtttagataaactcaaacctataacactagaatcaaagttttgttaagtccattgaatagacttaattctcaaaatttcctttcttgtccttgnnnnnnaaaacttttggttattccatatgaatggttttaaccatagttctcttggctttgcctctcagttccttattctgacaatccatttcttgtttaaacaaacaatggattctaatcacaagtgtcttccaagtcataacagggtgagttccttaaaaccttcccactatgacaaggtaccgtgactttctgtctaagaacataagtggtattatcctcattaattgtatcaagacaatagaggcagtgggaccatcttatnnnnnnnnnnnnnntagaacactttggaataaaaaaaacatcccctctactttgctactttatttcagacttagtcatattcttagaaaagtagtctttgttgaaacaaacactttctta

SEQ ID NO: 109112 - DNA, 863 bp, Cannabis sativa
attcatataatcaattctagtgattatctctccatgtgttggttcgtaattagttttggtaaaattatattttacccttctaattacttcattatccttcagtaccactgatttactagtggaagtataatttagatcacatctaaatttgtgcataatattccaattctagaattaacacttaaagggaatcgacattcaatctattaagaaagtcacgattccataattgtagatcatgttcccaaccatccacattattagagtcccaaaataaaagttgtaagaatcatcttctctaagaaactttaacgagtgagtcaaagaaactaataacatgaacatgagtttgtaattactcaagatttaggccattctactattgatctcgttatgatattaaatatgtctttatgtaaatgacatgttagataaagacagcttcattcatatcgatcattataatatataatctctattatatacaacaccttcactttgatatcatactacattcgtaatccgaaccgagattacagtaaatgtcaatttcgaactaagcgggtattttcacaccctttagcttccctttttataaatgtggttgaaaaaatagcctctaaaggccaacattgtagtagtgaacgggcatcaatgaaccgtactagcaaccattgattaaaaattccataattttaatatgttggggattgttttatccttagctaagtagtcttagttctctgtatagctacaagccacaaccatggaatattccaatatttaatatataaattattcaatgataaatattaataatttaatatttatacatatataaaaatgttcaactctttattaat

SEQ ID NO: 109113 - DNA, 631 bp, Cannabis sativa
gttttaaaaaattctacactacactcacctaaaatggatatattgatgtactcctatctgttttagtatattcgaaataattttttagttaaatcttttcttttggccgtgtacgttattgctatttaagacatcctgcaaaatttctagaaatttgaaaaaatttaacacgccgaaataagattcaaaaagtcatgtgatccacgcgtgactattttattttatacgtgtgtgaaatagattgtttgaacactactttctatattttaaattattccaaatttctcaaaattttgtaggatatcttaattaactataacataaacgaatatgaaaaaaaattagactaaaaaaattttctagatcccgaaataggtaagggtgcatcaatgcagtctttttaaggaggtgcattgtagaattactcaaaagtttttagtccattttttttttcataatcgcatacgatgtacttattaagaccgcatataaatttttcagaaaattttaaataatttacagaaaataaagttcaactagttgtttaccacacgtataaaaaaaacaatcgtgtatgtaattaaatatttgaaccttatttttacagtatactatttgaaattttctaaaa

SEQ ID NO: 109114 - DNA, 686 bp, Cannabis sativa
  modified_base (228)..(234): a, c, t, g, unknown or other
aaagcatacctaattctaccgaaatttcagcaacataacagctataattgaacgttttcaaaaaatttaaagctattaataacaaaaaaaaatacgaataaaataatataagaaaatcacaacaatatttagcaatacaaaattttaccatccatccgaccgtagtacatgtatttgcagaacctacttcactaaagatgaatatttaagatattcaaactcatctannnnnnntattattccacccatcgatctgactgcaatacaatatatcgctgaacctactaaattactagttagtaactaactatagtatactaaatatcatttgtaactaactagtaattaattttactctaaattactaactatataataactaacactcctcacgcatccataatttatccataacaaaaattaacaaaaaaatcttgacaacaaagtttaagagaaacttatatcaaataattttatcctaattctactaaaatttcggcaacataacaactacaattgaacattctcaaaaaattttaagttattaataacaacaaaaaataatctaaaacaaggaaaaataagtaatgatgagttagatgatttctaatcatctttgtgtttcccattaatatttgaatttgatttttatgagtcaagtgtgctctaggataatagaatttagg

SEQ ID NO: 109115 - DNA, 621 bp, Cannabis sativa
ttccaagaaggactgcttgaagtctgtcctattccccatgatgctttcccattgatcttttgaagaaaagtctaagcttgaatttttatgcaacttaagccttccatcatagaagccaaagcttgcctcataaaaattcaatgtgactctcgcatgcacgttgttttttgtgcaagaaagatcattcagggtatgatacatcttcaatcctccatcctggaatggaaggactgcttgaagtctgtcctattccccgtgatgctttcccattgatcttttcaagcgatgtctaagcttgaattttaatgcaactttagccttctgtctcgaaagccgaagcttgcctgataaaaatttaatgtgactcttgcatgcatgttgttttttgggcatgaaagatcattgggggtacgatacgtcttcaaccctccttcccgaaatggaaggactacttaaagtctgtcttattccccttgatgctttcctattgatcttttcaagcaaagtctaagattgaatttttatgcagcttctgccttccgtcccgaaagccaaagcttgcctcataaaaattcaacgtgactctcacatgcacgttgttttttcgtgaaagaaagatca

SEQ ID NO: 109116 - DNA, 616 bp, Cannabis sativa
  modified_base (67)..(71): a, c, t, g, unknown or other
tttcagaatacaaaaactccaagtaacccattagttctttaaccaattcacaatgattaatcaaacnnnnnacctcattatcgatagaatttcgactttgaaggaacaagcgaggatcgttagtcaagtgatcatctttgtcaatactcctcaaaaatagtcgaatcgtcttactccattccaaataattcaaactaatcaacttatggtccgtaattttagacatcacgggaaccacatcaaaaacaatgactgattttgaatctgattttatctctgccataatctaaaaagaaaaaacaattgacagagaaaaggaacaaaaagaacaccaaagaatgaacacccaaacacgaagaaggcaaaaaaatactgaattacaaccttaaatagatgcgagtgggcttagaagaacagaacaaagaatcggcaaaagaatgccatcgaagacgccgtcacatgcgcctccacgctacggtgcgtgggaaaatgcacaaaaactaggtggcatgtgagccccatgcgcgtggaatccagcgaccggactacggggtttggtaaatcagcggctgggcaacactcctgaatgggcagtgagaatcaattcgcactccaa

SEQ ID NO: 109117 - DNA, 816 bp, Cannabis sativa
atatatattaattattacatttttatggccacgttgtttcttttttacaattttataaatttaatttttttaaaatacaattttaaagttttaaacttataaaaataattttttatcagcaaaaataagaaatgaaagaaaacaactaaaaattattgttattggcggcagattgtgggcattaaagagaaattttttaaaaaaaaattatcctccaatctctcataacagagaagtatagtatatctttagggtacaaggcactatgttcagaccatcaaaaagtgacttggcatagagaagtatggagtcgatgtaatgtgccaaaacacatctttatttaatggttggggattcaaaaccgacttcaaataagagacatgttagttgcacattatacctgccaaaaaacacaatgtcttctttatggggcaactgcagaatcaactggacaattattctttgaatgtatgtatagtgtgaaatgccttgaaaaattgaaagaatgcctgggatggagagttaataataagcatataatataactgcttcgctggatatctcgagctaaaatctcaaaattaaggaagcaagtcataacaactatggtggctggtctggtataccagatctggaagaacgaaatgatagctactggaatgtcacggcggagaattgtatacagattattaaatatagcattaaatatagagttacaagtttgaattgtaaaatgataaatagtgaagataaagattggtttgatagccattaatttttgtatttagaagctgtcttgaccaagtttaacagatt

SEQ ID NO: 109118 - DNA, 1482 bp, Cannabis sativa
ggaccaagaaaggagaaccaatgaataacatttgttacaccagggtccattgtcgagaacgccttctcctatccgccaccttctcgaagccaaatctaaacacattaggagcatcctgtctagaaaaaggggtgtccaccttcacatatgttttccaaaggttagcacagaagacttccacttctttctcccccaaagctctaaaggtcagcacttttccaatgagacaaaattttgacagcacttgggaagtagaagcactagggacaagagtaatggtggcctcattaagagaaatgcatctgccccaagaggaagcagactttgaaaactacataaatatgaaaaatggagataataaagaattagaaaaaaaaaacttcatataagatgccacctagaatgctttgtacattcctttatattagtatatagatatagattgattgattaatgattattattagaataaaaataaataaaattgggtggtatggcactatgtttgactctttttagttaaaaaaaaggacataaatatattgaattactcataaattatcataaaagattataaacaggctatatttattacaaacatgtcataatctcacaaaatttaggcataactctttataaaaacaagtgaaacgggttgaatcatcccagcctgtttataaataatttaatttttagttttcaatataattaataattgagtgaggtttggatttgatatttataacacttaagcctcaacacaatacaaataccacctctaaccaaaattgttacctcacttgcagcaagtagctagcttcaacttgcaattagctaaatcaattataaactccacatttaaagttcaagcaaaccatcagaattctgttaataaaatatttaaaaatgctacgaagaatgctttgattaatactagccgtcaaataaataaataattattgatcaaaagaaaagcagtagtaatcttcaatcttcatttgacagatggtatcatagatttccctttgacatattgcttaaaagttcaaaatgattttgaaaaaatttccaataagacgattgttagttttatcaactaaagtgacatattatcaaaataataatcatagttcttctctcattgcaaataacgagtggatccatcgcacttttcatgcagcaacaaaaatgttatgtcacctttatatgtaggattcagatgcacttcaaatttaaaaattatgttagtaaatgttatttttttaaaaaaaaaaaattaacactaaatataataaattagttaatatattaataattaaattaagatatatattttaatattgcataataatatattataataaacacaaataaatatattaaattactaaatatatacaatagtatttaatatatctttatctttatatattaaaagtggctatctaacggtatttcttggtttaacgatttttttaacgt

SEQ ID NO: 109119 - DNA, 777 bp, Cannabis sativa
agcttggtcccctcctccgctggagggagtggatggattgattaagcaagctgaattgtgatgtcaaggtgggattcgatagcatgtgtgttgctgttgttgctagggattatgctggcagacttatcagagttcagacagctcgggaagatttctcggaggctctttgtggagaagcggctgcctgctgcttagctgtttctgtggctttagaattaggttgtaagtttgtgattgtggagaatgactcgagggtggttatcaatgctctaaacgggatggattctcgttggagtcttgaaaactatgtctcattttgtactaagtcttctccttcctttattagttgtaatttttcctatgtctctagaacttgtaactttgccgctcataatgtggctagatgggcttttgctcatcaggtgtttgggaatattccggtagcctcgctaccagacaatttaatttgtaatgaccatgaggtctaaccctatttgattctatgatataaacgctttttatcaaaaaaaaagagtaaaagtctcaattataatttcatcactttggatgcaaattatgtagaggccatataaagacaatggcttatggcttcacgttgcgaaatgtattagagacaatggcttagcttatttattattaaactaggtgaatgtacgtgccgagccacgtattgctagttttatttaagattttggtctttttaagattttgaatgtattttatttttaaagattacaaattttttatttgaaaaaa

SEQ ID NO: 109120 - DNA, 524 bp, Cannabis sativa
gaattggttcaacttaacctatcaaggaatagtttgaatgacactatccctatgaagattgggaacttaactaacttaatctctctcgatttatctcacaacaagctttctggtgaaattccaacaagcttggcaagcatatctactctgtctttgttggatttgtcgaataacaaattgtcaggaagaatccctactggtactcaactacaaacttttaatgcctcgatgtacatgcataatgatggattgtgtggacctccattgaccaattcatgtcttggagatgagtcaccgaatcgtcctcaagatcattcagatggtgctgaagatagtgaagaatggattgatatgtcatggcttcgtatgggaatttgggttggatttttaattggatttgttggagtgtgtggtaatttattactcaacacttcttggagacttaactatttcaattacatgggcaccattggtgattggctttatgtgaggatttgtgtgcagacaaatttattgaagagaag

SEQ ID NO: 109121 - DNA, 4330 bp, Cannabis sativa
aatgctatatgatattttttataatttactatgctatttttaatattttattataaaagtttaattagcatgtttatttgtattattattttatagttttaataaattgttagatgaatatttaatcatatattaaattttgcattaaaatttataataataaattggagcataatagtaaaaattgatacaaaaatatcacacaatcattatttgtactaaatataaatcaacttttacaacggtctaaaaaagtaacatattgtaaatttattgaaaaaatatttgaactatgagctcatgcttcgcacgttagacccaactagtatttattaaagattccctgaaaattgaattaagtatttatattgtaaattattttatttatttatttatttttcagtgcgttgttgcatatatttacgtcgaatcttaaaagtaaaatacggtaggtaacagtgtaatacataaaaagggtgtgtgtgtttgttaaaataaataaaattaaagagaatagaaaatagatttgcgtggtttaggattaggaatctggagactggagctgatatggtacgatagtaaaaaccctaatcttcttttgattttgaaattcaatcaggagagatataatcgatcgatcaatggtttcgtcgacggaatttctccacgattcacactcttcattccctaagaagagactaaagctttgcgatgatacatcatcctcacaagaatcgtcttccattgaattcgagatgagctgccagtctaatggaaatagcagtggtttgcaagacccgtctggtggcggcggaggtggcggtgctcttcctctggccaccggatggatgtatatcaacgagtgtggccaaatgtgcggtccatacatcgagcggcagctatacgagggtctctccactggttttttaccggaagatcttcctgtatatcctattctcaatggtgccttactcaattctgttcctctcacatatttcaaacacttccctgaccatgtttccactggctttgcatttctccgtttgggcacacccacgcaacccactctttctcctgccttcccctccacccatttgccgcaatttgatcccaactcatatcctctgcaggtattgatattcgcatttcaacaatcagtattgattattttgtctttgctctctactgtctaataattttgttgtgtattatcctcaaattagttaagcaactggttctatctggaccatgaagggatgaaaatgggtccccattctcttcaagagttgtgttcttggcatcaatgtgggtatctccgggattcaaccatggtaagttttcatgtcaaaatctcacgtttagacttctaggccatgcatgcatgttcttttgtcttctgaatatagtttcgtatgtttgcattgcaggtataccatgctgacaaaacgccctttagattgatctctgttataaacgcttgtaaaacttataaacctgaaattttcacacgacctgttacctccctaaccaatcactcaagctcttctccaagcttcctagatgagatttgtgaccaagtttcaaatcaattgcaccttggaattacaaaagctgctcgtagagttgtgttggatgaaattattagttgtgttatagctgattttgtttctacgaagaaagcgtctaacgaggctgccaccacttgttccactcaccaaagaaaggtatgaggtgtctaagtaccaacacattactgatgtttttcttcctttcttaatgttcgcatcttatgatttatgcgttgttttggcagccagaaatttttgaagtcaaggatattaacagtcgctcttctcgtgacacgaccatatctaaccattttgctgaccagaacactaataaaggctccatagaaccttttataatcactaaatctgctggaagcattgaaaatttttgggggtcatatgcagttgtccgccgatttcttcttgactattgcatgcaagttacttggaatgctgtcttttatgatattatttcagagtattcatctgcttggagaaagacaaaactttggtcaggttatccatttgtcagaaagcctgctcagttgagcaattgtgttacaatgtttaagaaaccacctgatgtagatgtaagttattagcatagttcaggaattgttcttgtgctgtttatgggtcgtaatatttctttggttgttgcagtgttcagaaaggaacgaccttgcttgtgatgtggactgccctcctggctttgggccgttcagaaaggaatcaaatgatcatgcagatggttcttatatgtcttctccttctccagcacttttgagatcaaagtcatcaacacatatgaactcttcatgcacaacttgtatatacgaggatgttgattgcattgtaaaaagcgtagaacatgaacttcattcatctgcaatggtatcattgactgattttgtcaattttttcgttgagggtgaagtgaggaaattaattgggtcttatgaacatgacagattaaataaggtaaccaaaagaggttttaaagctatgtactggtcgtactctcacgtttactgtaattttaatgagttactcctgttcccgcaggttaatcttacccctaagttggaggagtgtgacaaattgaagatttgttcgaatgaaacttctgcacagacaacttcatctaacgtttgcccatctttgccaatgatgactaaaccttctcatgggattgtatttgaaaaccatatgcctgagttattctcggcagtgtttaaggaactctgtgtacatggtgatgatctggtggctgaccaagaaagcagtgagccaccacctcctggttttgaagatgattctagaacttttgcaccttcaaatgtaaacaaatttagaccttcgaggtccaatcaacgtattcctaagattggggagtatgttaccacagcaatgtgccgacaaaggttgcacgaggatgttcttaaagaattgaaattgtcatttgtcaaatataccctgcatcagtttatgtcatcatggcatacatctaaaaagctgcgcaagcttgagtgtaatgaggtagtgagctcttttgcctttatctccatcttcctcctcctctttccccctcacattaagtgtttatatgattgtgatttcagtttttaattatactcatctgtaggaaggagcacaccatgcggataacaagcttccaggaagttcagcagcaactccaacaatgggtaaatatacatctatttgtaaaaagtcgtgccagaataagttgggttcttctccgttggttactccaatcaacaatgggttacagaaaattcaaagaaagaataagcttccagaaaattcaaggaaagaacatgcttccaaagacgttgctgcagttaaaaaaattgaaaggcctgctataatttctaaaaagactggacagaacaaacatcattctgagccatctgtcaagggtacatctttgcagaccattgtgaaattaaaaggcagtttgtccaacagtcaaccagcagccaagaatccaagtagtgaaggaggacctaaggcttctcataaaatacagagtatgtcactgtgtgcttgtatatttacatatacttattttgtgttaataaatgttatgatagtaacagtgttgttttctatataattcaggaaacaagtttttcaaaggttctattaaacctgccaaaacacaggtttcagcttctttagagaagcatgatggtgttgagaaagtgggaagtggtaatgaccgtgtgctcatatatatgcatacacttattttgtgttaataaatgttatgatagtaacagtgttgttttctatataattcaggaaacaagtttttcaaaggttctataaaacctgccaaaacacaggtttcagcttctttagagaatcatgatggtgttgagaaagtgggaagtggtaatgaccgtgtgctcgtatatatacatatacttattttgtgttaataaatgttatgatagtaacagtgttgttttctatataattcaggaaacaagttttccaaaggttctattaaacctgccaaaacacaggtttcagcttctttagagaatcattatggtgttgagaaagtgggaagtggtaatgaccgtgtgcttgtatctatacatatacttattttgtgttaatgtaacagtgttgttttctatataattcaggaaacaagtttttcaaaggttctattaaacctgccaaaacacaggttttagcttctttgaagaatcatgatggtgttgagaaag

SEQ ID NO: 109122 - DNA, 529 bp, Cannabis sativa
aggtcatcttcttgcacaacttttgtctttatttccaactgctgagatgtattacttactgtttttgggctcagactgagcaactcagaagaaatggggaaggatttgtctgggctgttagtaatatctttggaggaacaccaaagctcatcagcattacccagacttgtttgaccaaatacagcatcatcgttgctgcaaaatcatcacttgtaagaatatttagtcagatggctaccattatgcataaaatatatgagaaaaagcaagaaaaaaacagataaaaaggagggtaaataaatgctatgaatggaagtgtagcagaaaatttatcaacacatacacttgggagggtaaataaatgctatgaatggaagtgtagcagaaaacagatgtctttttttaagttttttttgttttggttatgatttgtgttggtattaagtataaacttttagtaagtactagaaatggtttttaatttgtgttttatttgttgatttaggtagtttcgatttttagaattttt

SEQ ID NO: 109123 - DNA, 566 bp, Cannabis sativa
  modified_base (414)..(431): a, c, t, g, unknown or other
  modified_base (525)..(529): a, c, t, g, unknown or other
taaagtttttctcctctgtgcaggtcggtctgaagctggcctacactttactcccgggataagtttgctgcttccaagaatgcgactctgttcgacacattgaaggcggaggtggacttggccaagaaggaagctaaagaagccagggcgaaagccggagctgttcggttggagttgggcgaagccaacaagaagctgtttgctgctgagaagaaaatcaccgtgctgactaaaggtctcgacgttgctgaccgttttgaggagataatacatttaattaaattgaaaattaaatatttaagttgatttcattcttgatacttaaatattattatttttagaatatttaattaaaaagaaaattattttaagtttgaaattttaatttttgaacaacttaaatttgaataattnnnnnnnnnnnnnnnnnntttattttattaatcatttttttgtatagaattcgcaattggattttttatttaaatgcagaaaattttgaattttttgaaaaatagattaaannnnnaaattaatttttttttttaataaattttggaccaact

SEQ ID NO: 109124 - DNA, 526 bp, Cannabis sativa
ttttttttgaaagcatttacttttgtagtgatgatgaatgattgtgttgtattgacaaaaactttggtgtggagctcagctttacgatacccattgttccttaaaagaaaatgtaaaatgtacttgatagagaatagaggcataagtaataaaattttatgtttgcaagagttgtcgtgttctttattaacactttttttaatcagttttctgtttttaaaattgaaaagtgaaaatatttttcataaacatgttctataaaactgtttttactttttaatttttaattaaaaatcaaaatttcaaaaacaaaaataaaaatcactttcaatatttttttaaacagtttctttttcttaatctatatcttggacttcgattagacccgaacccaaatcttctcatggccctggcgctaaatccgacctttgactcgaatccgaccctggacctagacccgacgtaaataaaataaaaaaataaaaatgaaaatgaacttttgtagaacaaacttttattttctgtt

SEQ ID NO: 109125 - DNA, 649 bp, Cannabis sativa
attttgatcttctattttgattttttgttgtttatatatatataaaccatctgaatctcattttatattaatctcaataagagataaaaccatactcattttttctctccaatattttgtactattggaagtagtattacaaattctatttagtttttgaggaagattttcaatctttaaaaatgaaaaagtctaataaaatttaagcaatttacggttataattaatatatgatgtcacatcactttctttaagattttccttcatagatatatagagatagattgtaataaaaacttgtatacattatttaaatttttatcattatatattatattatataattatataaagaaaatgacaaataaaagtgacatggcgaactttatgaaattttttccttatttcttgacatctcaatttttcttactatttagttattcttttaataaatttttactaagtgttcgtttcgatttaattccttattattagcctacataatttacttaatttttaatgggtttatatgaaaaagaagtttaacatgatttcattattattagcctacattttaatataaattttcaacgttaaatgactaaccctttctcattcctactgtttcatttattaagaatgaaatatt

SEQ ID NO: 109126 - DNA, 884 bp, Cannabis sativa
  modified_base (350)..(354): a, c, t, g, unknown or other
  modified_base (824)..(845): a, c, t, g, unknown or other
gaccaggaagactaccacttgattttccttgagttggtaaacacaaggttcatcaaaattctgaagaaaactgtaggtcttggtgatctcatcaaacctttggttcatggagcgagaagcttgcttaattccataaatggacctattgagtttgcaaactttcttttcctaccctcgaagaacatagccttctggtagcttcatatagatggtttcttcaagaattccattaaggaaggttgtcttaacatccatttgccaaatttcataatcaaaagtggctgctatggagagaagaatttagatggatttgagcatggcaaccgggctaaaagtttcctcatagtccnnnnnttctctttgggtataacccttggtgaccagtctagctttaaaagttccgacttcgcctccagcgcctctatccttcttgtagacccacttacatccaattggatgatagtcatttggtgtgtctacatattcctagactttattctttttcatggaatcgatttctgaatccatgccggctaactaattttctgttcaggacttgccattgcatgtttataggttaatggatcgtcatcaataccgtctccaacaaccatattgatttcaacatccaagccaaaacgagatggtttagtagaaaccctcccactacgacgaggagcgatgaccttctgaacaagaacttttgtggtagttccctcagttgtaacatcttgtgttgtttcaactgagggagtgggattatcctctacttgaggtgaagaggatggaacatcagaaggtgctatatgttgggttttatgccnnnnnnnnnnnnnnnnnnnnnntaatcagatttactaattaatatagatcataaataacat

SEQ ID NO: 109127 - DNA, 690 bp, Cannabis sativa
tcttgaatgatgcagatcaagccttaaacacctacaatcaagcttttcttgaatgggaaattcaagatcaacttcttgtttcctggttactctcttcgatgacagagagtcttctcacacgcatggtcggatgcaacacaacaagactaatctggagtgcgcttgagaaacacttcactttacaagtctcctcaaagatcctggagttcagaacaaagttgcagaaattaagaaaaggatcaatgtctctaaatgattacttattgaaggtcaaacaacatgtagatcttcttgcttcggttggagaggttctgagttcgagagatcacattgctgcaattttcaaaggactaccacctgaatatgataccttcatcatatcaaccaataccagaatcgaagaatactcggttgctgaaattgaggctctccttcttaccttcgagtctcgaatcgaaaagacagatctggatcaagaaactgatctgagtattaatgttgctactactgattttgatcagttatctgaagctaatattgcctatcaaaattatccaaatcgtggcagcagatttcccaatcaaggcaaattcccaccctcatcctattctggttctactaggataaatggacgtggcttcaacaatcgtgttagcaacaacaatggaggtaactgttggaaattatttt

SEQ ID NO: 109128 - DNA, 665 bp, Cannabis sativa
tattcacataataatatatattactacattttaatctacacttattatattataaaataatataacaatatatactatacataataacatcttttttaaaaaaaaataatgaaaagacattaataatttttttaattgtcatgaaaataaaaaaatcactaattaattaggacgaaatttatcaaaataaaaagtcgctaattttgtcaatgaaataatattacattattattaaatataagtaatcaaaatattaaatagtagaaaaaattaataaaagctaaaagagaaaaatgagtgagaaaaaaaataaaagttcatctaaaatatcacatcaattccttatatttcttttttatatatagatataaaaattcattcatcaacattttgatattgtaataattatactaatggatttgttcatcattttttttatattatatatatgataaatgtaaaattcttacaaaatgataaacaaacactaaattatgttaaatagactttttaggattcttttttatataaacaaacagataaaaaaatgtgaattcaaaaattaaaataagggcattttttttataacaggtattttagacccaaagtttacatttttagcttggtaaaggaaattaaacaaaaaaaaaatctaaaagtttttt

SEQ ID NO: 109129 - DNA, 672 bp, Cannabis sativa
ctccaaaaccttgtgaagacgatcagactgtccaaagaatagttcatacacgttatcggaatatataaaagataatcagaactaactcggctatcacaagcatctaatgtaaaaatatactgactcagagtatgctcaatctcaatgctgcaatgtgctttaaaagaatatagtgcgagtatacagaaaaattaagagtttcggctttttgctcaaatttccaattgacaatctatcaaaattaggttcagaattcgaaatatgtaaatttcctatcgaattggaataatgagatgacaaactaaccccaaaagtaagggaagaagtacattgtcagggtagctatgaatgaatgaggattatcattttgtatcactaagataattaccttttccttttgaagactacgaagatgagtttgaaattcggttagctttcttagagataaatcttgttcatccatagataatgaaccgattgctgtattgtcgatatgactgtatccagaaatctctccactgatcttctcaatttgtgtctttatatctgaaaattgcttcatcctttcctcctttttcatttttagatcttccaccagtggcgccacagatgaaagtttttcttttaatgatttcgacctcttctctgcctgaatctgtaaatattatatga

SEQ ID NO: 109130 - DNA, 530 bp, Cannabis sativa
ttattcttcatttaatttaattgcattccgtattctatggctccgagatttcttccatatttattgatttattccctattaatcaaaaatattaattagagcacaacagtagtatttcttaactgtgtcaatattgttaaatttaaaagtaataatggagctacacttttttttttcttaaaatcattttgtgcattattttgctgatatagaaatgggaatcagagaagaagtcattgaagttgatagcttcaactcaccgatcgggaattatgtcgcaacttatggggcgttagctttagcactaatcgcactgtccataagtgcactagttagtattccgggagggtacctcgacaataaatccagcttttacggcaaggcttctttcaaattatattacattgcatcttttatttgttttggaacatcaatgacatcgttgctcacattattactactaaaattcaacactaatgaagcagttgagaaaaccctagaaattttttcattttgttgcattcatgtat

SEQ ID NO: 109131 - DNA, 1016 bp, Cannabis sativa
gggttcatgctaaattactgttctcggaacttttagagtctatagtcaactagatatcatttatgaccaacatctaaatgggttgagcttggactagttttcttatttagtgtgtggtttatccttttattttagtacttgtttacgctaaattgtcttcatttattgaaaacaatcttcaaaattgttggcagataagtgaatcattgacttcaggcccttctcatgcaattgacataacaagagaggtaggaattcaggagttttattgtttgagatttgagcaaaacagaaatcttggatggatcactttcaagaaattggtttctcatatgagtttcatatttttgtgtgtaggctattagagaaggtgcagatgctgttatcgcagttggaggagatggaactcttcatgaggtactgcatgatttgcaccaaactctttcaagattgcatcaagatcttttgcatcagtcatccttattctttatgattatcttttcttttcttttttttttttttttttggtataatgaaggttgttaatggattcttctgggctggaaaagctgtcactaatcatgacagagaagccacagattcaactgcacttggtgtaagtgctttaccaataggagatttttacatcatatttggtttatgctccttcacaactgcagcataagtcaccagtgagactaactgataatttgactgatctagatattttttactttctgcagctgattcccttaggaacaggttctgattttgccagaacacttagctggtgagtttatgcatttcaagctgctttcattgaatatcactagtattcatttactttggcaatgtttaatcattacctgtttagattattaactgattgcatttttaaaggccaaacaatcctgctgaagccattgaacgaatatatagaggttttatttcttctcttacttttctgttttcccttgtgattcatttttcactcagaaatagtcctctctgtatat

SEQ ID NO: 109132 - DNA, 805 bp, Cannabis sativa
  modified_base (778)..(779): a, c, t, g, unknown or other
taaaataatttccaacacttacaaagtctcttaatttacaaataaaccctaaattatatttttttctcaaataagcctttacatagtgaaaaattcacaaacaagacataatcttatttagaattttaattgattaattaaaactaattaattgagactacaaaataatattatcccagttagtgtggggaccatggccctatgtaatcaagcttccaataagtagatctgaaatttaccaagtaaatttcttaacttattaattactcctgactccactgtagatttggaatgacactcttaattacatagaacactctattatcaaaaatggatgcgatttgaattacccattatttcaatccaaatctataaatgatctacatcgagtaggaataaatttaccgttctacccttcaatatattttatccttaaaatacttagctagttgtaaatgatatttcagtaaactaatataatttctgaaatgaggcatcaatcatttatcacattaagccaagctcaaaggaaatcattgtttcacttctaatagttatataagttatagattccatgtctatgattagtcctcccactcaattgtactaccatgttcccgaaatgtaagcattgggtcgatccgattagtcatctttaacaaacaagtcaaagaacacaaataatgcatttaagccagaatctagccatctcaggattaagatttattgacctaagatcaactaagttatattaacttagaaagatataacggtaagnntatgatatcttatctaatgtcaatat

SEQ ID NO: 109133 - DNA, 1986 bp, Cannabis sativa
taataagtaaatctgattatgtgaaatgagttttatttagggcataaaacccaacaccaaatcaataataaaatcaatttttctctacggaggtaaacccagaagttcatcaggaaaaacatctagaaattcccgaaccaccctgatgtcttcgagcagaactgtctcaggccatgtggtatccaataccatggccagaaaccctagacatccatcttgtaactattcccttgctgttagtactgaaatcactagaatccaagatccctgaaccgatcccacaaaaacaaacagttcctcaacttcttgttggaaaattaccattttccgtttacaatcaatactcactgagtacttggataagaaatcaattccaagtataatatcaaaatccgctaaacccatttctattatgtcagcactcaactctctatcctcaattctgattggcatagaccaaatacaccttttggagatgactaattctccgccaggcaatagggttccaaaccctttatcataactatcatgcggtctatcaaccttactaaaagttctggctgccacataagagttgctgactgagagctgacctgttatgactgagggactagcctccgcatctacctgaggtagagcaaacaccctcgctggagcgggttttccagcagtcttttgttcttctttcttaagctggggacagtctcttttatagtgccctggcataccacactggaagcacccttgccctctacactcacccagatgatgctttttacaactggggcattccaggtaagtgtatcaggtttcaaaactaccctgacggttgcctcgtccctagttccctcggaacctcttactctgacctaagccaccgggtgcagtcggtgcctttcgtttctgatatgtggctgagccactaccacccctactataactagaggtaggaggagtaggagccccaccaacgacatgagtccctcgagactcttgactacactccactgcgcccttagctcgcagtgcctttcccaccatatcagcataggtggtgttgtcatcagtggtaatcataagattatgtcttatcttcgaattcaatccatccaactaattctctttcttactgaaattgattggcacttttctcgaggacaatcttgccaatagatcaaactgagttgtgttttcagtaacactcatattttctttttgggtcagctgagtaaattccttccttttcgcacttttaactgcttcattataatacttcgcattgaacaactcctgaaacttttcccagatcatagcagtaacatcaaaagttaggaacaccatgttccaccaaactagagcatcttcttgaaactgaaatgtggcataggccactctgtcattgccggtgacaccgatgaaattcaaaattcttgtaataactgttagccattgcttaatttcattacatcgtgacctcccagaaacactggaggttcttgcttgcagaacctttcgtacagtggttcaattcggctcagtgctacaaccggtcctgcttgcacagcaggggcaagagctacctacatttctagagcagggattgcaggagcacctttctgtctcaagcgtttgatttcttcatcttgctcattaattctagcttgaatttttgcaaaacctattttcccattcctagacagcttgggaagcctacgatgggttaacatcaccacgaccacgtcccctacctctagggcctcagcctccgccacggacatttgggggaatctaaactccctaaccgccactggatccgattgagttaccctgactcctggtgtttcgcttggcatccatactactaaaacagcctgcgtaaccaagagctagtctggtcagattgcgatcaagaataacttactaattaacgcttattttggaaatttaaaacatgcacctatttagctatcaggctactaacatgct

SEQ ID NO: 109134 - DNA, 512 bp, Cannabis sativa
ccctaaaccctaagccctaaatccataaacactaaacctaaatccctaaaccctaacctggacacgcgcctagacccatacccatatcgagatcagaacctagaagccagaccaagacccgaattgagacccgaaccgagacccaaactaaggacctgaacccggacccaaacccagaccagaacctggtcttggacctagacattgactaggactcagatcgggaccccgacccgtacccgaacagggacttggacttcgaccaacacccagacccaaactcaaacttgaactcgtactaggacctagactcgcaccaaaactcgagatccaaacccgaatatgaatttggacctagacctggaccaaggatccgaacctagatgggggacctgggccccagacctaaacctggacccagacatgtactaaggatccaaagccagatgagggacttggacccaaaactgagccccgaaactgggacagagacctaaaactcgaccacagtc

SEQ ID NO: 109135 - DNA, 765 bp, Cannabis sativa
  modified_base (360)..(360): a, c, t, g, unknown or other
gcgtagaggacaaagagggcagacaaatatttaatgcccttaggagtgaactgggtcgggcaaaggccgaagaagtcctccacattctttaagtattgatgcaaaggcatcaacgccctttgctgggcatgggcacctgaccaggcacacatccccctttcagggtttgtggcccgattgttgtgggcgggaatgtagtaatccaattcgcccaggtatccgccttggtcaagagtccgaaggtgctcctcagtaaccctggacggagggcttacccacttgatgcccaaggcaccttgccttctattaggagccgcagcagtaagttcctcacggacgtagtccacgccctcaaccagnacatctctgtcagcatcgactggcacccaagcctcattgtactccccgtagtttgggggttcaacctctgcctcctcctttgtctcggaggaactgctaggatgaacatcgtcctgctcctcattctgctggacttcagcatccccttcatgatccacctcaacctggacggctggatcctattcgacgctaggaaaagtggtgtgccgagccaattgaggatcagatgcgtcagccagatgcgttgttttctttgtatgagccatcattctatggctgggtataagattttgataatgtccctcactagaagaaggtgggctagaacgaagacgaggatgatcctcgtgcaaaagttaaagtaggtcctggtcgatatgatgttcgctctcccaaaactcacct

SEQ ID NO: 109136 - DNA, 719 bp, Cannabis sativa
  modified_base (54)..(61): a, c, t, g, unknown or other
acaaaaattacaattttttgtgactaaatgtatttttagtcacaatatttattnnnnnnnnaactaaattagtgataacttgtaactaaatactatgttttagtcacaagtaacattttttcgtgtctaaaggtcacatttagttacaaaaaaattatgttgtgactaaaaagttcactaaaagtaacagttttttgtaatgttgtttttctcttcacaaaatcttagtttgtttaaattatttaagatatgtatttataaataaaataaagtttaaaaatattttttagaaagaatttaaatttttaaagtaagtttaataatttttttaattaatttaatacttttattaggtttttttttttaactttttcaaaattaatagaaaattataatttttaaatttaacttttttaataaaaatagataaaatttagtattagtcaaaatttaagggtaaaaatattaattattctttacaattatatcacaaacaacacaatatctttttttaataaaaatagacgaattttgtattagtcaaaatttaaaagtaaaaatattaattattctttacaattatatcacaaacaacataatatttccttcccttcttgtgggttgttgcaattacatcttcaaaatatctttatatattaaaagtgcctatctaacagcatttcttggtttaacagaatatagaatattctgttaaattt

SEQ ID NO: 109137 - DNA, 530 bp, Cannabis sativa
caccttcgattctatcaactctgcctcgaaggtgactgggatcctgaggtgttttagatgtatgtggcttgggaggcataattttgaaatccaagtgacctggttcaaaagcaattgtgacgttaggtaaaaataaaggctttgccacaagaataaaggacacgctgggtggttctgacaaggctgcttctcgcaagaatcgacgtctgccttcggatatttcttgcaagaagcgcctgtagcgactagaaatatcttcctgttgggttctcactatgtgttccctaaccatagcgtcgtttagctctaatttggaggtgggttttaaggggttgggtttatatgggatggccgattctataggaaactaaaactctaaaacttctggatgataaattcctgaactagagtgagacattgctgccaacaaaaagcagtcccaatccctggagagaattttatcaaaccagaaggtaatgagttggagatcttaaaacaacctacatattgcctgaatcctagtatgaaca

SEQ ID NO: 109138 - DNA, 1844 bp, Cannabis sativa
gagaaaaagagtcacaaaccaaagccacattctaagagcagttagaagaccgaaggagagtcatcaaactattttctccaagaacactaggagatagaatctggggcccacaccccaaagggatctaagaatctttataaatgtgaatttgactaccatcacccaccctccacaaagctcccaaattaaagagttattttccccaaagaatgttactccaaatataagagcctttttttttgaagaagaaatagacccaaaagatttgtttttacgatacaaacctttcaacaccataacaaccaaggagttaggagcctccaagcttgtttagccaacaaagcttaattaaaggaatgtaagtttctaagacacataccaccaccattcttgtgccatcatatttttcccatgtgcaccaatgcatcttcatcttcacatcgttaccaccccactagaaccgagcacacattctatgaatattcttcataaaatgcttgaatattttaaagagattcacagtaaggataggaatagattggatcgataattaccttgatgagcaattctgtacctgccatcaaaaaaatactattttttttaaacagattcatatcgtattcattaaacttccactaataaaatgacattcaactcaataggaaaaatacctccattgataagacgatcatgactagaacttgaagagcgagccaactaatgagccaccttattcccgaattgtttaagaaatttagaaataatatcacattagtaatatttgtatattgttccagaataagaatctcaaggcgagactaaattcctccctatatttatattattatttaagtaaatttattaaaaacaaactaacaaacaacttccacaaaagaggcaactctactaaaaaaatcaccactaatgttagaacaacatgacctttttacaatagagcaagtagggatgtaaacggggcgtggcgggggcggggattgctcccccacccccataccgacttcctaaattcacccaattcttgccccaatacatgtttaaattaaagcgggaatgggataaaaattactcggcagaggaaggattcccattggatacccattacatatatatttttgaaaaaaatttatttctcaaagagaataaaaaagaaaaaccatcatataaattcattaaaacaacaaacgtaaatagaatagtgtgtatagtaaatgtagttagtaaatacagaattgataatcgaaaataagtggttaagtatcatttttttaaagcagttaagcatgattattaatatgcataaccgtagacattttcatgaaaatgaaatgtcttgttaatgaagttaataaaaggccttaacatgaagttattttaattatagtagttatgattttgaaacttaaagatatacatatatcacatcgggtcaggtatctaatccctgcccgccccgatccctactcaggtatgaacatttaaacccataccccactatgaaaaatcttacttttagtcacaacaaaacttgtgacaaaaagtgaaaaagttgtgactaattataaatcatattcctatgttgtgactaaaaggtctgtgattaaatgtattagtcacaaaaatacaatttgttgcaaataaatatatttttagtcacaatacttgttatgactaaaactaaattagtgacaacttgtatctactatgctttagtcataagtaactttttatagtgactaaaagtcacatttagtcacaaaaaatgtatgttgtgactaaaagtattaacgcaaatttttcgttaactaaatattttaacttttttt

SEQ ID NO: 109139 - DNA, 1359 bp, Cannabis sativa
gaaataaacaaaattcttgataatgaaaaaatacaaacaaaaaagggaaaaaaatagagttttttttttttgaaggatttaaaaaacctaaaaacaacttcaaataaactaaaaaacaaacaataagaaaaaaataaaaagatcatgattaaatgcaaacaccataatctataatataactattacaaaaacataagaaatacaaattaagagtatgactattagtggcaaattaatacagaaaaaagactcttaattataaaacaacataacaccaacataaaaatatttatccattaactaaatagacttacaacaaaataaaacatacaaagtaactaaaacctagatacattgtctaattatctaccttgttctcactatcagcgcattcatcgtcattgcccttatcatcttttccttttgacccgaaatcttcattatcatccccatccttctcctctccgtcactaccttcctcctcttcatcactactaccttcatccaaatctacaccttcagcatcttcctcttcattatcatctgcttcttcattgtcctctaaatcaatatattcttcattatctcacttccccaccgtctcatcatattggaagagtcactccctttgtcctgtaaaaaaatgtaagcaaatatcggatgaacacaactaaaagtaaactagaaaatgaccataaaaaactagcataccttagcaacagaatcagcaaaaaccagaagaaaaatgtgtctacattgtggccatttgagcagcaaaagaaacaaactgtgtaaaaacaaactctttcaactcaaccaaatcagatgaaatcttctgctggaaagtatgtagcaaatcaatcttaagctccaaactatcaactttttcagaaaaaccattaagcttgacaaatatgtcactctcaaccacagaagattgttccgaaacaggcatactcttgtaagaattataatcagtgtcaaacttgaaactactcaatttcaatgatttgaactcagtagaagtgggtttcatattagatagttgcaactgagaaaaaatataaaaaataaaatatcaataagagttactctttaaaaaataaaagaacaacaaaatatctaagaataaaccaaaaaaaaaaaaacaaagaaactgaaataccttgtctttggagacatcaaaaatcgtagtctttaaaatttagaaagtcagatggctgctacaagtccactgaataattcttggaatactagaaattttcttttggagtacttaccattcatgtatttacaacactcataaaaccaaacttgaaatacatgaggacaattaatcaaagtgtaaaatacactcgg

SEQ ID NO: 109140 - DNA, 695 bp, Cannabis sativa
cgactgttgcacttagtttgtacattatatactaagggctttcgcagttgatatgtgtcgctttcgtcttcctatgtatactgtccttgatgcctctctattcgcttttagcgtcatacggattctcgctaatttactaagcaccagtttgtatattgattccttgcctaataccttacagtcaacaggttacaaatatactctgatacttacgtaattaatgagttattccataaaaagtgattgcaccgatccatattccctttatcttgacatgtgtccttcattgagatcgcaaccgaatttcttgtataacacaacaaaaaggtgaaaaagaggctcttcaacgttggagacttggtgctaagacaagtatttgcaaatacgagagatgcatccacaggagtatttaacccaaactgggagggtccttatgtgatcgaaacgatagtaggaactagggtttacaaattggctcagccaaatggctcgctgataaacaactattggaacgtggaacatttacgaccctactaccagtaatttgatgttgtaactcatatttctgatgtaatattttgtacttaagttattaataaaattaatcattttttaagtaattacaaagtgttattctttaaaattacttgaggggcatatgtgtatgattaactagaatttatctggaaatacat

SEQ ID NO: 109141 - DNA, 548 bp, Cannabis sativa
  modified_base (54)..(55): a, c, t, g, unknown or other
cttaagtgatataaattcaaagtcgcacgtactatatgacaaagatctttgtannaaataaagacatgtaagtaaattactatttgaaaaacatgtatggttatctatgcaatataaattcgtaaattatacgttgtgatagactcttaaagagtttttgattatattataaatgattgaagaacaaacttttatttctttctgtatattgagaaatatgaaatgtatgtagtttgttcattagtagagaagtcctgaagtacttcatatgcataaaaaattatagataaatgatcatttgatatggaaattaagatcatacaacaagatgaaataaatatatggtcttgaagtactatcattctcgcaaataaaaatttatattatccttaatgtgttatgttcatatctacttaaaattttaaacttcagtatgaacaaagttgtaagcacacatgaatgattcaataagttggataaatactgatattctgagatatatatatatatatgatcatagataatatacagtgatattttaaaagtga

SEQ ID NO: 109142 - DNA, 664 bp, Cannabis sativa
attttaataagtattttttgtttttaaaaataaacaataaattcattaaaaatataattttcttttttttttttgaaacaggattcattcaaacaacaatcaatacaatagattaggcgagtcttttttcacagcttgactcgcacaaaggggaacaaccccaacccacatggcactaactttgttattcaaagtttcattggctaatacatgagcaacctgatttgcttccctataaacaaatgaaatccctcatacccttacattgtgcagcaaacttttaatgtgagcaacaacctcataataaatactatacatttcatcttcatcaaacaaatacgcaatgtttgtcaaaatttactatacaacccacaaaaatatagatagtcatttagccgaacaagttgttcatccatctgaaaaacatacgcaattaatctatgaataacacaaattaaaagcactcttaaaaatctgaataacaaacacaaaaacttctaacaatcatcttaaaatattagagtagggaattctcataaaaattagaaccacatgtgttaactcttggtaataggtttcaatcaaatctcatacaatttgctttaagaactattatctattctttctctaaaagtttgaatgcacgtagtaagattaaaaaata

SEQ ID NO: 109143 - DNA, 856 bp, Cannabis sativa
gcagaaggattttcagcgcttatccgacctgcagaggaaaagagggatattttgggtctcaaaatagctaggcatgccccaccaattagccacttatttttgcaagtgatagtttgctcatgtttaaagcttcagagagaactttagtatcagtacaaaaaaatttcagtatgtatgttgattgttctagacaggtataaattatttacaaaaatttattgagattactttttaagctttagtaatatattataaaatattggtttactgtttttgtagatgattaattacaacaaatcactgcttctgtttcctcccaatactcctgaaggaattagagtacaatatgtctcctatcttgcaatgacgatgacagaagagattgaaacgtatttgggattgccaatggtggttggaagaaataaaaaaagctatattttgaccaatcatagataaaatttggtcaaaactaaattcatggcatacaaaattattctcacaagcaggaaaagaaattctcttaaaagcagttgttcagtctatacctatgtattatatatcgtgtttcattattccagaagaaacttgtgaggaaatagagcgattaatggctagatattggtggggttcattccaatcaaagagaaaaattcattggcgagcttggcaaaagctttgtttatctaagtgaaaaggagggctaagttttcgaagatttgttcaatataaccaagcgccattagcaaaacaggcatggagggttttgataaatcctacgtctactttggcacaagttctaaaggccagatatttcccacaacaaagttttttagaagctacagaaagctctcatcca

SEQ ID NO: 109144 - DNA, 726 bp, Cannabis sativa
gtcatttttggccatataatctctcattaagctctccaaagaacttgtttgagagccttgaggttggtgtggttgttgaggtcttggttgttgagaaaatcccgggcgaaatgattattttccttgtgcttgtgctccacttgaactttccccttgacctccccatgaaaaattcggatgatgcttccatgctggattgtaggagtttgagtatggattgttgttgcggttgaagttttgattacccacatagcaaatcgaagctcgattcgaagggcaattttaaaaagtatgcccatcaccacaataaaacacaagaaatttctgccctttgaatggcagcgggtggtacttcctcccatgttcatgttcttcaaaatgctggtcattgaagccatttgagcggttagagcagtcaaagcatctacttcaagaacacccgctactttttggcttgtaggagctctattagttgaccattgatagttgttgctagctatcctttccaaaatctcaaaagcttcattataagacttggaaagaataactccattggctgaagcgtccaacaccatctgagaggcagcattgagaccattgtaaaatgtctcaagttggatacaatgaggaataccatggtgtggacacttcctcaacaactccttgagtctttcccatgcttcactagtgatatcatctttcaattgctgaaaagacatgatctca

SEQ ID NO: 109145 - DNA, 562 bp, Cannabis sativa
gctgtaagtttggggttggaagaggcaatgaagtggggagaggaagagaaagttggggtgaaggtgaagagggaaactattaagagtgctttagaggaagttttgaatgaagaggaagaaagcaagaagagaagggaaagagctagaaagcttggggagatggcaaagggagctgttgatgaaggtggctcttcacatcttaatttgacattgtttttagaagatattgcacaactagaaggtagtaactagctacaagagtatgaaaagaactaaaatgatatgtactttttttttttttgacaaaaaatgatatgtacttttattgttcgttaggaaaagttgtttttaactgttatttatttttcttccaataaaaaaactgtcttatttatttattttttgaaattgttttaactgtcatattgatttaaataaaactattatatctattctatataaagtgtgctatataactaaattattagtttatgaaaaattcatggatgactttttatttatattaaaaataaaataataaaatattatttagatcggaaga

SEQ ID NO: 109146 - DNA, 1385 bp, Cannabis sativa
ctcttgcgccaaaatagaacactctgctatccaacagcctggaatgaatgccgaatgggtaggagagactaacttatcaattattcctttgagacgatcagtgagaatccccgaaatgattttgtaacagaaattacaaagacttataggtcggtaatgatcgaaactacaagcattagtaattttcgggattaaacaaataaaggtatgattcaaattattgctaaccgagatatgagtgaagagctcctggaccatcttgcagacttgggctcccacaatgtgccagtattttctatagaatatcccagagaaactgtctggccctggtgacttcagcggatgcattgcgaataccacatgtttgatctcctcaggcgaaggcgttttgcatagatcatcatttttttccttctttaacagctggggtgaaaagcgatttgaactccctgcctatcttcagttcgatcgatgagaaaatctgagtaaaattcttttggaaataatctccaatttcttcacggcttcggagccacgtaccttcatcctcaacactagcaataacgttcctccttcttcctaatgattgttgaaacatgaaagaatttggtattaccgtcacccttacgaacccaaagttcccgagatttctgtttccaaatcctttcaattttagcctccaactctaaaatttccaactagaccaaagcttcaagttccaggtttgatggggaaggagtagcattttgaatcttcaccaagtctgactttagtcttttaatcttgtactcacaatgaccaaaggaatgtttgttccagaacttcaaatcatgtttcgtactcttcaattttttcaagagaattccctcgccattgtcaccactcaccttgttccaagctttattaataaccccttcacagtccggacttgaagtccacacctccaagaacctaaaggggaagtttaatttcactgcctcattccaaagagtcaaaagaataggagaatgatccaagcctatgataggaaggtttgagatcttagccgtaggaaacgaagtaacccaagaagcattcgctaagcctcgatccaatcgcttcctaacattctttgtgcccttacgcgcattgtgccaagtacaattaactccatgaaagcccaaatctatcccaccagtgttcatcagaaaatttcgaagacagtcaccttcacttcttgaaactgacctgcccccaactttctcagacttatctagaataacattcagatcgcccaacaccacccaaggttccacacaatcagaaaccttctccatgagcccactccaaaaagccgcctttttatcagaatatggagtcccatagatgcaaaagagatgccaaga

SEQ ID NO: 109147 - DNA, 837 bp, Cannabis sativa
ctttttctaaatatactaattcctaattatgataaactatatatatatatacataacatatgcacctaaattaaatattaactaattattaataaaaaggattagttctgttattcaaaaattagttaatgtgggtcatgtttagctatttataaaaattacatgaattcaattcaaatgagtcttatatacaaagaaaacttaaaaattacataactttcctcttcttaaaaaacaacatctaattagctttcctgcttttgactggtggtgcatgttataagctagataagtatttaaaatgcatgcattgccattgcattgtctttttatgaaggaaagatgtacttttaacattattaaatatatatttatatatatatatatatatatatatgctcttgaatctaatggctggttaggttggaaagcgcatgcaaccatagcttatgaaatatgtacgtacacaatttcaatatatagttcatatgctttcatcatagttttttctttttcaaaagtgttatatatatttataagacagctagatcgatttgagctctccacaaagttctttaggtattggtgacaaagttctagtcttactttcgaaaagcaagggattttatttgtggtgttttttgtgttattgcatgacagtattattattatatacaaaagccactttcaaaacagagcataagattttgttgtctctccatgagataaaatagaaaatggggtgggtgtcctccaaagccaaaagctttccacttatagtactttcttactcaatgaagatcaatttctcactactaattaatatatatatatata

SEQ ID NO: 109148 - DNA, 1135 bp, Cannabis sativa
gaccaagcctccaaatggccttgatcctattcctaccattaataaagttctacaaaattgaccctgaccctaaccctaaccctaaccctagccctaaacataatattgttatctttttgggggtctaaacacaatatgtctcccattttgtaacttatttcttacttaactgaccaatttccatccttaattcatgtttagattaagtaaaacaaacctttttttaaacttcacattaccacttttctcttcttctttcccggaccacacataataataaaatgaaaattccccacagaccatatatattgtacaaagctatattaattgtgaacaatcccatcacctatatacatctttttttccctacaaaacccttattttctggaactatgccggatattcatttcatgttacaaatactttaatagtattattactatatttattttattcactatatatgaatatttattgctaaaaagatgtggcaagtgggacttcaatagttcaattaaagcacacagcacttatagcttctttctattctatttgtgtcaataatgattattattatgaaacctaattgatggctttccgcactactatgagtatgactatgcataatgaatagaaaaactatttcatgtttgctttaaatatttatctattaaaatttgaagatgaaagattgtacttaagagattaattttattattatttaagtatggtttaattattatagacttagggttgaaaatgttaatgattttgtgagtgtttttgttgttattgttgagtaaagtccctttctgatgatcactattgttggccttgaggatctggtgactaatatcactatcaatgaccaaattacaagtagacaagccacctgaaagatatgaaataaaataaaataaatatatatatcaaaattttcttggaattcaatcatccatagcccataaatgtggactagttgttcactttcttcaccagttgatcttctttcctgttagaaatttttgatcaattgctctatatatttgaagttctttcaaaaaaaaaaaaaaaaaaattactcagcagtggacgtgactttttcttttctttcagtatatgatatgatacagat

SEQ ID NO: 109149 - DNA, 763 bp, Cannabis sativa
agcgtttataaatatagcaacaggacgacattgggattcaaacacagttaggtgacgagggacaacaggtgtatccgcattacgatcaagacaattaaatcttgtttgtatgcctttgaagtacatagaacaaaatgtcaacgcctcatcaacaacatataattcagcgatagacccttctggacgagctttgtttctgacataattttttaattttttcatgtacctttcaaaaggatacatccatctcataaatactgggccacccattatagcttcttctggcaaatgtagcaccaaatggatcataatatcaaaaaatgccggaggatagatcaactccatcttacacagaatatgaatgagatcttcttgagccttctccatatctttcacatttagtgtccttgaacataacattcggaaaaattggcaaagttctatgatggtgcttgatgttctcttatccaaaaacttgccaatacaaactgggagtaatcgctgcattatcacatgacaatcatgagactttaatccaataatatttgtgtcattttcgtttacctttttcttaaggttagaacaaaatccatctggcaatttaactccctttaaaaattgacaaaacacttgtctttcttcagtagtcagcacataaggagcgtgaggcttcattaacctcttggtaacatcttcgtagatccatagcgactgtcggacgcctagtttttccaaataacgtcttgcattgatggtgtctttt

SEQ ID NO: 109150 - DNA, 585 bp, Cannabis sativa
  modified_base (26)..(48): a, c, t, g, unknown or other
cgtgtgttttgttaaatgacaaaatnnnnnnnnnnnnnnnnnnnnnnntacaaataggaccctgaattaatttttaatcaaaataaagtttaattatataatccgatctaaaagttttatgacaaaactgtttacattttttgtatttgttcgtattaggaattgtcttcaaattggttgtattaaaaaaaagttgtcaaaaattaagctcagggtcctattttcaccattttagaaaatacagggtccattttgtcatttaataaaacacatggtctaatctgtaacttttgtaaaacacagggtccaaaatggtatttacccattttaatttcataaatttgtatgacgcttgaagaaatcttgataatctaactgtattaagaataattactcaaaggtaaaggtaaccattttcaattaaacaaaaagctccttgtacaattgaaacccaaataacaaaataaatttaaatctaatcacaaacaaccaagtaaattctcaatctgtgaaaaataattagtagatatatatccaattacaaggggccaccatattttgaacccccaatttatagaatcccta

SEQ ID NO: 109151 - DNA, 1123 bp, Cannabis sativa
aattccaattcttggaaggagttaattcgacttaggccagaaacctaggaatttaataaacctaagttcactccttaaagccctagaaattaccaaaaactaaatcgaaaaatacttaaaccaaacacagtaaaagaagatgcaatcagaagcaaaaataaaagtaccaacttaggaaaagggaataacagagagaataagtaaaccacttactatatttctaaagatttctaggcagtaaataacttcacgattgggatcgtgatgaatgcgatgatgggctctaagaatttcttaagattaaagatgaaataggcaaaaaataggtcaagtacaatgagggcatgcaaggtgatgaaaaacgaagatggtttttcagaagggttcgaagatttaaaaggtagaaatggcaaataagtgttttctcttgagttttatactttaagaatgatcaacgttagatgaaaagaataaagatctaacagatgggaacaagggatgggaacaagggagaattagaaaagagaattagaaaagatttagaaaagatgggcaaaagatgggcatttaatgctaatgatgtgcctcaaaatcatgaactaccaaaactcaaagcatgcaatttttgaaactgagattaagacgaaaatacccttgtaatcatttaaaaaactcttttttattgaaaaagaactttttaaggggcaattattatacccaaaatttagctacacttcagagaatgatcttgcagtggaatataaaccacatgatatagtaaaattttattatttaatgtaaaaaagaataacttgttaataaaggattaatggaacatattcataacttgctaactacatagtcttaagcgagatatgaataagaggctattgaaacttatattgacgagacacacacttgcttcggagtacacaactcaagaagataattcatttattcaaagtagagtgaatacagttatgcaaagcaacctcgaattacgagtagcgagacaaccacctcacgattctaactaaagaaacttgacaaggcatattaatcctaaatataattaatccttgcaattaataataattttgttcatattgtttatttttttatt

SEQ ID NO: 109152 - DNA, 991 bp, Cannabis sativa
ctgcagccagtccttctgtggtgataggtcagcttcctgtcaacaactccttttatattgagttatttgattcgagagttacacactcatatgtggtaacacgagtgatggatcttttgggtaggccctgtgattttattgaaagagggtttggaaccctaatgcctagtggggagttagttatctccaataggcgcattaggtctatgccagttaggatcgaagatagggaattgagtgctgaccttatagagctgaaattaatagagtttgacatcatacttgggatggattttctgtccaagtattcggccagcatagattgcaagcgaaaaatggtaactttccaaccagagggtgaggatccattcgtttatgtcggatcagttcaggggtctaagatccggattatttcagtgtttagggctagagattaactgcacaatggatgtgtaggatttttagcggttgtgattgactccagcagacctgaaatatttgggcctaaggtagtcagagttttttgagaatttctcgatgtatttctcgaggagttgccaggattactgccacaatgagaaatagatttcgtaatttatttggaacctggagctgaacctgtttcaaaagctccatataggatggctccagcataactcaaggaactaaagttacagcttcaagggatgcttcacttagggtttacccgacccaatgtatcgccatggggagctccggttctgtttgtgaaaaagaaggatggttcccttagaatgtgtattgattatcgggaactgaacaagctgacaattaaaaacaaatatctcgttgcccagaatcgatgatttgttcgatcaacttcaaggaaagactgtgttttctaagattaacttgtcatcctgttatcatcagctcaaaattagagaagaagatatactgaagactgcattttgaactagatatgggcactatgaatttctggtaatgtcat

SEQ ID NO: 109153 - DNA, 870 bp, Cannabis sativa
aggggtttttccttaacatgtgcatggacatgtaccgagaccgcttaactcaagtggctggtatgacatgctgagatgtttcctcttgtggccattgacacttttatctatgtttattactaaaaaattcaaaattgattgttttaatcgtccaaattgctctcgttaagcatatagaaaatctgtgtttgattagttaaatgcttataatcgcttatcatgatgtaatgtctattctttcttgatgcagcaataatgtttgccaggttattgaagccgaagatgttgtagatactttacttgacactctgagatctccagatacttctcaacctttaatggaaaaggtttaatgattttaagcttatcattttattttccccttggagtttatgagaggatgattccattacaatataaattgttgttgcaatgcagaccttggatattcttgctcggatcttagaccctagtaaagctatgagatcaaaggttagtcagttgattgttgcaacatgtcatgaaagcttgtagctgaaaactaagtaccagtttcttgttgtttttccagttttacaatggaccagttaatggattaaataagggattagaccaaggaagaagctctaatttttccggagagaaaactggagattcgtctgagatagacaccgataaaaccaataccaggttttttctgttcctgtttcctcttgttttcagttttcctcctttcggtaattaagataggctgacattatacttttcgtcggtcccaagtataacttagattacaagatggtttgaactgcttgtccaagtttaaccctataattgactcaaccctacaattgtgcttaaaatttgaca

SEQ ID NO: 109154 - DNA, 550 bp, Cannabis sativa
  modified_base (27)..(29): a, c, t, g, unknown or other
  modified_base (101)..(105): a, c, t, g, unknown or other
tattgggatcgagtgtattaaaaatannntataactttacacaatcaattaatacaagtcaaatccaaacattgtgttgtattaaataatactaatacaannnnntacaatacaatacaacacaatccaacatgtacaatacaatacaatacgacgtaacaaacgaaccctagtattatgataaaattatttacattttctgtatctgttctgttagtaattattttcaagttggtcatattttaaaaaaaaaattgtcaaaaattaaatttagtgtcctatttttactattttagaaaatacaatgtctattttgtcatttaacaaaacagatgatctaattggtaacttttataaaacacaggatccaaaataatatttacccaaaaattataatcatttagtaaaataaattatttattcatctaaatatacataattaatctacatattgggtattggtcatctttcgtaaataaatcaaaaatacctccaaaaattgaggaaattatactctatactctttttatattgtcttattttattttta

SEQ ID NO: 109155 - DNA, 4784 bp, Cannabis sativa
  modified_base (3966)..(3993): a, c, t, g, unknown or other
atcaaatacccgttattgactataatatatgatgatgatgatgatgatgttaagttgttctattcagttgtacctgtcccaggatctattagtttacctcttattcatgatgaaaggtgcaatgatgagaatcaatggaatcggttttatcactgcgatggactcattttgcaagtaaatcctcttgggagaatgatgttatgcaatccttgtttgaaagaatccatgattctaccacaaccaaggaacactacaattaaaggtccttataccaacataggatttgaatttgattctaaaaccaatgattacaaatgtgtcaccatctggttcgacgatgaagactatgcatttgaggtatacacagttggttctgattcttggagagagatcaacatgtctcaagatgtaatagttggtattatgggtgctaaattacaagatggtttatgttggaatggtgtttgttactggtttgttgtgtttgatgatacatatgaaaatgtcctgacatttaatatgagtaatgaggaatttgacctcataagggatttgccagttggtgaacttttaatgtctgatgataggcctcacctatcagtgtggaatgattcacttgttttgtgttggagagacactgacaacaacctttgcatctccaccatggatggtaccaaaaatgttcagcttccaacattagactgtcattttcgtgttttaccattttccaagaatgatgactttttaatcaaattctggagagattatgggactcaaacacagtttgtgtcttgcaactttcctagaggaatttccatgattttttatgttttagttagaaacatagctgctttttttgaatgtttctatgtcaagagtctggtttccattaagagaagaggtgaagttgattaaaaatggttatgtaatgattcagtttttgtgttagtgatctccacatgtaaagtttttatgttttcggaatgattgatgatactgtttatttgtttataaaagatttgtggaatacttctttgaccatctgtgaccaagttaccatctttaagagagagtgagagtatttgttttagttctcatttataaacttgttatttcatgctttcccaacaaacccaaaccagctcatccaacttatacttgttctttgagatgaaccagtttttcaccacacacactataagaaaaatgacttttttttttttttaatttattagtttaactttgaattaaaataagagacaattttcttcaatcagacacacaacgttgaaatacgttgcctaattaaaaaaaaaaattaaacatgtattgcatttaacattacctaattgaatctaatgaaaaaaaaattaattagatatgtattacacgtaacatcaatctagtttatataaatttaataaaatcttaatgtacattttttaaatattaattagaaagaataataaatattatcttttaattaattttttaattgttgtattgttataatttgagtaatttgggatataaatacttctcagttataaataaatacataaattaaatttttaccgtactaatacataagttatatttttagaactctgtagctacctgaccattaaatattaagtcattatccaagtgtaatttttttattggtatatttaaatcaatttttttaaaaaaaaaaaaactaaaaaatttaatgacttagactaattaaaaattgtcacgtggtaatttatgtaacacttaacaacaagttacctatcaatattccacaattgtaacttaggtatcattaccaccaaatattaaatttaggtatttatttttaacttaaaaattaaattaatatttatgccgcaaattactcttataattttaatataattttagaggaataataataattataatttatattaaaaaagaaatagttttagcaattttaattgaagataaagaatctaaatatgtaaccttttttcttaaacaaaatgtaatattattttttttaataaaaataaataaaatatattgatggttttattatgccaattgcaaaaaataaattttaaagatcaaactccattattccaaaactaatctctcaatattagttatactagtatctacggagccacaactttgaaattgaattttgtgagaaagaaagtccatttctcatctccaagatttcttctttggttttcaacttcatcttctccctgctacgattacaacctcattggtttgtattttgtcctccattttctctttaattcttattattctgaaaagtttcatttcaagattatatattgttcaaaaagaaacacaaatgtcatgctttttcttaatttgatttgtttattctgttaataatacatactaaataatcttgaaacttcattactcagtatgttgatttctattaccacctgtttgattaaattccttatgagtctttttgtttcaacttcaagagtttgatatatatgtgtgattttaggacagttttaatatatgaaagtccatttatggttaatgcagatgatggcaagcttctctgatttgccaagtgatatattaatggaaatcttgttcttggtaccaccccattctgtgcttcagttaaaatttgtgaacaagttttactattgggtgatctcggatttcatcaacaacccaacatttgtttccaagcacctctccattaccaaaaaccagtcctctacatccttaattttcaaaggacctttagtccgtgttagtgatcacttaatctcatacccatcatcgactgtaatatatgatgatgatgatgttgtggtgaactattctgttacacctatcacaagatatattagtttaccacttattcatgatgaaaggtgcaatgatgagaatcaacataatcggttatatcactgcgatggactcattttacaagtaaatactcttgggaaaatgatgttatgcaatccttttttgaaagaattcaagattctcccagagccaaataacattatacttagagggcctcatccaaagataggatttgaaattgattccacaaccaataactacaaatgtgtctctatctggctctatgatcaagattgcacagttgaggtctacacacttggttctgattcttggagagagatcatcatgagggaaaacattaaggacattattagaggtactacacttgaagatggtttatgttggagaggtgtttgttactggcttgtgaagttttttaatgataaatataaacatatactgacttttgacatgagggatgagaaatttggcctcatcttagattttccacttggagctttgctcacttgtcatttgcctcacctgtcaatgtggaatgatttacttgtattgtgttggaaagccaatgccaataccctttgtatcacaaccttgaatggtaccaaatatgttcaccttacaaaatttgaaaatcaagttcgtgtgttaccattttcgaagaaggatgatattttaatcaaagtctggagagattctatgactgaaacgaagttggtgtcttacaaccttcttagacacatgtgtagagagtttgtttgggatggaaacacatttgctttttttgaatgtttctatgttaagagtttggtttctattaggagcttttgatccaaatacagattttgagttgattaaaaattgtaatgtattgattcagtttttgtgttagtgatctcaacatgcaaagcttttgtgtttttggagtaattgatgtgtgatacttctttgaccatctgtgacaatgagaaattctttctttattcaatttcaaatgagtgaattttcaacaaagcaggaaagatgacatggttttttatcccaccaattaaatcttttattttcattatgcatatattatcaaaattcagataataataataataatannnnnnnnnnnnnnnnnnnnnnnnnnnntaataataataataataagagaatatatacctcgtgttttcataaaaaaatatatttagtacattgtatttttaataactagtaaatatcctgcgcttcgcggcagatatataaaatattttaaattatgtataaaaaataaattgtgttttttaattaataataattacttagtaaaattatattaaaatttaactttactattaaaaaaattgtgacataaatacttaaaatattaaatttgttgctaataaatatcgaaattcaaaaaaaaaagtagcataaatcttcattcatggtttaattattattctggtgtgtgttaagttctgggttggaattttattgcatgtgtttttaatgtttgagttttagtgttttattggggttctaatattttggtttgtgtttatgagatctgtttttttatttacttatttttatagattttgagaactgaaatttgatgttgtttctattgattattgggattgagagtttgatttttcacacaggaattaaagtttgtcttttcgttgcattgattgaaaaatattatagtagaaagtttatggaatgagaattttgaatatataaaaatagaattgaaaaatagcatttgaatcgagaatcaaagtttattgtactttataaaaaaaaacttattgttaatctctttaaaaaaaaaaagtttattgtaaagataatatagctggaagaagatgaaaaaattgattttatttcatttaatatgtatataatatttttttcttttttgaataatatgaatt

SEQ ID NO: 109156 - DNA, 722 bp, Cannabis sativa
cctgagtggaaaacaagctaagcgatcccgggtcctatgtcactacaaagaattttgataaacaacttatccatattccaaccaaaccgtagctccataatcagacaaatttctaactctccactagtttaaaatagcttaaacattactaaaataacctattctaagctctgaaaaacaccccgagcgaaaccgattctgaagccaaaactagggttttcccccactgctgccaaaactggtcgaccggtttcactatgcctgtgaaactggttaactggtttcccctgctgcaaaaaatggaaactcgggtttttggctccaaaactgaaccaagtctcctccaaacctgttcaaaccttccaaaacagtatactaacaataatacaatatattccaagcttcaaaacataacaactcaatcatttactaaaaatcacacactaaagtgaagaaaactaaactttggcttcatcaaaccaaactcaattcaagcagtcacaaagaccacttaaaaccattcccaacatactcaaaaacctaccctaaatacaccccaaacttagtttgattcctacagcaacagaaaagcaaaaacctacctcaaaaccaactcaaaaactagtgttctcaatccaaaaagtaggaaacctacctcaattaacctctaggttgatttggaattaaattctgcttgaaaaaagaaagcttgttgaagaaaa

SEQ ID NO: 109157 - DNA, 1425 bp, Cannabis sativa
attttaggggtttttgtaaaagtatcctatttttaaaattaccctaattattggttctcctaaccaattatcccttataaaatgcataaaaattcaaatttgccttctgtttttcctgaaaatgaatatatctatgtagatttttttgtggttaaattctctcaattatcattctacttgcacttaattctctaagctcaaattcttcaaactgcactgtttgaaaatttaaggtgtcatccattttttttttttaccgttaattgccaatatagacagtttacatttacacttttgtacatgtgtcaaatttatattagtgaagctaatattattattttaaaaatataaaaattatttcaaaatttataatatattttttttataattttatttaattttaaaataaatttaataatattaaatgtactaatataaacattttcaatggcaccatcaatttgctacaattcagtagtttgaaaaattttaccgctaaaatttgtatttacgaattagaaagattttgccttaaaaaaatctccataaatatatttcagctgcaatgaacaaattcttgaattataccggttaaagttatcttttcggaaaggcatgattacttaaaaattattatagaagaaattattgggtaaacattggcagaattaaccatttctcacatattctactaaaattgatgtcaatggtcttggctccttttgtaatccctttgcatcgcttgatgacgaatgtctccctcagttatttgacgtgtcaagctttttcttttctttcattccattttggaaaaaatgtgaccaagttgatcaattattattcctaggcttccaataatctttaatgctcaagtacaaaattttcaatttgaccaaataattacgcagtttagttatgtcttccaatgaaatgtgtaagagcataacccaaacaataaccagttacataaaaagattgtgacttcaaactgaaccaaagtctcataaaattgtagttcatttgcaaatggaaacaaaattgaaattcctaatgagaaatactacaaaactagcttagatgattccaattttgttagcaacgtccagagcatcatagtctggggtcaatctaacgtaagccttcttggtgccatcaggcctagacacaaaactcagattatgttataaacataaacaaggaaacatgaatattccacatgtatattaagcaaatcaaagtcttacttacctgatcaatgtattcactttcttagtctgaatgtcatacatcttctttactgcatccttgatcttcttcttgtcagcacgaatgtcaacaatgaaaaccaaagtgttgttgtcctcaatctttttcattgcagattcagtggtaagaggatatttgagaatctgataatgatcaagc

SEQ ID NO: 109158 - DNA, 1111 bp, Cannabis sativa
aagtgatagattccatggatgaggagatgaattcccttacgaagaataacacatatgagttggtgaaacttccaaaaggcaggaaggccctagggaataaatgggtctttagattaaaggatgatggacatggaaacctggtaaagtacaaagcttatttagtcgtcaagggttttggtcaaaagaaagggatcaattttaatgaaatattttctccagtggtgaaaatatcattaatcagaataatctttggactagcagtgagtctagatcttgagattgagcaagtggatgtaaagactatatttcttcatggagatttagaaaaaaaaaattacatgcagtaacctgaaggttttgaggtaaaaggaaaagagcatcttgtttatagactgcgtaagagtttgtatggtctaaaataggctccacgacagtagtagaagaagtttgattcattcatggtggatcaaagctataagagattagctgcagattcgtgtgtctacatcaagaaattccctaatgagaaattcgtcatcttattactagatgtcgatgacatgttaatagtcgagcaggatggtaagatgataaatcagctaaagaaagaactatctgaagtcttcgatatgacagacttgagggtagccaccttctcgaagattatggttgtcacaagagaactatgttgaacaaatacttgagaggttcaacatgaaagatgcaaagtcggactcttcaccacttggtggtcagttcagactcactaagaagtcatgtccttctttggaagaagaaaagaggaagatgttggctattccttactcttcagcgtttggaagcttgatgtatgtaatagtttgtacgaaaccggatattgctcatgcagtgggagacgtaagttgtttccttgcaaatctgggcaaccatcattgggaagctgtaaaatggatctttagacatctcaaagggacatcaaaaatgtgcctaagctttaggaaaggagagtcgatcttagaagggtatgcagatgctgatatggccggtgatcttgacggtagaaagtctacatctggatatatgttttcttttgcagggggagctgtgtcat

SEQ ID NO: 109159 - DNA, 926 bp, Cannabis sativa
gattttgtgtacaaaatttaaagagtgttacaaatcacaggtgagtataaattattttaaatgactataaaattttatttttggctacaacttcagtaaagagactagaataagaaatagtaaatattccaattaataaattttataggtgtgctttttatacgaggttttttttttttttttgacgcggtgatcaaaatcatacaagattaataaagcaacaatccacaatcggcggcggaactctcaaccaggatagctcatcatctaatcgaaaggtatgctttgccaaatcatatgttgcagaattcttatcccgagccacatgggacaaaactgcaactcgaaaatttagacaataaagttatgacatcctcaaacaacacacccaactcattaaagaacacccttcctttgatagttgttaccagagacaacgaatcagaacaaacttctttaattgggatttcacacggagagctcaattaaatccaaccaaaagtaccaaaatctcgacttgtaatactgaaatactacctgaaaacaaacaaaaccaaaaaacaccacaaaataatatattagtataaacactcgtatgctaaattaaactagaaacaaaactcaataaagtaaaacgaaacccaaattaaggatgaaacaaaaaataaagaaaactagccaaaggtgttaccctttggctagtaacaaaaacaataaaactccgaacaaaacattttcctcaaagagaaaaatacaacgtaaggcatgaaacatcaaaaacctgatacaaaggcgctcaagatctgtttcattaaaggctatctaaactttctaaaaaaaacaactaaccacactattagaatcaagagctactactattcggacttaaagctagcaaaatttgaaaagcttgtataaattaaaaa

SEQ ID NO: 109160 - DNA, 575 bp, Cannabis sativa
tttatgcctcttttttgtagtttttatttttatatttactcctaattttttataagaataattttagttgcactccaaaaatttataaacacatcatattttaatcatttttattttatataaaatgcatatctttaataatattaaataccatacatttattttctatttgcaattttacggcctaaaatttttaattacaaaaatacattcgtaatattttcaaattataaaaatatactttgctcagcaaaaaaataaaaatacaactaaaaagtaatgagaaatcaatctcataccaactataaatgaaaacaatctcataacaatcataatacaactataaatagattataaaataaaaaattatttattatttttactaaagagatagttctctagccaaacaatttgtttatccatccgaagagcatgcactgctaatccatgtgcaaccatattgaccgttcatcgtacatggattaaggacactcttgaaaatttgaaaaacaaacttgcaacatcttctaataaagaaccaaagtcatttaggtaaacattctctaatgttacta

SEQ ID NO: 109161 - DNA, 1237 bp, Cannabis sativa
ttaacaatctcaatacttcggggatctcaatacttcggggggaatttttaacggccaaaaaagttcagggacacaatttactacatgtcaaagtttagggagaaaaattactaacctaaatattttcgaattaacatacgaaaaggacaaaaagtggcattataataagcctgtgttgaggcatgaatcaagctcatttgatttcaagaaagaaaacaaatagtaagagaaaggttgtgaactggtggccttggaaagaaaactaaaaatggtggcaataaattgtaatatattcaacatacatatataggaaagaataaagtgtgagaaacagtaacaaaacctctctttgcgtggtgcagactactcctccttcatttgttgacttttttaatgtttacattaaccagttaggttataaggtacaagattatgacggtattaacctaaccctaccatattttaatgatggcaaagttttatattgcatggactttttgtataatatagatcacacaatcgtgtgaaaaagtaaaaaagacaataagtactgttcagaccactctattattaagggtccaaatggtgtacatttgttaagtttgtatgtaaatataattataaaggcttaattaggtggaatttggcgaattaagcccaagagatgttacaatcatgtggccgtaataataataattcaagtactcgtgaccaccttacaaaaataagagacacctaaaaacgcgttccacgactatatattattatatgttacttccatttgtgtcttttatttatgtaatttttttttcccagttgttatttgagaatatttcatgtcatcatgatcgataatattcaatattgcacaaaggaaatgttacagtatcaataaacgttcaaaaactcagattaatttattgatcataaatgataattcaatttgattgatgaaaacatgattaaaaaaaatggattaatatatatatagtaccattgagcatgtgggtgttttataagagaatgccttagaagaagctgacgtttgccacgatttttcacctagataagagttcatgtcacgtgacatgatactttcctccttccctgtcacgtgcactcttgcttgcttaattatatgtgtatttctttcttgaaataaagcgttcatttaattatgggtaaataccattttaaactctctgttttgcaaaagttaccaattggaccctgtgtt

SEQ ID NO: 109162 - DNA, 1102 bp, Cannabis sativa
atggctggctaatccggtactggtcccaaagctcaacgggagatggcgggtttgtatagactttaccgacctaaacaaagcctgcccaaaagattgtttccccttgccaagaatcgaccagatggtggacgccacctctggattcaagctattgtccttcatggacgcgtacgccggttacaaccagattaagatgcacatcgcagatcaagagtgcactagcttcaggaccgataagggcgtatactgctacctggtcatgcctttcggacttaagaatgctggtgcaactgaccaaaaaatggtgaaccggatgttcaagggccttctggggcaaaatatggaggtatacgtggacgacatgctggtcaaatcgaaggcgtgcactagccacgcggatgacctagaagaatgcttcgaagtggtccggagatacggaatgaaactcaacccgaagaagtgcactttcagggttaagtcgggaaagtttatgggcttcattgtcagtcagcggggaattgaggcaaatccagaaaaaatccaagctctcctaagcatgccttcccccaagaagcacaaagatgtctagagtttaaccggaaaggttgttgccctgagcctttttatctcccggtccacagataaatgcattcccttcttcaacatcttgaagaaatgtcagaaattcgaatggtccgacgagtgcaaggaggcattcaaaaaactgaaagagcacatggctaagccaccaattctatcgaagcccgttctcggagaggatttgttcctatacttggctgtctctgagaatgcggttagcgcggccctagtacgggaagaggaaaaaactcagcatctcgtgtactatgtcagcaagtgcatgataggagcggagacacgatactcggtgattaaaaaactagttttttgcctcctgatggcctcgagaaagttgagaccttatttccaatctccctcgatcaaggtattaaccaaccacacgctccagcaagtcttacaaaagccagaggcgtccggaaggctcctcaaatgggcaatgaagttaagccaattttatctacactacattccacgcatttcc

SEQ ID NO: 109163 - DNA, 784 bp, Cannabis sativa
  modified_base (225)..(225): a, c, t, g, unknown or other
  modified_base (281)..(288): a, c, t, g, unknown or other
  modified_base (727)..(736): a, c, t, g, unknown or other
taattaataaataatataaaaagagaaatttcatttttaatgctaaaaaaataccctctaacaaaatttagactcctaattaatttatacaattaaatactattgttttcaatttttacacaaaataccctccctttcattatccttctctctctgtctctttctcttcctcttcctcgcaccaccgagaccacgcaaccaccaccaccgaacctcctttcctcnaccaccgaacctcctcatctacccaaaaacccagacaaaacccagaggcccaagannnnnnnnacctccatagcactcaagcatcgaaaaaccaagaggccccgaacctctgtctccgtcttcatcttcttcttcgtgtttatttttttattggatttatcaataaattatcgatagtttatcaatagtatttattgataggttattgatagtatatcgtcgacatttaccaataagttctcgataggttattaataatttctgtttgcacaaaaaaaaaaagtagtgcgtagacaaaaccatcgataaagtatcgataacccatcgataatcctatttggccagaaaatcatgccttccaccaccatctagtgtctcaaacaaatacaaattcaataagcttctggttgggggaggattgggtgggcagtggcgaatggcaatggtggttaagagaagccgaggaggtgaaagagagaaagatttgggtaggtgagatttnnnnnnnnnnggattaagttttgggtagatgaggaggttcggtggtggaggagaagag

SEQ ID NO: 109164 - DNA, 527 bp, Cannabis sativa
tgggctaacgagcaggagtaataaccgaaacaaaatgccatctgaaaacgtccacaagcaaagagaggttaccatttttaaagctgtgttttaactattatattagcattaagattttacaataatcattatatttaaattatgtgaaatgggatagctttgttggatactactagtataccaattagaatttgaaagtgtgtggtttaaattgcttcctcatatagtgtgtagaaaatttgtgcttacgaatacaatcaataagaagactatttttaattataatagcattgatcttttatttgttgaagtaattaataacgaagccagctagtgcctgggtaaaattaaagcagtatgtgtatgtgtatgaacttacttttctttttttttttttctcttatcacattaaaattatgaccattatagtttcatatctaataataatattagatataaggaagctaatattataatgaattattatattttctttctctctccagtatgttctacgtacgatgacc

SEQ ID NO: 109165 - DNA, 505 bp, Cannabis sativa
taaaacttaataataatctgatctagagattttatgacagcactggttacattttttttttgtaactattagtgttagaaattgtcttaaagttggttacattaaaaaatagaattgttaaaaattaagcttagagtcctattattaccattttgaaaaatatagggtcaattttgtcatttgacaaaatagagggtccaattagtaacttttgtaaaacacaaggtccaaaatggtatttaccctaattaggtatgcgtacctgattgatccatagcaattagcacactttgatagtgaaatactatcaactaagtttttctctctagatctctaaatcagaagcagtttttatttatccgattatcaaaaagtatacaattatgatggaataatatatatctatagagttatggaggagacttagctacataatcctagttggactgggctgctcatcaaaggtttcagttaactagaaaaatatgcttaaaaaattaagcca

SEQ ID NO: 109166 - DNA, 505 bp, Cannabis sativa
acagtgcacaacatatatgtcatggcactgtaccaacgacattcactttataaatatatatttaaattatttttttgatttataaaattaatatttaatttatgtttattattaattgtatttataaaattaaaattttaatttaggaaaattttacaacgcacattttttttggtgcactaataaacccctatctcttatggtatcttttagactagtatttttgatggtcgtatacattataattatttaagatctcctacaaaatttttaaaaatttaaaaaaatttaatacgccggaaacaaagttccaacattatgttgcatactcttttatttagagggatacgtcgtaaaaacgcaaactccaattatttttaccatgatagtttccaatcaaatccacaaactatcccttagtgggtgactttttcttcaaactatcactagttttattccgatcttggtgattgtaacaccctaactaacatagacgtattacgtg

SEQ ID NO: 109167 - DNA, 1523 bp, Cannabis sativa
  modified_base (101)..(105): a, c, t, g, unknown or other
tccccaatgaaaggaattcgaagattcgggaagaaaggaaagttgagtcccaggtttattggtccgtttgagattcttgagaaagtaggtcaggtagcttnnnnnttggctctacctcctgctttatccagggttcataacctgtttcatgtctcgatgcttcggaaatatgtatctgattcaactcatgtcctaagttatgaagacattgagctttagaccgacttgtcatatgaagaacaaccagtgcagattttagacaagaatgaaaaggtgctgcgaaacaagactattctgctagttaaagtgctattgcggaacagcatagttgaagaagcgacttgggagttagagtcgcaaatgtgggaatggtatcccgagctttttgggtaaatttcgaggacaaaattcctataaggggaagatagttgtaatatcccagaaaataaataatatttgagtagacatattttattaaatatgtaattattttggtgacgaagtaagattatgatcttacttagggtaactaccgagagtttatttaatgacatataaagtgtaatttattaattacggagattatattgagatatgtgggtatcgaggataccattattttttttaaataaaatattgggcccggcaattttggttagaaatgacatttatggaagaattatttagagaatattccggattaggttagaatttttttagaatgttgggttgatggattagtgaaattaccaaaatgccccaaggtttttttaaatttttttttttggagggggtagattagtcttttggtaaatatgaattttgccttttgacttttttagggctgcctattaattaaaagaaaaaaaaaagaaaaagaagaatggaaaccctattttaaggaattaacttccaagataagaaaccaactctcttctccctctctctctcgtggaacttggagccagacaagtttggaagaaaccttgttgcaattcatcctttttcttgctgaatcacttcttagaacatcattgaagcttgaggtaagtctttgttgtatgttttccttaaattcttttggttttaagttagttttggttggggttttgaattttaaggggggctgcaagatgtttggtgatggaatatgattttagggtagttgttgaggttgtttgagcttgtattagttaggtgtaggggctggttgaattgattaagctacatacagataaaattgtgtttttcttcactttgaagtgtgattttgagcaaattaatatattgtaatgaattagttgtttggttatgtcatgtttgctacattatactgttctggaaagtttgattaggtttggtggatttttgggtcgattttggaggagagaacccttagagaactggtctgccagaatcggtcgaccgattgcttgcaggggaaattttctgggttttctttaggttcagttttggcccaggaagttgtgtatcatctgttttaagttgtatatgggatgctt

SEQ ID NO: 109168 - DNA, 678 bp, Cannabis sativa
ctacccaatttactaaaaattctaacaaccacataagagtgagtggccccagagtcaaataacacagagaaataagagttgttaaccgagagctgacctgttacaactgaggggatagcctctacatcaggttgaattagagcaaacaatttttttcttaattaatattttagactcccaccccaacctagacattaggaccctgaccctagcctcgaactcagaccccagccctagacctggacacaaccctttgacttagactcggacccggacccaacttaagtaaattcaacaaataaaaatgaatattaaatttgtaaaacacatttttattttctatttttaaaattgaaatataaaaatggttatagcaaaataaattttttactttcatttgtataattaaaaattttaaaacaaaattgttaccaaacatcacctatattcttcaaaaaaattattaataatttttcaagagattaaaaaaatgagttttttcatttttacattttaaagtagtttttttatagtttaacgaaaaattacataacaatcaatagagtaacctaaatcacaacctaagtaaaaactaccagagtaatccaaaccataaaagtaaaagaaaaaatagtatatataatgatttccattaaaaaaatcctaccaaccattagt

SEQ ID NO: 109169 - DNA, 995 bp, Cannabis sativa
  modified_base (493)..(501): a, c, t, g, unknown or other
agttgacgcagtgttggaggagcgcaggggccctcgtcttccaccccgcattgattaagctggttgttcaccaccaccatcactattatgttctctttttctttttctattacatattcagtccttcccctttctttaagataatttattttcttttttcataaggggagacacttatggcccgtcctcaggcccttatttatctttttgaagcttttgtttgagatccaaacaatttatatttatgtttgaatatatatagcttttaactttcctaattttggtctgtttacatttgtccgtgtgatatgccttactaccccctgagtgacatgaaaatcaatttttaagtcgctcagttttacaaaatcaagttagaggttgcacatatttgttcggtacaaattttctttatagaacataaactttatttttcaactattggtaatatacttccggaggtgatcgacattccaggccctaggcaccatgnnnnnnnnnattctttttagcttgtaggtcccataaccgatttcgtcctcaatttcgtacgatccttcccaatttggcccaagtacccccactccgggttcctgagtagctgggaagacccttcttaagactagatcatcaatagtgaatttcctgtttctcacttttgagttgaagtgtttagccaccttcttttgataagctgtcgttcgtatttaagactcatcccggagttcgtcaatttgatccagtgcttcttgtaataaagccttgtttgttgtcggatcgtaagtcgttcccctatgggatggaaacagtgtttccaccgggaccatggcctcacaaccgtacgccattgaaaatggcgagtggccagttgtggttcttggagcggtccggtaggcccatagcactcttggcaattcttcaggccaattgtttttgcaggccagcagctttttctttagggtgacctttaagattttattgacgacttctgcttg

SEQ ID NO: 109170 - DNA, 523 bp, Cannabis sativa
cacttttgggtccgatttctgcctttattccttgtaaaacacgagccccttaaatagaaattagggttgctacctttgaaaaagtcaaaaactggccaaaaatctagtatttcgcccctagtcgcgactacataaagcctagttgcaaccataggcaaaatacgaaaataaacttgttgtatggcctcctagtcgcgaccatggtcgcgaccatgaaaaagggtcgcgaccatggaaagtggggtcgcgactactgaagcaaatttgacagcttcagcatcttttagtaaaatgtgcataactttcacataagaactccaaatgagttgattcaagatgcgttggaaagaagaaaaagaaatctaaaacttctatgttttgatcttttctaaaatctgattaaaacatagtcaaattaaggcttgaagtatcggctttattttcttgcagaattttctctattctatagattgttgttttccgaaattttatcaatttatacattccaagtgtgaaacctgaa

SEQ ID NO: 109171 - DNA, 540 bp, Cannabis sativa
catacaagagaggccctaaaaaaccacacaatcagaaatctgaataagattgactcctggactatgcaaaattttaacttcaaaatcacgtaaaaaaccctgtgttcatatattaattttctataggtttattctttttctgtgtgcaatcattatcgtgagactcaaatatagttaatgaaaatctgcgttaacacataccactattggtgtaattaagtagcaggtcccatataacttaaaaaaataagatttaggaaatatcactaaccaattgtagagtgccacatatgaaaggtgttgggcaccacaaatgcccaatagcaatgctctttagttataattttgtgatacttgacattaaagtaatcatttcaaaaaaagatataaagtacacttttattaacaattaattaatatttttaataataaatttaaacatgataaaaagcaattgaaatattatttcaagtatcacgtacaattaattattattattatatcttatttttttttaaaaaggccgaaaatgaacatatt

SEQ ID NO: 109172 - DNA, 1021 bp, Cannabis sativa
ttgtagcaacttttttccccataagatcttcagcaaatccatgaacctgtatttgtattacatcatcagataagaacgaatctgttaaatatggtagagaattgaagagctagactgaaacatatatactaataagaaaattgaaatctaaacgtgaaactaacattagaaatagaatggagcagagaaaatgaagctgggtaagaatcacaatgtaatgattgactgctggttttcttctaatgaaacttcaattaaaaagaaaaaaaattcaaggctgctaatggcaagttttaaaggctgcgaaaagccaagacaaaagaaaaaaccaccacagtggtccatatataattttaaactgaattaataagttcactgcagaatctttagccattgttcataagttcatttactaacaagccagaagacaaagaatctccctaataaatgtcatgtgaaacgattaaaatcacttttggtacattcaaaatcccaatagatgatttcctaataggaaaaaattcaacaataacccagttatcaaaattcattatttcttaattttcgggtccaaattcatgaataaacataactctgttaataagtacctccattcttcatacatgaagaaagaaagaaagaaaaatcagacacccaaacacagagtcaagcaaagtaaaggaaaataaaaaggtagaaagagtaccccacgaataaggtgaggggaagtgagaaggcatttggcgctccatagaggatcgttgaggtccgcgccatggcgttcgagctctgtggcgagtccgccgtcgataacggcggcaccgccggacttcctgagaaactccgtcataagagatgtatccattcaacgatgaaacaaagagaatgcaaatgagaaaggaaatacaaacccaatacaccattgtcgatcgaagctctctctctctttactctgctgattttgtttctctctctagcttctgagaaaagcttctctccgagcaagtccgataatttatgg

SEQ ID NO: 109173 - DNA, 876 bp, Cannabis sativa
caaccattacatccaaaaaagtttcggacaatggcaaacagtttgacggctagtccttcactgattcttgtgcgaaccatggtatcatcaaaagtttctccgcagtggcgcatccccaaacaaatggtcaagttgaagcagtcaacaagaccctaaaggatacactaaagaaaagactcgaggatgctaaaggaaactggccagaagagcttcgtgaagttctatggtcgtaccgaacaactgagaaaacgacaaccggacaaactccatttgccatggcatatggatatgaagcaatgttgcccgtggaactcgagccaccatcccacaaaagattgacgtacaaccaagaagcaaatcacgtactccttgccgaatcacttgatgaagtcgaagagaagcgaaccacagcaaacttaaagttgatggccaatcaacaaaaagtagctcggcatttcaacaaacaagtgaaggctcagaagttttttatgggagatatggtcctaagaagagtatttctaaacaccaacaatagtacggcaagtgtactcggacctaactgtgaaggaccatatcaggtggtcgaagttcttgaatcacgagcatacaaattgggtaagtatgatgaaaaaatgcaactcgttttggtacaaaggtattggaatggggtacatttaagaaaatactaccaatagaagtaccaggtcgggtgaccatattaagtagtaaacaaaaagaacatttacttttacgtgaatggcttgttgggcgtaccacgcccaaaggtttggacaaaattgaaaagtactcattgttgggttttatgccttaaataaaactctatttcaatgtaatccattttattcaatatcaata

SEQ ID NO: 109174 - DNA, 876 bp, Cannabis sativa
  modified_base (26)..(35): a, c, t, g, unknown or other
atatgttcaaaagtttaattcccatnnnnnnnnnnttcactgaatttagactgacatgataatcggtgataaggtatacttacaccaaaaaaattaagagcagtccttctatatttttctatcttttgcataattaataaaagtagtatatttttttggatgtttcgtaatttatttagagttaatttatgaatgatttgcatattttaacaagattgatgttttgttatttttctattgatttatagttgtctttttgttattttatagttgtttttatgttgtttaggtattctatagttgttttataattatttttatgttgtttatatgtgtttcttttattgtacaattgtctcttagcttatgtgcattttttatcgtgatattttcaatttattttagagaatatttttgttgtatatttatgcatttgttttgttatttttcaatttatagtttttttttaactatcactaactcaaaaaagaaaagagaagaaaagaaagaataaagttgtgacaacaaattccataaaaaaaattaatctaatagtacaaaaaggtaaatcaagttattaaaactaagtaaaaaaattgtagtataaaaacattttgacgagttgatgttattttgcttattacaattaggtcaatgttttgttatttttctgttgctttatagttatatttttgttattttatagttattttttcttattttactgaaatacagtattttcataattttgaaactctaaaaacagtatttttgtaaaattagtatggtaaaaatgtaaacaaactctgagtcatagtacttttgtaaacttttcccattttacagtatattttttttaattccccctaattgttt

SEQ ID NO: 109175 - DNA, 634 bp, Cannabis sativa
aaagtatggaaaggttggtcttattttgtgatttcatttcattcttattcaaatatgataaactgaaaataagaaattagctctttggcatgtattaaaatggagaaaatctaagaacagtacccttttaacttagggtacattattccttattcctgtagttaggacagtgttaaacacctgacccgtcttaaatttacataatgtctatttacttttaagattatattttaactacttcatgatttatcttatagaaatgtattcaccttctctgctgaagtcaaaactaagctctaattatttgcattgataagccgttactgttttgttgtataatattatctgtgacctgcttataagggattatcatagttattatgtacattcttcattacagcttaaaagaggtcaattgcttacagtccctccttatctagtgaagagaaggaagcaacatttccataatttggaagactatgggattgacttgattcttggatgtaatggattcatctgggtaggggaacatgttgtgcctgcagatgatatggtggaagatcaaaccgaacaacaaactgtgaaatctgatgtaactttgacaagtctcgaagaacaagagcaagtctctacc

SEQ ID NO: 109176 - DNA, 683 bp, Cannabis sativa
caacctttggccaaccaccctgtaaccatcgtctgattgtgtaagtgatagtgtaagaggtattttggtaattaaaatcacataaaatgtataaatgttgatatattaaattatttagattgttataaatattaataattatgtggatatccaaatctttgatttattaccattaattgtaatcaacattcctctttttctcagtttccctttttcttagtttcttaatatttcactcttgtatttgtatatataggggttcaccccattggaataaacaactcaaaaattcacattcactttctctttctctcttcatcttcttcttctttcttctcatctattctatattatattatattattttataacattgatgaatatttttttatttttttctctatgatatattaaattatacttattttcaataaatgatcattcttcgaaaaaagaaaaaaaaaaaaaaaaaaacttgattaagaaacataaagaaataaaagagagtgaataattttttttaagattatataagcataatttatttaaataaatgtaataaattcactacaaaaaatcttacttttagtcacaataaattttacgactaaaagtataaaaattgtgactaattataaattattatttttatgttgtgactaaaaagtctgtggctaaaggta

SEQ ID NO: 109177 - DNA, 719 bp, Cannabis sativa
tcgccacctactaacaaaattgtcttagcatgtgtttctcgtgacgaaaatatgtcaacacatgaagttagaagatattttaatcttttatcattttttagatatttattttgaaatgtaatttttgtatttcaaacctaacttgaccatagttacgggaaggtgctctcgggttaagggattttaaactctaaattactcctagatgaaaacctatatatggggagtgaagtaacttataacagaacccaaattttgattctcacaaaatcactctcttgagctctcattctctcattctaaactcacttgaggagtgaactcttggagaacatacctctggagaactctcctcaaacattgatatcaataacaccccaagtggactacctattactgctgaaagggggtaaaccactataaaatcctcatgttcatctttgtcaaatgttctttcacaaatcagtttacttttattaactaatgcttgtgtttgtcttgcttctttacgatcttctttgatctactaacgaaatactaagtacagtgaacagaagtgttaataactacctaccatcatggtgagtacgagatggaagaaatattaggaggaagaccatggttgtcaaacccgctttaaaaaaaaaaaatagtatttaaagatttatggatagattaattgtatgaaaaataattatctatttattgttatgggtggt

SEQ ID NO: 109178 - DNA, 608 bp, Cannabis sativa
tcagcttctttatagcccaaaaggttttgtgttcaagctctaccggcaaatgacaagccttcccatacaccaatcgatatggggacatacccaaaggttttttatatgctgtccggtaagcctaaagagagtcatctagcctttgagaccaatccttgcgactaggattaacaactttttcaagtacacccttgatctctcggttagaaagtttagcttgcccattgatttgaggatgataggcagtagcaatcttgtgttagacattgtatttagctaacaaggcagcaagaattttattcacaaaatgagtaacttcatcgcttattaatgcgcgtggtgttccaaagtgagtgaaaacttacttttggaggaacttcatcaccacttttgaatcattagtgggacttgctactgcttcaacccatttagagatataatcctccgtgaacaagatgtatagattgccaaagatggtggaaatagcctcatgaagttaattccccaaacatcaaaaagtttaacttcaagaatgcaattcaatgccatttcattccttgctgaaatattgccaactctttggtaatgatcacaacttcttgcaaaat

SEQ ID NO: 109179 - DNA, 507 bp, Cannabis sativa
ggtgctgtggtgcggaatgaacatggcaaggtggttgcagcactttcaatgtcgatgaagggcaacttattgtcacatgaaatggaagctaaagcactattttttggcttaaacatggctctgcaacatcaattgccaataaattgtgtggaaacagatgctctattggtctctaatgctttaagagctcccttcaattcaatttcatcctttaatgatttaattgtagatgttgttagtcttttatcctttttcccaaatgtacatgtgtttctcatgtcaaacgtgatgccaatatggctgctcatgggttggctaagcatgcgttaggggtggatgaggcttatttttggttagagaatatccctccacctatttgctctgttgttgtaaacgaaattcttttctagtttataataacaagtatctttccctcaaaaaaaatttaaaaaattattaaaactgcgtgaagcgcgaatctattccctagttatttataaacattga

SEQ ID NO: 109180 - DNA, 647 bp, Cannabis sativa
cagtgagaccccgtaagagaaggcaactgaagtggtcattgacctttctgaagaacaaactgttgtggaccctcctgccttaaaatttactaagtccaagaattcccgaggaggaagttcggatggatccgagcaggcaaaaggtggatccaaactgatcagaagcgggtctgaacaggttaaggcccctgccccacctctagtattgcatcgggagactaaaagaggcagagatatgctcacccactatgtgagtcgatcagtccttgaggtgaacgagcagttggctcgggcggacaacaacgtgtctttggagctggtcatgggaggagttttgaaagagatttgatgggtaagtcttttctaacatttccctttcacttctccttaactagtttggattgtaatgtcttctttccgcacagattggtctgaagatggcttatgcctattcccgagctatatcgggtgctactaagaaccttgccatttcaaacacaatgtgaaaagaagtggacttggccaaaaaggatgtcgtggatgcccgggttaaacttggagctgtgcatatagagttgggagaagtcaataagaaactcctagtagctgagatcaaaatttctgagctgaccaaggagctgtaggat

SEQ ID NO: 109181 - DNA, 787 bp, Cannabis sativa
aatttcccgggtaggtggtaatcccagcaagtcttctggaaagacatcaaggaactcgcataccaatctcgtattctcaggtcctgatgtcacaggttggctggtgtccactatagtgactacgaaccccagacaacctctacccatcaggtccttagctttcaacaatgttattctcggtatgcgtgccccctgaatcttacccacgaacactgctgggttagcactatcgggctcaaacatcaccatcttccgcttgcagtcaattatcgctccatatttagatagaaaatccattccgaggattatgtcaaaatcagatagttgtaactcaattaaattggcggtcaactcacaaccgtcaatccaaaaagacaatgatcgaatccacctagtggatactatcaggtctcccaaaggtaacagggttccaaaccccgaagcataaatatcacatggcttatgaaaactttctataactctactcgatacataagaatgagtagctcccgaatcaaataacacagtatatgaacaaccattagtagacaactgacctgtcacaactgacggactagcatcaccgtcagcttgagtcatagtgaaaagtcgccccgggttctgagcagtattcttcttaggctcctctttcttagcctggggaaaatttctaataaagtggcccaccacgcaacactggaaacatgccttggctcgacattcaccaagatggtgtttcttgcatttaggacattcaagatacgatcggaatgaggacctgcgaccc

SEQ ID NO: 109182 - DNA, 1003 bp, Cannabis sativa
  modified_base (50)..(56): a, c, t, g, unknown or other
aagaataaatgtgtaatcaaaacttaccatttttacctcaatttccatannnnnnnaagctagacaactttcctttcaagtttagatacagagaatatggtaaccaaatttaaacaatccaaccgaaatatacaataaataataaaatatttttgtcaattaaatatgtcaaaaatagaattaacatactttaattttttaaaaatggaaatggaacctgtaacatcaaatgaacaacggaagtacaaaataaaaacagacaaatctaaaaaacaaaaaacaatcaaaaaacatataattaaataaaaaaataacaaaattatatgaaaactatcacaatatatgtaaaaataaatttccagcaaaaattgaacaaaaacacattgaaaaaaacttaatataacaaaaaaatctctacgtttaaacagaaacactatatcaacaaaaaagcaacaaaaaaaaatacatatagaacctagaatagaattgaagaaatatgaacaaaataaaaaatgaataaacaaaaaaacgaagaaaatagaacaataagttgaaaaacaatcagattgaaacccacaacataaaaagaacatagaaaaaaatcctaaacccaaaaaattaaagaaataaacaaacaaaataacagtcaaataaaaaataatcaacaacatgaaaacagcagatcaacaagaaaaatataaaaaaaaaattttaaatacctttctaggacgaacagaaacaaaatcatcatcattatcaatcctcttcctcttagctttcctagcatcaccagatgaaggctcacccacagcaaccacaactttggatttctgcgggttttgaagaagtttgagcaactggtttggatttagattctttaatagactttttttttggtttcttaggagaaggggacaatgaactcgaacgagatctagtaacatccattactcaaaaacaaggaaaaatcatagaaacaacaagcagaaaaaaaaaaaaaaaa

SEQ ID NO: 109183 - DNA, 707 bp, Cannabis sativa
gaaaacattcaagaaggctaggtcaatgctaaatgaaatctcattaccataatatttttaggccgaggccgttaatacttcttgttatattttgaatcgtgttttcattaggcccaacatgaataaaaccccttatgagctttggaaagggacaaaacccaacattggctagtttagagtttttggatccaaatgctatattttaaacaccaaggacaaccttggaaaatttgatgcgaaatctgatgtttgaatttttattgggtattcaacacatagtaaatcttatagaatatataacaatagaaccgatgttgttgaagaatctattcatgtttcttttgatgagactaacccgtctacaagcataactttagatgataatgttgtagatttgggagatgaggttcaaaaatttgattgaaagagagacttccaatgctccttcacaaactctgaaagaggaaccacttgtgaaaatggtaaatgaaagccaaggtatgaattctaaccttccacatgagtggaaattcaaaagtactcatcctatagaacaaattcttggtgatccttcttaaggtgtcactactagaaactcctttagaaatttgtgtagtttcatcgcttttatttctcaaattgaaccaaagaatttaaagaggccgaagttgatgaattttggcttctagctatgcaagaagaaataa

SEQ ID NO: 109184 - DNA, 502 bp, Cannabis sativa
atgcaaccaaacacaaacaaaggaatcaaaggaatgaaatgaaaattgttttctttccattcccttttattacctccaaccaaaggctacctaagtgattgagtaatgctcaagctacgagcatatatgaacctgttgtaacagaaattagcgttgtttttttaagcgttacatgaaacttaatataggtcttcttaaaattatttgtgatgctgcaatttttttatctcattttatttttaatttttttgtgacacgatctcgaaattaaatagttgattatttgatttgtttttctaattttaatcatgtctcgattgaattgcagactatattattactttaaaaaatatataaaatataaaacacacattaaattaatatcaagttattacgtgcaatgcacatatatttagttatattcttagtttttatttcgattatgtatctatattttactaaaagagaaaaatttgttaatcaaatcagagcaaatgctaca

SEQ ID NO: 109185 - DNA, 3279 bp, Cannabis sativa
tatctgcatcaaaacaaaaattaagggtaaggttaacaaatgagagtgagaacacaagcatgtgtaagttagggatcccatcacagattactgtcatagtttaaacactttcttgtatggttgagtgaaattggaccaaataatagtgatggagacacatgagtctgcctttatattacagtccaaagcttaccttgactctgttccctttcttgtgcaaataatttcgacgccagccagcaatgtaaaatgttaactgattaaacaaagctcctgaaaaataaaagatatatcaaacctgtgaaaaaaggggaaaaacagaagaaaatgtaacccataaaaagcagcatgtaacacatccaggcaaaaggaaatgaagaaatacctaataaccctccaatcacaccaataactgccattggcaatagctccctaatatagtagtcgtcttggccactgaaaataaggcaagttaaaattagaacaagctgaacagacacagtaatgtaagtatctgaagagagtaaagaacctaactcggaagtgtcccatattatgaagccacctgaaccaaaatgtccacattttccacttttacaccaccccattgcagtacgcaccacaacagctacaatggcagaagtgaagaagacacgccacataagtggactcctccaccttcaagaaaaaaaaaacagaactgttaaggcaccagcatattttaacttatcaggattacaagtttaacattgaaattgcaaaacataacattttcacaatcacaacttttgaaacaagcaagcacgtcaaaacgcatccatgaatgattacattaacagcacaagacaacccatgcagatattccagtccttacaaaagtcaggaaacagaattggcattaccatgatgttacttcttccaatgcaaataatacaccaccaacaggagctctaaaagcagcagcaactcctgctgcacacccacaagttaccttttcaaaagtcacaaaatctagaattagaatgagtatgatatggagagattcatctcaataatttattaatttgaaatatttcactatttaagtcatacaaaagaaacacgctaattaggtacaaaatttttgtaaaattaacttgacaacaaaaggaacttacaagatctctgcgatcccgatcgcttttaaatacttgtagccacctggaacttacatgatattttgtagatccaccctgagataggatcatatgtagaaaaactttagtttgtagtggaatgcgtagaaaatgttggcattaatattttttgttttaacatgcataagccttcctagcatgtatgttagccatgcattcaaaagtggttcttcagtttgattacaaaaatcaaaacagataacaaagaaaatttacacacagtgcatttccagaatatgtgcttacttgtccaagcaaagaagcaatacaagcacccgtatgaacaagaggaccttctttcccaagagctagaccacctccaactgacccaatacttccaaatatctgtgtatcaccagaaggaagaaaaaacaaaccaataaaaatactgaaaacatagaagtcaaaataagcacgagttaatagcgaaaggatcgtcgaacctttccaattaaggttctgaaaagcaggataccgtgagtatcaacccctgataaattttaaccaaataagatattaattagataatgaacaggaaaatggaaacaatgaacatattacaggggaaagaaaagaaaatctaacataccattcagataacccttgatttctggaataccagatccagcagctgctggtgcaaactgtgtaatgatatatacagaggacaatactagagccaagttgattaatatgtacaccacaaatccagctacatatgatttttgtattatagcaaatgtcagagcaaacttccagcctgcaaagttctcaacggaaatgttgatgaaaacagcggctagtccagtacctgaaggcaatcaatggaaatcaaatacatgattaaacaccaatacgatcgcttcctccagcaggaaaaaaaaatgaaatacagaactagaacaatcgaagatcattatgtttctaataataaacaatgacataatcatagtagttgaaggtcaattatctctgaccaatgaaacaaactaatacatcgttcttctttacacttactgtcaaaatatactagctacaattcgtttatataatctggttggttatactcgaggaacacatatcctctgcttcaacctccagacgactactcatacaaaaagtaactaatgcaaagactcaaactagaagagtgtcatgaaaagctatataatagaatgtatagagataacgccccaaaattaaggttcacgaaggaaaaaaaaataaaaaaagcaaaattcatcgacataccgatgccaataagcagtgcaaagaaccatttcactaccacataatatcccacaaaaagttttcctctttgagcctacacagaacccaaaacacgccagaaaagttaagaatcaacagggccgcaaacccacaaaaaggctataaaaaaataggcataattgaactcgaaccaagaaaccccagaaacgggacctgctcttcccagtaagcgtaattctcgataacttcatagtcaaggctctcgacactgttcacatcgctctttgcgatgccaagagcgtcggtttccccttcctccgcgttcggaagtctagaccacgccagcttggctgtctccatcccattctgcaaatgattcgacaacatcccgaattctaatagaaaacccctcacaaaaatcctcaatcaatccaccgaaactctaaaaggaatcggcgaagctcgggacttcttccagcacaaaatggaaaccgttggcgatacggaagttggtccgtacagcatctgatccgcaaaatattaatctcggaaatggcgaaatcaagaatcagaatccgaattggttcccaaaacacgctcctaaactggtccgatttgagtatcgaacatcaaagagcttaagctctgagctctgtcactgtaatgaatcaataaatgatgagaagactcacaaaaaagtccctcctctgaaagcagaggaattggggctattatcaaatgcgggcagactcacagttgttgagtcctctcaattgaaagtcagatcgtgatctttttccaatccaattttgaagagcgtgttggtctcgggagataggcccattacaatagc

SEQ ID NO: 109186 - DNA, 541 bp, Cannabis sativa
aagtggtagtattcctggtcctttatgttgatgatattttgatcattggcaacaatgtcatgaaaatgactgacatcaaggaatggcttgacactcaattcaagcagatttgggtgaagctgcttatgttcttggtattcaaatcatcaaaaactggaagaatagatcccttgctctctctcaaacaacttacattgataaagtgttagagagattgtcaatgacaaatgccaaaggggcacagatgccttctagattttgtatccgcctatcaaaggaacaatatcctactgatcccccagagacagaggacatgagaagggctccttatgcttcagcagttgggagtctaatgtatgcaattttatgcactagacctgacatttgctatgcagtaggaattgtgagcaggtaatcgacaaatccaggagtggaacattggaatgcaattaagcatattctgaggtacttaaaaagtacaaggcattacgtgttagtctacaagggtggtgctttaaatttcgtaggctataccaactca

SEQ ID NO: 109187 - DNA, 526 bp, Cannabis sativa
aatcatacagcaacttatcacacaatttcttcaaaataattaacttaggtttaagaaaaacttaaggaagaagaataggggtagttaccttgaattggaatcttggaactcaattaaaattcttgatattcagctgaaaactcacagcccccttactgcctagaaaaatcgagagagagagaggaagaagaaggttgagggaaaaatggagacttttctagtattttctagttttgttaaaaaataaaggtgaagggctcatttcaataaatggaatgttttaaaagaaatcagaataaaataaaatagaataaaggaaaaaaaagattaataattctcctctaattaatttctaataacttagcaaaaaggttttctaaggcattttaatcattgaaataacccaactaataaccaatattattaaacctactataatgccccggaataaaacaacgctatactatacaacatatgactctctaaaggcccaacgccgctgtccaccgcttccgaacaccaacac

SEQ ID NO: 109188 - DNA, 516 bp, Cannabis sativa
gcaagtagcgtacaggttggctatgccccagcactggcagctgtacatgatgtgttccacgtttctatgcttcggaagtatgtctcagactcgtccgacgttctgagttatgaagcgttagaactccagccagacttgacatacgaggaacaaccagtgcagatactcgatagaagacaaaaagtcttgagaaacaagacagtagcactggtgaaagtattatggagaaatagtaaagtggaagaggcaacctgggaacaagagacggatatgcagcagaaatatccggagttgttcaggtaaatttcaggatgaaatttctataaggagggggtaattgtaataccctggaattaagaatgtattagcaaagtcctagctagataattatgaataattaagaaattatataaataatataatttaatagatgagaatttatatgatttataacatgttaagacctcgttggtgagccaagggcattttagtaattttggcccgagaagggtaaaa

SEQ ID NO: 109189 - DNA, 515 bp, Cannabis sativa
  modified_base (29)..(61): a, c, t, g, unknown or other
  modified_base (203)..(203): a, c, t, g, unknown or other
  modified_base (434)..(461): a, c, t, g, unknown or other
aataaataatataaatgaaaattttattnnnnnnnnnnnnnnnnnnnnnnnnnnnnnnnnntggcatttataggattgaaattacgaaaaatagtatttgtgaaaatagataaatggttgaaaaatggtaaaaatctaactagtattgggcccacttcatggccggccactaggtccgaattttgctccatttttatcatttntttattccaaataattcaatcctatccctaagtgaattagtataaaaagaaaagaaaggtctcattatctaactaatgcaaatatttactcttgacctagttttcttcttgtcagacaactagtgagtttgagacttcttcttcttattttccttctaattttcaaaatcctatggcttcttcactaaacaaattcagcctttagtcattgagtgcatgcccacccatagnnnnnnnnnnnnnnnnnnnnnnnnnnnngactgtgaagaatccaaataactgaaggagtttcaggctcagatcttggtgata

SEQ ID NO: 109190 - DNA, 1904 bp, Cannabis sativa
cttgtatctgggcatgctgcccaatctgagtcagtgtaggcatgtaatttaacttttgtgtttgcaacaaaaaagattccttgtcaagggcaactcttgacatactgtagaaccctttgagttgcatgcatatgtgtgactagaggtgtggatagaaactgagtcagcttattcattgagtatgaaatatctgctctagtgattgttaggtactaaagttttccaacaatccttctatacagtgtttgatcagccagtttttctttctcatcttggccaagtttgagattggcttccattggtgtaatcataggcttacttcctaggtatccaaggtcttctaacacttgtagtgcagaaggtctttgggaaacaaagattcctttatcttaatcttacaacttccaaccccaagaaataccttaatttccccaagtcatttagctgaaattgagcatgcattatgacttttaatgcttcaagttcatccaagttgttgctggccaggatgaaatcatccacataaaccagtaaaccagtaggaaaataaattgccatcaaaatgcttgatgaataaggaatggtctgtggctgaatgatttgtggtctctgtgtagtttccaaagctacacttagtttgaaggggttgtcaaggatactaacatgttagttagttatccatgtgttagttaggtgttgattttacttgttatacccaaaatccagctgcaattcagaagttgacacgtgtcctgcggtggaatatgaaccacctgatataataaagttatatcattaaaagaaaaataaaataactcgttataaaagtttaatagaaaatattaacaactcgctgactatatagtattaagcgagataaggataaaaaattattaaaactgatattaacgagacacgcgcctgccttggagtacatagtcaaagaagatatttatttattcgtagaataaatacaaacatacatggtaacctcgaattacatatagcgagacgacacttcacgatcataactcaaataaagagacataatgaggcaaactatctgctcacacttagcattttttccacatcacgatggacaagggagataactcatgttaagcgagatacaatcgtccaaatcagcattaatcatcgaaaaggataagaacaaaaggcagtgcagttatcaaatattatcccacatgcaattaaacaaaacgtgggaattgttcctgtttcatgaacaattacatttttaaactgatcccaagaaaataattgccaacctatattcctataaatagagacagattccacagaaaaagggacgaagaattttttagagaagaatattattaattttatattgtattctgtactcaaaataccattaataagaaagactcatggagtatgcagattttaactgcaaaaccacgtaaaaatgtctggtgttattaatttcttattatctgtaatatatttattattacgaaaaggctcattaattttttgttaacaaaaatctacgttaacattactgttacaaactgtttgtatataaatacctttttttgtaatcaacactaatacaataaattatttcaatctctcttttaactctgtttctctcctttctctctattctgttatttctgttattgtccatatcgttacaaatactatgatattgacttgtattaatagattgtgtaaagttataatatatgttcaataaactcgaccccaaaaccaactatgggtcaggtctgggtctagggtctgggtccgagtctcggtttcgggtccgggttaggatcccggttatggtctgggatttgggtaaaggtctcagggttggatcaaggtttgggcctgggtcccgggttcggattccgagt

SEQ ID NO: 109191 - DNA, 1281 bp, Cannabis sativa
tttctttattatggtagtttctttttctactttcgtgttaagcattttcatttttcttaatgattgacaacatgaaaaaaccaaaagcttggtataatggaaaaactgttaacgcttcactatgcctttgtcttatattccaaatttatcaactgttgatagaattgacacagatttatcaacagttttggtgtgtatctcaatctttaattgctactttttgatgttaatcagatttattttgcatttggagccaacttttaagttagttttgcttgaaattatggaattttttttatggattattgtatggtcttttttgaattgccatggacttttaatgatttttatgatattccaaaacactctattgtgatcttgaatttcaaaaatggttttattggggtgatgtaggaaggtgaaactataaggataaatgtgaagcctaaaccgacgagtggaactgggatgctatcagcagctgggcttgcaggtccaggaaagccgaaagcagcagttggccttgcaccgccgccggggactggaaaaatcaggtctccgttgccacctcctcctaatgatcccgttgtggctcgattggcttcccctggtactgctagtgctgctcaaggtcttggttttaaggctactaaggaaaacaccaggagggatagtgattctttatcagatctttctccacttgaggtatgattcttactatttttcttttgctatcaatacaaatgcaaatgctgtagatagatagtagaactagttatacccaattggtgtttatgaatagaattgtgcacattcttgctttttcaatggcgaaagggttggttttggtgctgctgtaatattttgttgtgtataagccaatgagttgatgaaatattgttaaattatggatacaaatgcaaatgctgtgtagactgtagaattagtcaatggcaaaagggttggtttttgtggtaatgtaatatttcgttgtgtatattggtattgtttaatgtgggctctagctttgatttttgatacatttactgctagagattgtgttgatgggattttcacttagttcagattgcattgattttagtattactataattgtggcttgtattggaaaatgttgtgttttgttctattagtttagttttagaagaactttcctgcaaaggaaaatatagtacgatttcttattggaacatgatgtgttttcgattgaagttctcttactcaaattgaactaaatctttatatcccttttttctcgaa

SEQ ID NO: 109192 - DNA, 737 bp, Cannabis sativa
tctttggttgattccttagagtcatctttcttcttcgtgctagagcctcctggattgtcagcctttatcgagacggtgattgtcgagatagtactgggtttacctctacagccagtctttaacaacttcaactctatccttgcttcctcttttcgaacaaacaccaaagttctctcattgaactcgctgctgttttttactgggcgaccctagaaatcatcccacagtttgcctctagccgtcgagagatcagtcgtgatccctgcttgaagagcagtaagttggatactgtcattcaagtttctaactctagtagcagctgtactgaaacgacttaagtaagccctaagcgactcgcgtggatgttgatttatgttagaaagagaggaagcttcaggtcgtctatccctagcagcctgaaactatttcttgaaatccttagacagttgttcccaagaagtaattgagtgatgggtaaacttattgaaccagctactcgttgccccagtcaacgaggtggtgaataaaatacaacgtaagttatttgagatattagtggcttgcattatggtattgaaattgttgaggtgagcgtctctgtccgaagtgtcgtcgtacgacacgacgtgagcgttttaaaatccttgtggaaattcagagttcataatgtttgcatggaaaggctcgagttcttcatccgagtcataaccaggcaattttccatattccccatcttg

SEQ ID NO: 109193 - DNA, 579 bp, Cannabis sativa
  modified_base (235)..(248): a, c, t, g, unknown or other
ggtaaatactatttcggaccttgtcttttacaaaaattaccgattagaacttctgttttcttaagtaacaaaatggatcatgtattattcagtaaaaatagaatactgagctcaattttagacaattttctttcttaatataaccaacttgaagataattcttaacacgaacaaatatagaaaatgtaaagaattttgtcataacacctttagatcagattattattaaattttnnnnnnnnnnnnnntcagttcagggtcctatttgtaccatttttaaaaaatacatggtccattttatcatttaacaaaatagagtctaattggtaacttttacaaattaaatagggtccaaaatggtatttacctcaaaatatacttttgattaagtaatttaaaataaatatcatgttatatattaattaaatatcaaaagattgaaattttaaatatctattaactataatatgaataataaatattttaatttttataaaataaatgctaaaaatgaccatagttagtgtcattattttttctttaaaaaactgctattatcaccgtaaaagatatagggtg

SEQ ID NO: 109194 - DNA, 541 bp, Cannabis sativa
  modified_base (444)..(456): a, c, t, g, unknown or other
taaatcaaatataattaatcgtaaattttgtttatatacatacataatatatcaatcactatatataaatctatatctatatatatagagaggagagacataaagcagcgacatagtactctaaaatttctttaaagctatttttcttttctctctttaattttctcatttttttaatttttaattcatataaaattgctttaaaactatttgtctcttttctctttaattctctcattttttaattttaattctataaaaaatacaaaaataattctataaaactcaaattatagtaataataatacaatatacaatcttaacgtttttgacttttttttaaaaaatattataataataatataatataaaaatgataactctaatgtatacgtttttggctttttttttaaaaaaaaaattaagatataataataataatannnnnnnnnnnnntaataataataataaaagaatcaactgcgtgatacttgaaataatatttcaattactttttaccacgtttaaatttttcattaaa

SEQ ID NO: 109195 - DNA, 634 bp, Cannabis sativa
  modified_base (39)..(43): a, c, t, g, unknown or other
tggcatagcaagaaacaaaattccatttcattgtccacnnnnnaagctgagtacattgctgctggtagtttttgtactcaattgttgtggtcaaaacaaatgttgattgattatggttttgaattgggtgttttaactattttttgtgatagcactagtgccataaatatttccaaaaatcctgttcaacattctagaacaaggcacattgatataagacatcactttatcagggaacttgttgaaaataaatctttgtaattagaatatgttgatactgaaaaacaattagcagatattttcaccaaggccctagactcaagtcgctttgaatcccccagaaagtctttgggagcttgcattgtctaatctctcttgttcatatctttttgtacaatattgttaagtttttcttttctagcatttaatcttctttcattcaattttgacaaattatgtttatgcttttgaattataattagataggatctcattcttatcatactgtttgacattgagttaaaaggtgcatgttactttttatttgtgcctgggattaaataatgatcttatacagagttgagcgatttttgtttcagttgcttgtcaggccccttgctggaatagagctacc

SEQ ID NO: 109196 - DNA, 10613 bp, Cannabis sativa
  modified_base (292)..(299): a, c, t, g, unknown or other
  modified_base (10165)..(10178): a, c, t, g, unknown or other
gtgtacattgtgtccacgtaaacattccaccatgacagttaacagctaaaaatgaatggaaatattaaactgctaatagaacacgaatttatggggttttaccacaaaaattttagaattttgggttagttgcaaaaatctgatcacttaaggaggttatgccacaaattactcatttttagtcacaatacttgttgtgactaaaactaaattagtgacagcttgtgtttaaatgatatgttttagtcacaaataattttttgttgagactaaaagtcatatttagtcacannnnnnnnatattgtgactaaaaaattgtcatcaaaagtagcaattttttgtagtgagaagatctaattggtaacttttgcaaaacataaaatctaaaataatatttaccctatagtaaacttgaattctactggagacccattaattacaaagaaaaaaaaaagatttcttttagtaaatatatatttacatattgttggtaaattttctttcagttaggccaactaattataaagtaaaaaaaaatgttgtattttgttttctccatgtaatgtagggtgtaatgattaaaaaagactaatccaagtaatgatatgaatattgttttgtttaactatttaaatgataattagtaattgattttttgttttcatgcataaataattggtccaatattttccactattgatgaaagtgtacacgcttttaaaaaatgaaactataacaaacacggctatcgatccaaaattaacaaagcaaaagaaatagtcaaaatgaaatgaagaaaatggaaaagagaactattgaagctttgactttgtgtgtatatataatttagtgatgagagtgagatgtatatagctacaattcccatgctctcttctcatttcatttcatttcatgatctaattatcagccccactaatccactactactctcttctattattctattctattcactcatcctcttccacctcacttcccaccctacaccctatataaatatatattataaaaatattatttgggattgcaccatctaatttattttactggtgaaattatatatccaattatacataatttattttaatactatagaatattattagtcatttatacgacggtctctaatgcatggtatataatttatgctaaatttaacaataaaaataaaatcaatagtatatttactacaatatttgttattgtactctaatgcacaataacattttaaaatacaaattaaaataaaaaagtaaaataatattaatgatcatttataaattaaatatttgaaaaataattattgataatattgtaattaaaaagtgtttagtataccatgattcattaatgataaatgatgataattaaaaagaacaactacatttattttttagagaaaaaagtttatatttattatgtgtcaaatttaacacactattttaaaaactaatttttttaaaaatactaaaatataactttataccactaatttaatttttcttaagagaatagagatgctgaggttattagtgccaaatgacaatgcttgactaagaactattgatgtcaatcaaatattataaaagggtgtgtttaaattgaaagaaataatccgatctgtcgaaagaaaaaagaaaaatacatcttatttacccttattatgactaataaattaaaatattatcattaaacaaatagttatttatcattaaaatattatatcaactagtgtgtattaatcaagattaagttgattttttttagaaaatgaaaatatgcattaataggtaaatagaagaaagtcgattacgtaaagttcaaagaacaaatttattaagaataagcatactaaatcatttacaataaaatacggtcaagcatcaaaaaaatatgaaatatactaaattttcaaatcaaatgagcccataacaaaatccacatatgattatgagctaatgatctttctaacaaaatttaagacataataatctcgttatttaaattataaataagagaaataacatgtccaaccgtattgaaatgctctatcaagaaagattgaagcacagttggccaataaaaatctgaagatctcccagatctaacgctcaaagatagagatcaagacatccttgccgaagtgatttggatccatattaatgatacaccaacaaactaataagaaacaaaactagcatctctcaccaggaaaataacaaaccctattaatctaatagggtggtgaatatttacccttattagaaaaaataaagtaaccacaaaattaaaccaaataatgaaaaataaaacaataaaaagtgaaacaccaccgcacaaaaaagagcccagcaaacccaactcatcgcccacccactcaacactgataataaacctagaccaaccctctatctcaaaactccaccacaacagccgcacaaaacacactcagacaccactccccaccgaactcgtaatagatctacaaatccaaggggagtaagatccaccaatcaactggtctcccacccattgtatagattagaaagaaatcggaagctagggcattcaacaaatttgaagtagccatccctaacttggcacgacttcgacggacatgcagaccaccaaagaaatagagaaaaggaacccaaaaaaaccaaccagacaatgagcaagaaaattgccttcatccgatgaaacaacaacctggccgttccaagaaaagtgagacaaaaaggaagaggaaatgacctccaattgaacctcacgataccgtcactgagaatactattgtaacgccttactagtttaggcacgtccctgtattttctaaattacagtgttaacctttactaatcaaaggattaagtgtaaaatcgtgtttaacaaaaacttctacaataaacataaatattaataattatataaatatatgaagtttacaaacttcgaatcccgaatttatttttcaaaggtttacaaaatagtatattaaaagtgttacccaacgactaacaaactgagcccatgctatcccaaagatctagacactccaggtctaaccatctagatatgcacaatcttcattgagatctagactcactgctgtttagattttaccttgcccttacctacacaggggaaacatatctgtgagttgacagactctgtaagaaaagtataaaatataaacatatttgtaactaggcacccatacacctaattacaaagtcttaaacctgcgtccaatgcgtacgagtcacgaatgttcgtgactatagtacgattgaccataataccacatgtactcagcacccgaaagtactagtgttagtagcattaatccatactatatgtataactatccataataccacatgcactcagtaccccgaaagtactagtgttggtagcaccagttcgtgctccctaaaagcacaaccaaccataatactacatgcactcaatatcctaaaagtactagtgttggtagaactgattcgtatttcttaaaacacgtatgctaagcatgtacatatatatatttgttatattaatcttaccatactttcataattaggtgtgtcagtcaacttgagtgaaaactatactgctcgacgaaggctctaaatcacaataacgtaaaattagtaagtgtctcgctaaaatactttcaaggacaaactcaaaatcagaagttttcctattagtgaacaatatggcaataccataaatatcgagaaaacgtaaaaattggggtgctcaaaaatcaccccaactggttacctggatccccaaacggttcaccatttataaataaaaaaagtttaacttgtcttaatgcatgtgctggagcttagcaacgaagtgttagtgtatacgcactatgctcgccatattacacaacagaatattggaggagcacatatgaagacacaattataccagttggtgacgataatgattgggaattacttgatgacataaagaacatgacagttggagtgcttgttgagaagaaactagtagggcgaccgaagaagcaaaaggttggaagaattaagtcaaattgaactccttgtaatggtgaaaagattgtgatatgacgaaattgtagcaattgtagtggtaaggggcaaaacaaaaattcttgcaagtactgaggttaaaaattcttgttgatttcgtattttatgtattcttgtttaatttttgttgatctttgttaaacattatactatggtttgtggcatgagcaacttttgaacttactgcacaatttttttttttttggaaaaaataggaggtttgatgccatcctatatgggtccgatggtggtctgatgtcttatttattcaaaacccataaatactcaatattaaccatcagacctatatcaaactttaacgtgaaaacttaaaaaattcacaagtgataaaatacccatatagtaccatcagacctatattgggcctaacagaaaacccaaaaagtcaatattttacgatataattgttaggatatgccctgaaaagtctgtaaagatatttctgattattaaataaagagttaaacatttaatatatgtgtaaatgttaagttattaatatttattattgaataatttatattaaatatcgaaaaattatttattcatatatgatgttgtggtttgtagctgtacttgtagctgtacaaaaaatacaaaaaactaagaccaaaactaagaccacttagctatgaataaaacagtcagtaacatattaaagttatgaaatttttaattaatgatttctagtaaggttcactagtgcccattcttcggtgtaagtaatcttggttcagattacgaatgtagtgagacatcaaagtgaaggtgttatatatactagagattatatatgacaaggaccgatatgaataaaactgtctttattaacatgccatttatcataaagacctaattcatatcataacaatgatcaataatagatcagcctaaatcctgagttatcatgaactcttactcatgctattagttttttttgattcactcgttaaagtttctcaaagaagatgattcttacaacttatgttttggaaatttaataattggaaacgtgatgtacaattatggaatcctaactttcctaacagatcaaatgttggtttcctttaagtgttatttctgaaacttgaatattgtgcacaaattcagatgagatcttgaattatactttgctagtgaattaatggaactaaatgataaaaaaataattagaaaggtaaaatagtattttgaccaaaactaataatgaaccaacacatggagggctaaccactcgaattgattatatcaatgaacactgcagttaaactcaataaatataattttataattactaagagtgcaattctatatttatagtagagtaatcatagaattaataaataagggattatttggttaataaggctcaataaataatctcgtttattggagtttagaattataggtccatgatccctgaatcactacattgaaacactatcaacggtaaagataaataaaaatttacagttaagtttggcaggtaaaactggacacttgacatactagctacgtaataataaataaacaaataattaaatatatctctacatataatttcgagataaacatagattatctcttctagtaccagtcaaacttccttttgtttttgtttttgttttttttttttctattaattgtagttagaccaggttggtataaacatgcagaccattataaaaagaacacgccaaaaaataaaaggtgaaacttaagcaaattgggcatatgggagaagagagaaaataacgaagaaattttgatttagcttaggaagtttctttgaaaccaaacattgggtacaagttttttctttttcttatttaattttgtatacttagtcagattccagaagagaaatggggtcttaagcatttaaatgaaaagtctttgaatatttgatttgcttcaaattctttaaagaaaggagttagctcgaaatcctcaaaagaaaaagaaaaagaataaaaccaacattgcaagagtaacaagatttcttggaatttaataattcaagaatttgggtcctcttggttttttttttttggtaaagttcagtcttttaatattttttagtttgttgttgtagtcttacttcatcatcttctggtttgataagtgctttctttcttttcaacattacctaacctccacaatttctttataaaatatactatatatatatatatatatatataaataacaaggatgtgttttatcttttgggttctctttcttgtcctatattgatgtcaaagcctaagcctttttctctctttcttttcctctcttgaaaacaactctctttctttctggtatgttgatctctatctgggtttcttctcaatttcagattcttactgggtttttgagcttttcttctgcttctgcttgaacctttctctattctaccaggtaatattttgtttcttttcttctctgtctctctctcttgatgctgtgttgttctgcatgttatggtgtatgtactctgttggttggtccatgatttttctgggcaaccttcttaatttcaagtcctgttttccctgattttgttgattttcctatcgtcaaaagtcaatgattttctctgctttcagtctaggcaaaaaaagggtttttgtgagaaataagaaggggtttgaaatttcagcactttattcataattaaagtgtgattaatgaaattctttgtaaatatttctatagatttatcaaagcttgttatttataattatgttcagcataattgtctaatcatatcttacacagttagttaaatattagcgtaacaacaaactagtttgattcaacaaaatactttatattgatgttattataataataatcatgcatgtttatttcttgttataatccttgtgttcttttgtttttctggtttagctgcaggaactcttctcttaacgactcaagcaaagtttcagtaagtttctttttctagcttcaacattattattgttccttacttgtcttgtaataagttaagcagagtaatttcctttcttaacatgtgttatagtttgttggtgacacagaattgaaggttttttatggtagaattggtcttccgaaaactctgaaatagaaacaaaaaataagaaagaaacataagaagaatgtctttagttaggcctgcagagctatctgctacttcatatagaaaccccaagctttactcattgaagggaagtagtactgatagctctgctttctcaacccaaacctttggttccgaaaagcgtaaaaccttgtatgtaaccgattcctacagcaatgagagctatgagaagtactttcttgattccccaagtgatgagatacaacagccctcttgttctagtgcttctgggaattcttacaaccctcaagatgcctcgtgttaccagcctcgagctggatcatcggtttctcatttgaccactcataataatccttgtgatgcttctttcatgtccattggggattttgagtcagattacttggaaagttcaagtcctgaacttggtgactttgacaaaagcacaatgaggttgaagcttcaagaattggagagagtactccttaatgataatgatgatgataatgatggagatgaagacatggaagttgatgttgattgggttggtcctgttcagagtggattgcttaatgattcgcccaaggagtcttcgtcgtctgattattcttatctgagcagtatcagcagcagcaacaaagaaatatcgcaagtttctcatcggtctcctaggcagttacttatcgattgtgctgctcttctttcggaaggaaacataggagaagcttcggtcatgatcaatcagcttcggcagatggtgtcagttgaaggagagccatctcagaggattgctgcttacatggtggaagggctcgctgctcgggtggcttcctcgggaaagtttctttacaaggccttgaagtgtaaagaaccgcccacttctgaccgtcttgcagcaatgcagatcctattcgaggtgtgcccttgttttaaatttggattcatggctgccaatggcgctatcatcgaagctttcaaggatgaaaagacagttcacattgtagattttgacattaaccaagggagtcaatacatgactctaatacaaacaattgctgctagtaggaaaggtaaaattccccaattgagattaactggtgttgatgaccccgagtcagttcagcgttcggttggtggcctcaaaatcattggtcaaatgcttgagaaacgagcagaagatctcggtgttccatttaagtttcaagcagtggcgtcaaggacttcacttgtcacgccttcaatgctggactgtcggcccggggaagcactcgttgtaaactttgcgtttcagctacatcatatgcctgatgaaagtgtctcaactataaacgagagagatcagctccttcggatggttaagagcctgaaccctaaactcgtgacggtagtagaacaagatgtgaacactaacacttccccctttttcccaagatttatcgaggcctacaaatactactcggccgtgtttgaatcactagacgcaactcttccaagggagagtccagacaggacaaatgtcgagagacaatgccttgcacgagatatagtgaacatcattgcctgcgaaggagaggagaggatagagcggtatgaggttgcagggaaatggcgagcgaggatgacaatggcgggattcacttcatgtccaatgagctcaaacgtggtcgattcgattagagaacttatcagacagtattgtgacaggtacaagatcaaagatgagatgggagcacttcttttcggatgggaagacaaaagtttgattgttgcttcttcatggagatgatgatgatgatgatagagaatgacattttggctccataaagtttctgtcttttctctttttttcatttttttcttcagttgggttttgtaattttatatttttgtgtgggatttttatgtatgcatgatgctttctgtgtctgtcatatgtatgtaaatccaaaacaaaaataagtaacttctaatcacctaacgttaatagatttggctcagtacttgtattacacagctttgagctttgcattatctttcttcactttgttttgtcgttttttttaaaagttctaatagttcagtttatcatgtgtagaagaatcaaccttttctaaatgttttatggctttttttaaatgtctcacttatgagacaaggttttttttgggggttttgaaatctatcgtttagttaagcgtaatcgtaatcgttatcagaatgaattaataggagaaatgaaagagaataaaatgttctgaaatcaaaatttttattttaacatgtttactatactgattggaaacggaattagaattattttattttctttttatcaataagaaagaaaatcaaaatacattaatttgaccatattacctttcatataaaatttatatttttcttctatttattaaataaattaatttatataaacataaataaattcataaataattacataaaaaaattatattcatattattcaattaaataatatatgactaaaccataaataaaatctccttatgataacgttttaatacgtaacataaacataaatagaaacgcagatatctaataattataaaattatgcatcattttgcaacatattcagaatatatagtactttcatctatctcatattgcataaaaggttcattagctaatatgttggttgcttgaatacattacattggagttagctcattaatcatgtttatttctgtgaataaattggtttgcatctcaactacttatcagatattgcatcaattaatccttaaaacttcaagacaatattagatataaaattttccaacgtttgtagaaatatcatccataaccttaattttttattcttaccacgttattggttactagtagtactcccagtggatttacgacgcatattaattggttgttnnnnnnnnnnnnnnccatcaaattcatctatttcttcatcatccccaccaccaattgtattataatcaactccgaattctacaccagttgtatcattttagcttatattttcttcatcatcatcaacattaccagcatttgtcctagtagctcgatctcgtccatatatttctgcaagcttgttgtaataagaaaatggtttcccatataatccacttgcatctttttatttctgtacattcacaaaaatatatacatataataagtccacgttgtaaatataaatgtaaatataaatatatataaatatttgtactataaaagttacgttatatttaccttcacatattcattaaagggttttttcataattatacaacagaaataacataattacaaaaaatgtgcaagaaaaaattattttaaaaacttatacattttgaaaactt

SEQ ID NO: 109197 - DNA, 1036 bp, Cannabis sativa
  modified_base (80)..(96): a, c, t, g, unknown or other
tgtaaggttttcttaacccttatgtgtttattttattgttttagagaattcatagttaggatgttaattcaacatacttnnnnnnnnnnnnnnnnnctggtaaaatattcccaatagtttgcccttaatcaagccgatgttgaagctagtccttcagtagtaaaatgtcaacttctagtcaacaactcttttttattctgtattatttgattctagagacacacattcctatgtggcgcccagagtaattgataagctgggtaggccatgtgacagttatgaaataggatttagaaccctgctgcccagcagagaactagttatctccaaaagattgattatgtttatgccaattagaattacggatagataattgagtgttgatcttgtagaattggctatagtatagctcaatattatgctatgaatagtctttttttatctaaatacgccactagtattgattgtaagcgcaatatggtaatttttcaacctgagggtgaagaactgttcatatttgtgggatcaatttggggtttttaaattcctataatctcagtgttaaaggatagagacctattgtaggagggatgcataaggtttctagaagtattgttagataccacccgatccgagtaaattcaacctaaggatatcaaagtggtacaagatttatagatgtgttcccagacaaacttccaaggttgtcgtcgcaacgagaaatagattttgtcattgacataacacttggagcggacccagtttctaagatatcccatagaatggctcccactaaactcaaagaattaaagtttcaagtttaggggatgctttatttatatcagacccagggtgtcacccttgggagcttcagtgttgttcgttaagaagaaagatggatcgctttgcttgtgttttgactaccgagagctgaaaaagttaatgatttagagcaagtaccctctacctaggatcgatgatttgttcaatgagctttagggaaagtgttaaatgccaaaatattacatatttcata

SEQ ID NO: 109198 - DNA, 526 bp, Cannabis sativa
taatagtaatatttaaaaaaaaaaaattaaatgaaatgaatggtgtactaaataataatgttggaacatatagagtcaacttttggagttgtttagtattgaagtattttttagtagaaagtgaccaaaaattataaaaaagacactactacaaaagaaagaatttgtgacggtcctaaaaacgatttttttagggaccgtcgctaaaaaaattaaacaactgttagaaactatcggaaaaaattagtatttccgacggtttatagtagtgcctaaaaaaataggcgacgtttttcattaaaaacgaaaaaaaaattaaggggattatactcgacggtttaaaactgtcagctatattataaatgacgattttaaaccgtcggatagtccacattagcgacggtttttaatcgtcgcctattctgtctgttttgcaacggtcgtataggtgacggttatagaaaccaataggaatactttaaacaactatttaaaaatgttggaaaaaattatatatagtagtgag

SEQ ID NO: 109199 - DNA, 824 bp, Cannabis sativa
  modified_base (27)..(36): a, c, t, g, unknown or other
  modified_base (168)..(171): a, c, t, g, unknown or other
taattataattattaaataaatagttnnnnnnnnnntaggattgaattggaaaatatggtattattaaaaagaaaaataagtggctgaaataaaatgaaaaaatctaactagagactggtccactatcatgtacgaccattaagttttttttgcccaatattttattnnnntttaatccatataattcaaccctaagccctgttgaaacgctattaaaggaacatgatgctctcaatttacttttaaaaaaaacttaattcaagactgagatcccttgggacctggactcagactcggacctagactcggacccagacccagaccgggacccgggacgcggacctaaactcagacccgaaccgggacccggactcggaccgagacccgggacccggacttggactgggacccgggacccggatccggacccggaaccgggctccagatcaagacctggacctgtacccggtcccagacccaagaccttagacctggacccggacccggaactgggctccggacctgaacccaaacccggacccagaactgggttttggacccaaacccagacctggacccgggacccattctcggacacaggaccccggaccgggactcgggacccgaacctggacccggacccggatccagacccagacccgaactcaggacccgaacccggactcgggacccggacccgggacccgaaacccaaacctgggactcggacccggagccccggacccggacccaggtcccgggacccgagagccaaactcggacccgaagccagagccagactcggacccgaacccagacctgg

SEQ ID NO: 109200 - DNA, 549 bp, Cannabis sativa
  modified_base (299)..(301): a, c, t, g, unknown or other
taacccttggcgaccagtcttgctttaaaagttttgacttcgcctccagtgcctcttttcttcttttagacccactcacatccaattggacgttagttataaggtgcatctacatattcccaaactttgttctttttcatggaatccatttctgaatccatgctgactgaccattgtttttgtttgggacttgccattgcctgtttgtaggttaatgggtcatcatcaataccatcaccaatgaccttattgatttcaccatccaagccataatgagatggtttagtagaaaccctccnnntacgacgaggagcggtgaccttctgaacaggaacttttgtggtagttctctcagctgtaacatcttgtgttgtttcaactgagggagtgggattatcctctactcgagtagaagaggatggaacattacaaggtgttatacctgaaaccatttcttctaacgcaactttacttttcggcttgaagtctttaatatagtcatcttcaaggatggtagcatttgtagagacaaacactttgttatccttg

SEQ ID NO: 109201 - DNA, 728 bp, Cannabis sativa
ccctagcactaaaagaagaggtagaaaagctgtgcaacaacaatttcataattgaagctttctacctagcctgggttgctaatcccatacaaatacccaagccgaacaaaaaatggtgagtatgtattgacttcaccgacctcaacaaggcgtgcccaaaagactgctttgcacttttaagaatagatcaacttgtggatgcaacagtaggaaacgaaatattaagcttcatggacacatattcggggtacaatcaaataaagatgcatccaccggaccaagaacatacaagtttccgaacagatatgggtctgtactgttataaagtcatgccatttggtctcaagaatgttggagctacataccaaaggttggcaaataaaaagttcaaagaccagatcagacgaaatattgaagtgtacgtggatgacatgctcgtcaaatccaagaaggctaggggcatatagatgacctaaacgaatgcttcaaagtcctcagcaagtacaacatgaaactcaatcccttaaagtgctccttcggagtcagcttgggtaaatttctgggctttatcgtcaatgcccgaggatttgaagccaatccagagaaaattcaagccctcctggatatgatcacaccaacaaaaaccaaggaagttcaaagtttgactggtcggattgccgcactcagcagatttgtttcaaagtcaacagacaagtgtgttccattct

SEQ ID NO: 109202 - DNA, 1028 bp, Cannabis sativa
  modified_base (956)..(956): a, c, t, g, unknown or other
tacaaaattaaaataaaaactttaagagtaatttgctgcaaaactcctctaactatcaatttacttgcaaaaaaccatccaaccttaaagttttttggatggttttttgctaaattgatagttcggggggattttgccgcaaattactcttaaagtttttattttattttgtaaaatatgactacataggataattttttagtaacctgtcattgccacgtgggtaaaattaagacttaatgtggctggacagacgtcaccttaaaaatgtaaacggaacagtactttggagagttttcccactaaaatatgaggttagatggttttttacaagtaaattgatagttaagggattttgccgctaattactctaaaaaaaaataataaacaaagtaagcattattagcctcctctactttgtctcaattattcttctcttcagctccatgataatttttctttcttcgttttgtctgttaataatggcggccttattatttagttttgatttttcaaattaatctaacattgacgaaaacttttttatttttatataggtgagtttgtatggagaccgggtttattcatagtgtcaattcgtaggccaaactatatgtatatataatctcaagtgttgaaaaatttagttgtgatgtacatatatagatagttatatgcataatttttttctatttaagtttgaagttagatttgataaaagaaaattcaaaaaataattttatattaatgtcaattatattatgtgatcatcagttacatttttggattctcatattgaactaaattcccttgtaacaatgtttaatttaattttttatattaaatattattatttttaaaataatattgtttatttaattaaattatgaattatattatctatatcataataattaaaattacttcaacctaatatatatatatatctattctanataaagtgtgtctatataaccgaattcttggtttatgaaaaattcatgggtgacttcttatttatattaaaa

SEQ ID NO: 109203 - DNA, 559 bp, Cannabis sativa
tcatccttggggatagccaaagttgtagctgtagttctccttattacagccatggtgattgatcagattgatagacaacgttcttaatgaaagtaccaaaatattgaccacatatttggtcaactcacacgaagttttatttacgatcaaaatcatcacgtgtaagcaattagaataagtaaataaatggacacaacaattttataaaggttcacccccttggttaccaggtaacgacctactccacttttagttgtattgatatgagagataataccactcagataacaagtgttgtgagttctaaagtggctctctttgaattacaatagtgagaatgtaaggcagatctcaagtaagtgagatgagagagacttagtctctactacattacaagtggcgtgtaggagagagagctaggatttcgagagcttgatctaaagagcttaggaatgaaaacctagcacttaggtttagcctagtgctctttatataggagcgagcttacagaagatctaagccaaagtaggttgatatcccttaaaatgaggagatatca

SEQ ID NO: 109204 - DNA, 2316 bp, Cannabis sativa
gcctaagcttgaaatttcaatgtcctgttgactgaccctcatgtcgggtcatcctcaccattataacttcatatcttttcatcttcacttccttatctctgtttgaataattaatattctttagctttataccttctcactgtttatgattttttctctttacaaaattttccagtttggaatctttgttttactcaattttcaattcaactctctccaatacatatttgctgccaagttataatataatatgagatgattcttaagctcttgattttttttcctttgaagggaaactggagaggacatctgttctaaaggctgtatgtgctggatttaaggagggaactgaacctccagtttgtttaaatggaggttgatatataatttcgggcatgcaatctttttgtagtgtcgtttttacatgtggaaaatgtactgattctttttctcttgttcattctcctttaatttattcaaacagatcttgagacaaatgagtgtcttgaaaggaatggtggctgttggcgtaacaagcactctaatattactgcatgcaaggtaaagataaagatttgaaatttattgttagaattaattttaagctgcatcttaattatttatttgtttttgctttttcatcattttcttggtttgaaactctttcaggatacatttaggggaagagtttgtgagtgccctgttgttaatggcgtgcagtataaaggtgacggttatacatcttgccatggtaagccattcatcactacattaaaatgcggtgattttagataagaattaaacctctgtatggtaaaaattattgatgtaggatgaagggagaatattgaagagaataaggcaacataaataatagatagaaattttgaaatagaaaaaaaaaggaatagatagaaatagaaaaaccagtatagaagaacaagcaaatattataatttagaaagatataaatgctcgacgatttatattttcattaccaagctatctaaaatatgaaaataacttggccttttttcagacaagaaaataaggaaatctataataaaatagtaatcacaaaattacacgaacttatttcacatcaagtatatggactagcacactattaaagcggacttctatgaccattttcattaatagggtctacatgtactagaaagcaatcatttttctattcaagtcaggtttgatcaaagctaccaatttattttctgcatttgagcaaagatgaaagaagataatctaattcttgaaaaacgtgtattgaaacttaataccatagtattttaggttagaaattgttaagtcctttcagcagaatccatttgcttcatctcagaaattgttacaagtccttttggggttatgtttcttagagtatagttgggctattaaacattctccctaatcttttatggtctcgaaagacaagaaaaataaaagttgaaaataaagatttcgatgattatccttgctaccattgtaaagtgtcattgtttgaatgttgtactggtgcaatgtatataattatattattaattttgtatgtgcttcatgttgcttctttcatgacagcttttggccctgcaagatgcacagtggacaatggagggtgttggtcagacactaggcatggattaacattctcagcttgttcagttcagtgaattttttccttttccaacttttacgggtttcttatgtttcattatctcttcgtctacctgccttgacctttataagatacttataggatcttttggtttcaggactctgagttgtctggctgccactgcccacagggcttccgcggggacggtcataaatgcgaaggtgactattttcagtataattattactaaaaagtttttggtttcatgtgaacttgatataagtgtctttaaaggttttacgtatatatttgtatgttttcttttacatcagatattgacgaatgcaaggaacgcagtgcttgtcagtgcagtggttgtggctgtaagaacacttggggcgggtacgagtgcaagtgtaaaggagaccttctgtatttgaaggagcaagatacttgtattggtaagataagtcatattaataaagagtttattgtcttatttataataaatttttgacaatctcatattctttcttaaaataacaattttcatcctagttagcttatagaagtatggtggtaagagcaaaactaagtctttatttcacaacttgttttcattatcaattgttcatagctcgttaatgatttgatttgctagctatggatttatgtagactatc

SEQ ID NO: 109205 - DNA, 847 bp, Cannabis sativa
  modified_base (73)..(91): a, c, t, g, unknown or other
  modified_base (136)..(139): a, c, t, g, unknown or other
aaaaaagttgtggctaactataaattaccattactgtgttgtgactaaaaggtctgtggctaaaagtattagnnnnnnnnnnnnnnnnnnnttgtgactaaatgtgtttttgtcacaatatttgttgtgactaaannnnaattagtgacaacttgtaactaaagattatatatgttttagtcacaattaattttttgttgtgactaaaagtcacatttaatcacaaaatttttttgttgtgattaaaaggttgttaacaattttttgtagtgattatgaacaaaatcagtgtacttacacttacataaatctattctacaatatataatctaattaattattcattataatacttttacagtttcaataaaaaaaatcgagaaattagggaggaagggattccaacttgggaccaatataatacatttatagtttcaataaaaaattatttagtcgatgtaaaaaacaaatttaaagctatacttagccaagcactactacaaaataagcttttagaggcgcttttttcagcataataataaataaccgacgccatagggttgagaatttttagaagggaatttgacgccacttttggcgtcggttatttggaaataaccgacgccatagggtgtgcccccctatggcgtcggttatttccaaataatcgatgccaaaagggtttataaccctagcacatcccttcgtcttcctcattcgatcaccaacccagaaatccccagatcagagaaaccccaaaccctctccgccaaccaccacggaaaatcacccccatttcactattttttcaccattttagctcatttttgtttctaaatcttctatt

SEQ ID NO: 109206 - DNA, 1021 bp, Cannabis sativa
taatatataaagatatatatacatggtgcactcttaatgggtattacccatgaatgggtaaaattagaaaattttgagtttttatacttaatttttctgtctaattaaaaaaaatctctcatcgttacatcatatgggctaagattgttccatcggtaaaaaaaaagttttttaacaagaaaaataagaaaagaaaaagttgagtttgagttaaatatttttgtatgaacatatttttgatatagtttaaaaagatatattttttgatatttttttaattaagtagttattgtatctcacttgtgatcgaaattacattcaaaattattgtcatcaccaacattgaagacgaccaaatattatcaaaattaatataagaaaaaaaaatctatttgaacaaattatatataaaaatactataataaattagaccttttaccctgaattataattactctaccttcatcttctatcaaaaaaaaaaaatatataaaactcattagaattatttattgaaacatatatattattaatcttgataaagaaaaaatgtaaaaatgatttatgaatgttctcggccaacaaaacatagtcatatatgattgtgtacaaacaaaaaaaaaacattaatttagtaatttttttatgaggtattgtaatatagtgtaataccttaagattaagaaaataaattagcaaatcctaactagttacttgtgtattaatatgaaattatattataatataatttttttgatgaatcagaatatgtattggctcaaaaataatgtgtttacagtctaatagcactcaacaagggcctaaataatcatctatacatgtaaatcacaaatcatatttcttttctatacatttacattattcgcaaactaaaaaatcgttgtctatcttcctttgaaattttctttggccagaatagcttaattcgatgagttacccctaatttgagctcttttaacatgctgacagtttcaggtttgtctttgtcccataaacactt

SEQ ID NO: 109207 - DNA, 682 bp, Cannabis sativa
agaaaagtgaataaaataataaccgataataatcatcaatttaatctcatatcaacatgcttacacatttacacaatatcataaacacacaatcctggtactttaaaaagtacccttttaccaatggttaaccacgagctgaatatgtcactatcgttgcccaatgaagcaatcgataagtaagaaacctatctgcggattcaggagtaattactcataacggtattcaccgtttccaactctaggtcataacttaggctcaacaaatatctaatcaaagtcttgataataatcaaggccataaatgttcaaccattaatatttagccacacacggtgcttaccacttttcttacctcaatttagaactcaagtgcgcgggccaacctcagtggaacgatgcttgataatctcgggtcctatgtcacgacaaaagtaaatcaataagggtctattccaaaacattatctaaaaccagcataaaatatcctagggttttctactgagtcttatggtgaaaacaccctaaaataaaatacatcttttttctctaatctatgtctcatactgtagaggtctttataagcttccaaacggtatatagaatgtctaaaacggacacccgagtgaaaagttatggctaaaatacgaaaatcgggaattcctgaaaattgaccatccgg

SEQ ID NO: 109208 - DNA, 632 bp, Cannabis sativa
tgaagggattattatatcattgtttgacttatgtttttttttttatttacttttggtacaaaaggtaattctaatatcaatctaaaaaatgtaacatgcatacaaattattaattattttgaatgacttttggttttcataatacttattaatattaattgatatttatagacacataatttctcccttttataaatttgattaatttattattgttattattattaacttattgactatagattattatgatgtaattgaatgaaaaagtaatttaaaaattaaataaatgtgaaaaatagagataacaaagaattagtaaaaaacttcatataagatgccacctagaatgctttgtgcattcctttatatagatatatagattcacatataattgacttgaaacttgaattatacgcatactctctttatatactctctttatatatttttgggttcgtttagttcacttgtatcctgtagtattatattaaattatattttatccaatattttttttagtaaaaattataagatttattaattaataaattcgttcaaaacaatagaacacacttcagaggaacagtcctccaactgaagtacatgacctgtaaagaaacaagagtctc

SEQ ID NO: 109209 - DNA, 1141 bp, Cannabis sativa
ccatgtttttaattctcttaagcaacatcgagcatacctgcagtcaaagaatagatgcagagtgttttctactgcattattacacagtatacaggaagcatcagcaacaatttgcattttttgaaagctttcccttgttttcaaccgattctgcactgctatccagagattttggactcgattttaatatcaaatattattaaacataattagatctggaaaatgtttgctcgaagaaaaattcaatgaattccgaatctaacaaaatattttggtcatctttaaaaaataaatttataaaaaagtgagtctaaaagtatattttgtattttttttatttttacaaaacacataatctaaaagttaatttgttaatacactgtgttcaatacaaaataatgatgaaaaatgctggtccaaatttatgtaagccctattctaagaaacctaattgcatgtttaaagaaacacaactaatcaaaaaattaaaatggtataaagggttaaacttagctaattataattaagtcctctcaaataaaaaaaaaaaaaactacaatttgaataaagcactattatttaggtacaagtgtggtggtgtaacaccttacagctaatacaaattgtaagacttttatttgttgcatttttttaattataaaaatcattataaatattctttttcagtattattttgcttattttttaaaataatttatttatataaaacattaatgtgacataatagtacgactcaatttaagaatttgacaaaaaaataaatacataaataatattttaatattgaattatgagaatatatatgtattcttagaataaatatttgtatatatgtttaatgttaataaagtggaatttgagtaactaaaagttgttaaatagactattatatactatatttatacttgtaatttatgcccacataagtgatttttttttttaaatatgagcagaatgtaactgaaagagaatatttgcagcgatttatgtttagaagaaatttttataaaaagaaaaactcaaaaggtaaaattctacaagagtcatagtttaaaatgaagaatacaataatttatatttatatctttatatataaaatgttgttgggttttgtgcccta

SEQ ID NO: 109210 - DNA, 927 bp, Cannabis sativa
atatattatgaaattaaaaaatattatctttatttgttgggttgatttatttgtgttgtttttacatgatatttttgcagggttggtgaataaaagagagaaagaaaaatgtcttcaaagaaataggtatattctaattgctatggtggtaagaaaaataaaataaataggccagttattttttttatctctaatatatctcataattctattcttataccatctattaaaaaatattcgagcacgatgtatttgtctttatttgttcatttaatttattagtgttatagttcttacataatattttgcaagatttgtgaacaaaagagagaaaaaaaaaatgtctttaaatgacaatatatattatgattgctaaggaagaaaaacaattagatatttctattttatttttattttaatttatttttaataaattcttttacaatcttattcaaatgacttcatattttcttattacaaaataaaacaaaagtactacaattctctctatctatgtatatatctatatatttatataatttctttttgttagggtaaataaggtggctgcttagataaattttcaaatattttttttttttattttctcaatttctcaattttgttaatttttctcacttaatattaatgtaacatttaaaataaataaataaataaacccttcaaattcttcttattagattcacttatatttatataaataaatttattttattatttaataataatatagcattatttaattaaatgaaattagtgataataatcaacgtctctttatttttctcttatatataaatgaagccaccatattataagatgaacccttcttatagataagtttattagactatatatgaccaatagctctagataagattatgattctgtttaactatttttttt

SEQ ID NO: 109211 - DNA, 834 bp, Cannabis sativa
cgtactcgtgtataagagtcattagtcggtgggtgtaaggacccaatggaggcttgaagcaggggacgttacagaaaagttgccagaaaagcctctgtcgccgaaaaattcactggaaaagtcactaaaagtagatgtctgagatataactaaaaatagaactagttttataacataatgaataaaaataaagaacccaaaccggttataattaaaatataactgatcctgtaacataatgaataaaaataaataaaacaaaataatgcaaactagttataattaaaatagaatcgattttataacagtattataatgaataaaaacaaataacagaaaataactcaaattggttataactaaaatagaaccgattatataacataatgaatacaaacaagtaacacgcaataactcaaaccgattacaattaaaaaacaaagagaaaatcagttcttaaaatactgaaacataaattaaaaaaaaaaaacagaattagttccacaacaaaatacctcataaacccaattataattttttgtaaaaaaataggaatcaatactaaaaaaatattgaggcatatatatgaaaaaaaaaaattggttccatagtaaaataataaacacaaagaataacacacaacaactcaaatataatacaaagaaaccggttatatttatcaactagttaaaaatttgagagaaaaaaactggttccgtaaagtaaataagataaaaaaatcacacacaaaaaccagttaaataaaacaactcaaacaaaaatattcatttaacatgctccgacccactaaataattacacacataccatattt

SEQ ID NO: 109212 - DNA, 1107 bp, Cannabis sativa
gttgttccattaaatcctgtgagttgggaaccacttggtgataaatcccggtaccgtgaggcctatcgctgtgaaggcttctttgaataacaagttcacggaactcccattgtcgatcaatattctagccacaatcttgttggcaatcggagtctctatgaccagggggtcatgatgagggaaacgcaccagttttgcgtcttccttcatgaaagtaattggctgatccacgagtcggggcctttgagctggaagctgggtgacttcccacactttgtcatgtttgatggcccctgcgtagtgctttaattcttttcgggtggtccccccaatatggggcccaccagagatcatggccactcttccgttgggtcttggtggcaagccaggggtctgctgagggatcgctccccctgagggtacagctggtgccaatgctccaggtgtacctcctggtgtcccttgaggcaatggaccgcctgttggaaccgggttgagatggggtagccggttcttgatccactcatataggtgacctaatcggatcaagttttcgatctcatctttcagattcttgcactcattggtactgtgtccattgtcgttgtggtattcacatctcttgctgggatcccttcgcgaactgtccctgtacagaggaggaggcttccggtagtgcatattttgccttgtggcaaaatacacttgctcctgcgtgtccgtcaactctgtgtactggatatattaaggagtatacccccttttttggcgcttgtcctccgcccagttgctgccttttgaggacctcttgctctgggagctctgaggaggtccggttaggctcgcagcaggagcggagtgagacgggacttgtccactcatccttgaggggttacttaggtgattcccataatgcgaagatgcaggagccaaacctgggctctggttgtaccctggggtagcggagaattgtatgctgctcattggtagaataaccggagggagggttcccgagagcggaactccaggtgcatatcctgccattccggttggatagtatcctccgtaagccactatttgggcttcttccaagttaatgtacttttg

SEQ ID NO: 109213 - DNA, 897 bp, Cannabis sativa
  modified_base (243)..(244): a, c, t, g, unknown or other
  modified_base (295)..(303): a, c, t, g, unknown or other
  modified_base (357)..(372): a, c, t, g, unknown or other
  modified_base (424)..(434): a, c, t, g, unknown or other
cctattgaagatagtataaaaggtgggctatggtttcttcatccaaactaatgcctccaaagctaaaaacctagatgagacctcttccttcttctttattcttcaattcgaaacctaaagcctttcttcacaaatattattcagccattagtgatagagtgagtgctcacacacatcaagttggtcctcaatcatagtatgtaagactgtaaaaaatttaatcaacaagaaggagagaaaganntccaagttcagatcttgataatgctctgctacagaaaggatacaagggctnnnnnnnnnaatggaaggagtcattatattcctctgcagtcaatgtaaggtttcctaaacttnnnnnnnnnnnnnnnnattgttttagagaattcatattaggatattaaacaacatacatggtagtaannnnnnnnnnnggtaaaatatttccaacagtattaactggtaatccttgccattcacagtcatctcctccacatatttgaattgggtctcgctaagactgctagagggggccacaaagggggtctgcttggttttgcatcgagaagtgcgaacctccttaatcactctcggggcaaactctctgattttgagagtggctggttgggaaccctcggctggttctttctctttggcagctttgtggagggtattcttagcctcctcttccacccacttcttaaactctctgactatctcctccatggctcgatcgtcagaaccagtctcaagatcgtcagataccctctgtttagtgatgatctctgccatgaggattgccagaagagccaacccgacttttctttttagtgcaagccatagcgttcaacatggtaggtagttttgcggtggttatagcagtctcggccaagggaa

SEQ ID NO: 109214 - DNA, 670 bp, Cannabis sativa
aagaagaaggaagaagaagaaaatgaaaactaaaaaaaaaaatgtatgaaaaatatgatatttagggaaaaatatttttattttggtaatgattttttataaaaaaaaagtttatatatttgtgtggaccaataaaattatgccatgcgtacactgtgtccacatggacaatccaacatgacacttaacagctaaatttggacagaaagtttaaattgctaacggtattgtggttttgggggttttatagccaaaaaattagtattgggggttaagtgcaagtaaaatgaaagtattgagggttttgacgcaattaaccctaaattaaatttgaatgacatggggtttgtgtttccaagtaggttttactttttaaattaaaatggtggtattattaatcccctcaaacacatgggtttcatattattccctttaagtctactccctctaactttactctttacaactcaaactcacataacaaacccattaggtggttggttagaaagaataaaaacatagctagaacaaaaattacattataatactttaaaataataagacactattttttgtaaaaattatatttttacgtttaaagaatttcattttttacatttttaaagttttcataaaaacaacaagaaaactatacataaaagtaacatga

SEQ ID NO: 109215 - DNA, 5544 bp, Cannabis sativa
aaaacaaaaaacaaaaaaaaacaataccaaacatgctctaattagcctactatgaaataatgagaatgtggccagtgctagagtcacagccacgatttcgttccaattatgagagtgaaaaaggtaattacaatattatttgattttaatttattggcaataattaatattgagacaaatttaaaattgggacctcctaagagatgtataaaattatttggctatcctaatctatgaccacatatttgagattaacttttttttatgaaaatttgtttcactatattatttacttgatattttttttttaattttttaacaaaataattcatatgtttctggccctttgccctgacgagattctcttttgtattcagaaaataaaaagggatagataagtatacttagttatatataagccttattatattttgatattcgtgtagttgaactatgttgtgtttaactctaactactgtttttaactcctgatcttattagaacacaatagattaacttgctaaagcaaaacccacagcacagacagttacttaaaataattggtattgactacctaaccccatataggactacgtactataatacaataatctttactaccataatactacattataatagtattgtgtatcacgtaccattaataacaaaaattattttaataataaatatacattatcattccaaaaagtaataacaaaaattatcgaacttcaataataacaaaaattattttaataattaatatacattattattgcaaaaaataataacaaaaatgatcaaactttataataactaatcaagtcataataaacaactacacttcactctatacaagaagtcttcaacttgaatttatacacgtacatagcatcttttattatttaataataactattttttactacttttaagggtaaaagagctatgcatatctaatatattaattcttaattcgctacaataactcacttttggtactactactaatagccatgcttgtatatatacttttataaagcaaaaatgttgcttaaagaaaggaatataacattcaaagtaatgagacccacttctccctttatctacatatataaatttatataatggccatttttcacacaaatttctcaaaataaaaaaacttcttcttctattgttgtgtctctcaaagacaaccatgacaaatttcttcctctcactgctgctatcactcttcttattgtctcccaatgtaagaactatacctcatttttcatatttcattttttttttgccacatttaccccatttcagtaagtttattgttattttgttttttcaggttggtggaattgaatttgagacaaaagaaaacccatttacggcaaaagcctcattgatccgttactggaaaaatcatatctccaacgatcttcccaagcctaatttctttctctccaaggcctcaccgctgggccccactgactcagcgattctcgccaaactcgccgacgatccagactcgctctccgcccgattcaactcgttctgttcgtccgctcacttactctgcttctcaaacgacgacgtttcggagcagcaaaaagatgatcaatccacctccctagacgacgccgtttcaaaggatgccaactttgccacttacacaaatagaaacttcgccaactatggcgccgcccgacgtggcggcgccgactcgttcaagaactactcagacgagttgaactcgcccaatgactcgttccgaaagtacagtaaggaatcgaactctcattccgaacaatttgccagctacgccaccaatgccaataccgcaacctccaccttcaccggctacgctgccgatgctactagcggttccggtgagtttaagatctaccaccagcaagttaacgttcccaatctacggttcagctcgtacgattccggtgctaaccaccaccgtctgtcgttcgggagctacggtagcgagaccaactccggatcccaatcgtttctgagctacggcaagaacggcaatgccgatccgaacgagttcaccagctacgcggaaggagcgaacactctcgggtcagatttctctggatacggagagattggtaatggcgggaacaattcattcaagtcgtacggactcaatgggaacaatccgaagagcaacttcaagagctacggaaccggaggcaatgccgggatcgacgggttcacgaactaccgaaacggagccaacgtcggcgccaactcgttccagacctacgctagacattcaaactcggagaaggtgactttctccaattacggaaaatcgttcaatttaggaaacgactcttttcgcgactacggaaaaggatcgttgggtcggacctcaatcgggttcaagtcatatagtttgggtcggactttcaaggactatactcgaaacggcgtaactttcgccgagtacaataatttcaccactgccacggaagcaggtcacagtcacagtggcatatccgtaaataagatggttgagccaggtaaattctttagggagtcttcgttgaaagaaggaaccgtaatggcaatgcctgatattcgagacagaatggttgaaaggtcttttatgccccgctctctattaaccaagctgccattctcaacgtctagaatctccgatcttaaaaggattttccacgcgcctaatggctccgccatggaaggcataatgctcaacgcgctagaggagtgcgagcgggctccgagcccaggtgagaccaaacggtgcgttggctccgccgaagatatgatagactttgctgtttctgttttaggccgcaacgtggtggttcggaccactgaaaacgtgaatggatcaaagggagaagtcatgattggaaaggtcagaggaatcaacggtggaaaattaacgaaatccgtttcatgtcatcagaccctgtacccctacttattatattattgtcactccgtacctaaagtaagagtctacgtggctgatattcttgacgtggcgagcaaaaatatgattaatcgtggtgttgccatttgtcatattgacacatcatcatgggctccggggcacggtgccttcgtggcattggggtctggtcctgggaagattgaagtttgccattggatattcgaaaatgacatgtcgtgggcaacagctgattgagtggaatataaagatggtattttacttttaaaaaaattgcttttgtgcaacatttttatttattcataactattgtttttgtttagaattttttcagttcaattcagttctatttgaactttttttttcttcaagatttctaagtttataatatacaatatgtgatgaatgaaccaaaaaaagaaaatgcttcatagttattaatagttattttttgttcgagtagtaaaaatttgtgactgttatttttgtccaaaaaaaattaaaagagtctggataatactttaagtacaatttctctacaaaaagctgtgattttttttttttttttttgcaatggtgcaacttatctagagtgtggaatcataggtttttctggctatcccaaacagtagaagaaggttgggataggcttttgtcaaagaaataagttgaaatttcatttttaataattatcaagtaaaattatcaaataatttaaataataggatttatctctattctatcagacacaaaatctgacagaacaaaaatatattgttgaaagtaaaatgcagaaaattaaaatgacacataacatttaatacgtggtatcaacaattcttttgaattgctcctagtccacgggaccacgcccagagaaagaatttttttagacgagtctcaagtgtttacaaaaccaaattgacttatacaaatataaataaagactccctctttgaattttcgacaactattgtttgtaatctattattctaatcaaatttcagaagtaccgagaccttgaactcccttcaattcgtaacacttgcacacttcatcccgaagagtgtctcacatgcaatcttcctcccgaaaagtgtctaacttgaaatcttcctcccgaagagtgactcacttgcaatcttcctttcaaagagtgactaacttgcaatcttcctcccgaagagtgactaacttgcaatctttctcctgaagagtgactcacatgcacttttttctctcaaaaaggtgactctcgaacaagacttctcctgaagcttgctcaacaatatccaaggtgttcaacctacataatttcaacaagaaacaatacagagtaacacaataataaaatactaagaacttgttggactcaagttcttcacacaactaagaaagacactctctaactttaaaaagtaatataaaattgatacaccaagagagctaaccaataccagagacttaagggtgtatttatacactttagaaaccctctaggtcgtggtcaagcaaccaagaaacgattaggtcattaaatgaaaattttctcaaaaaagaaagtcaaaatctgtttaaacatacaattagtccgttcaaacaaatatagagaacctggatagtttttcaacaaagtttccataaataaataaggcaactttgacaaattaatacccatagttgtacacgattttttggtcaagaaatcagatcaaaataaataaaatatgaataagactttccttaaaaagtaaaggataaaatcaaataatttataaaaggaaaaatcatattttattcacaataagtcaaaagaatataagatctgattttgaaatccttttcacacaagaaaaagaaactggatttttgaaaataaagaataaacaaataaaaacaatttcaaaaataccacaaacattatttttgtctattttatcaaatatgtcaataaaagattttacaatctccccctttggcaatttgatagacaaaaataaaatagaaacttgcaagacacatgttagagataagtaaagagaagaattccccctgcaagcatacataacttataacaaacatgaaaatgaaactaaaacttaactcccctcaaaataagaaggtccagagttacacaaaacaaaatataacatgttttttagtctactttccctctttgtgtctttcaaagtagccaaagtaccaaaagtatataaaaaaaaacaaatatgccaaacctaagactaaagaaagtatcaatgtccttaggaataaagaaaaaataaaaggacaagaaaaactaagcttctggaaccttagacaaggctttgacaacatccaaaactgaacgttgaagtccctcaaggttcagtactcgagcagtcaaggcatcaagggaagctcgaacaccagagatttttgttgtgatggatgctgaagcagttggaacaaaagcttctgtaggaagatcatccgaagcaaacactagtgattgaggcttggatttctttgatgatgaggcttcaacagtatcaagaattggtgcagatgccttgtaggatgcagcagtggaaggagccacc

SEQ ID NO: 109216 - DNA, 754 bp, Cannabis sativa
ggagctgaaggttcagggcgaggctgtggccaaagccaagcacgagctgagagaagccaaggaggtcgtagaggagctgactgccaggttgaagtcaatggaggagctgaatcaggcagacttgcagtcgacgaccaatttgaccgttgaggtgaaggagctcagggacttcaaagataaggccttgaagaaggctaaaagagatgagctcctagaccctgtcgcctgcaagcattgcaccaagcgcttcgacgatggcgttttcatggcttggcaaactaatggccagaacatcaaactcgatttttaccccaagcctgaagaagtccttgttcgcttctgggagaagaagaagagacttgacgccttgctcgaggagcgtagggggcctcgtcttccaccccgcgcattgattttaagccaacccgttactactatcactatctctttctattttttctttttacaattacagtcttttttccttttttttagaaaattttaatctttatctttaaggtgagacaattttaaggcccgtccccatgctcttagtatttttttaaggcttgtcactgggtccggacatctttacatttatgattaaatatatattttgctttaacttttctaaacttttggcctattttacatttttccatgcggtatgccttactatccccctgagtggcatgaaaagattgtttttaagacactcaactttacacataaatttggaggttgcatatacttt

SEQ ID NO: 109217 - DNA, 543 bp, Cannabis sativa
gcgaagtacttaattaaatagaaataatgagatcacgatcataggatgtaaggaaatcattgagaatttctaaatcccaatctttagcatccaatctaaacaagttgttatttgataaagtaggatgatctgaagaaacaaaagaattatttttacaaggtagccatggtcaagaagaatcgaaatggttgaaccatctccaacagttttatgagctctagcacgaacaaggaattaagcttcaagcacactacgtcaaacaaaactcagattgtttcctaactcaaaagttaaaaaagaactagagaaaaaatagtgagccttaaacactcttccaaccaaggatgactcatgtgtgaggagacgccaaccttgctacctatagcaacgccaaattaaaaaccctaaggcttctgaaacccaacctcccatcatgtttgtgcttacacatccgagaccaactcattcaactaatatgtcttataattgacaaaccagtttttaacaaaaaaacttagtcataagactctctaacgcctggca

SEQ ID NO: 109218 - DNA, 1859 bp, Cannabis sativa
aatgtcttaagaaccacttatttataagccttattagatatgtatgcattccattccaacactccattcatctatataaggctacataaccacacacccaaatcatcaaatcctcacattatctactacacaatatttttgtaactctaatatttcttctaaagaaaaatcacaccaagtaagatcaacatggcatttggattaactggttttgttcagggtaagaaggctctccgaagatcactatcaggcattaaagaagcaactttgaagtcttcaagcattccaaaaggctactttgctgtctatgttggagaagatgagaagaagcgccatgtagtacctctttcgtacctaaatgaaccttcatttcaagacttgcttagtatggcagaagaagaattcggatatgagcatcccatgggcggactcacaattccttgcagagaagacatcttcattgatatcacttctcaattgaattgatgattgtaatttgtagcactgacatagaaattcacatataacaaatttgtagatcatatacaattttaccctttatcttggaaaagaaagggaatttttttgactagttgagaaactactaaatagaaattactggtcatttgattaacacttgttgtctccatggttgaattccattttttctttttctaatcaatatctttgtctttgccaatttcaaagctatctggcctttatttgagagtaatttagttacaaacataacatttagtgaatcacaaacatcactttcacattgctcataaatataaatttacaacctagctttcatttcagtggtaattagtagatatacaactcaacctagcctttctcaaagctttcattcactattgatggatgtgatagtgtgatctctataggtgatgagttttatcacaaaggttaaggattggaaatatgttggtgtggaaatattggtaatgtagatatttcctcttctaaaaggacttgtattgatgaactgtccaaagcttaatgctggttctactaccaagaacacaacagttttgcctactgtccattatttgaatcacaaaaagaaagtttctttgtttatggccttacaagaacttatttcccttacatccttggtttttggttttctgtagaaaaccgctgtgcttggcagaagaagggctgcctacttcgttttttcgtttatgaatagcaattcattttcttcactttatcttacacattttttcattgtaccaattgctattcattcaatgttatctgtaagtcaattgtttcatattattttgatcaagaaaaggaattgtaatttcttgtttcatatgagtgctaatccaagtgagtgttggtttgtgttttcatgttgagcccaatctcattttttagttcatagtaaagaagtttatttatgttataatggagtagtgaagttatactattttaccaatctcaaaaaactaaaatgagtattgctcaaagattctaagtactattttgcagatcaataagaaggacaaagattctacatcttaacataaagaaattaacacataaataaaacaaatgattgaagaaaagctttagtattttcgtttgtatcattctcaaggacattttcatttcagtccccaaggaaaaatatttacatggtaatggtattggcattctttggcatacaaaattgtaacaattaatcatttttgtcagagttagcatcaatctatactccccatcatacattgaagctagaaataagattgatgaaagcatcttcactacaggtaattgttagagcccccattggatgatcaaatccgaattcttcttcagcttga

SEQ ID NO: 109219 - DNA, 566 bp, Cannabis sativa
tctccaaatgaaatgtttaattttaggagggacagggagagaccagagggttttccaccaatgaagataagggttaggattggaagaggagggaacatcgacatatgcaagagagcaagcaaggtgttaagcagatttgacagttataatgccagaggaatgaaatccccaaataagagaatcagtcgatgtagggtcaatggggattttgaggatattttcaacttggtaagaaggaaagaaatactgaagtttgtggaccttccaagtagaatcatgattaataaaggaagaaacaaaagcttgggactggtctaaaggatgtaagagaatgggacgttgaatattaggtatccaattgggagcagataaggggacattaacaccagtaccaatcttccaaaccaggcctttttgaagcaattggcgaccccaaaggatacttctctaagtaaaagaagaattgtggccaacaggggcatttagcaagtgaaataccgagctttaggacaacgttggattctcatcttgatcgaataaaagattgctagaatgtttatcatttt

SEQ ID NO: 109220 - DNA, 588 bp, Cannabis sativa
ctctctctctctctatctctctatctcttctttgatctgagttctctgtgtaaatctatatgttgtttgctttgatttcctgcttttataatagtgtagagtcggttgatcacaaatctaggagttgtaactaactcctatttcttgatccactagaggcgaagccacctaggattgagtccttgttgttttgtttctgttgtaagtgctgatgtggatatttatgtgtataagagactggttataagtggaatttactcaacaagaccatatcaatatcaaatacaaaatagagttatagggtgcggtaccttgaaacccttatcaacactaaaataatgttgatatacagctaatcatatgcaatgattaaaaaggaataattaatactcgaatccaatatatagttatattgagaagatgataatgacctcatgaataatgaatgactactactgcttgtacatacatactaaatttgatctttaattaatgctatgttatgaatgagtttacattacgattaaaaataataatgaatgtgtcaaagataatagacaaagaatttagtgaaattgtacaagtaat

SEQ ID NO: 109221 - DNA, 6495 bp, Cannabis sativa
aaaaaaaataattaaaagaattttaaaagtggcttttttcttttcaaaagtttgattatcaattaaaaaattaaaaggtgaaaataattttatagaatatgataataaaaaaaattacttttctaattataaaaaaagtaaataacgacataagtattcaaagttttatgtttgtaaacagcataaacctaatgtttatttttagcggcataagtactcaatatttgtaaaactgtaatttttctctaattttgtcagtacagactctattattgtcttaaacagggcatatataaggcctaaattcttgatcattgggtctagatagaaatatatagtatcatttacttacaaatattcttttaataaattcaaaacagtctaaagactctaaactgacgaaactgaaagaaaattacaatttttcaactattgagtacttgtaccgctaaaaataaatattgagtttttgccgtttacaaacataaatttttgggtacttataccgctatttacccttaaaaaaataactaaaaaaatattatcaaacgcaccttataatgatgtagttattttttcataagaaaatgaatatttaaacgctacattcaaataaattaaaaaaatatgtattttatttataaaataatttgaatatttgaatattatagagtaaaaggcttgtttggtacgccgtattacatcgaattatattttatgcaatatttttatataaaattatattctgtattaactacctagatatatactatttagtataaattaaaatttaacaaaatattatataaaaatacaatgggaaggagtcatgcctatttttatttttattgggaagatatttttactctgaaactgacatctacactacaataaacctaattttatttgtacttcctaatcaccatcatattcataattacattcacattgaaatattttgtttgtgttgagacttgcgagcaagattcatcttaatccagatatccaaacacgccaaaacttatcttagcatccaaacaaccctactttacaaaaaaaaaagaaaaataaaataaaaacagagcggtttccggttttcatttaggtgagagaagaatacagggaaaagccacttctatgctcaaatacaatgcatgtgggttatacttgggtgtatgctagtgcaccctaacctcattgcttcttctgataaaacctcccactacaacaacacccacccttcattccccttattttcttcatcaccaatttttttttttttatttttaactttttttttgccctatctaatagggtttctatgaacttgtagacttaatctttctcatgcatccctgccttgaatcgatatcaatcgcattgatttccttaatcttcttcggttctctcttttttgccttctttggagggttcttcggtggaagtctctgccctttttacctttcggggttttttgagcactactcatgtcgaagatctttgctttcaccggtaagtcctcaattgctacatctatttatgatttatttcatgttttttttggcttagtatcttctgattataaccacatgttattgttttgggggagttttgatgatatttaatgggttggattttattttgttttatttttgctttatttgtaaatgattcttgaaagaaatttgacttagcagtttaatttctgaaatattgctatttaggtttaatagttcatgaatttttggtggctaagaatattattactttgtttgatgagctgggatttgatatgttctttggatgttgttatgaatttctaggtttgagcttcagtctgagtgcttttaaattttaaaatgaactttttgtctgatttattttaggggtattatttgatcatgactttcatatttttgttatgaaataaatgactatatgagcaccgtcgatctcaatattgtttttgtcagatattctgagtaggttgtttgtgatctgtggatattatctgtaaaagatgtgatttcaaaaagaaaacccctctaggggtggattgattccgtctgtttgttgttgctcctaataattttttgtgaaataatattaaattcttgttatggatcgtgtgaaagtttgttagagtaagctaattctggttttgatttatcaggtaacgatgacttttgccttatgggttcgttatattcaaaccctaaggaggccagcctctttttgtcccttggtaatcatgtggatgtctattttccctctcggaagagatctcgcgacagtgctccctttgttttcgctgaagagaggtcccagaagaagaagaaggcctctattgatgttctaccagatgagtgcctttttgagatcctcaggcggatgtctgctgaggaaagaagtgtttctgcctgtgtttcaaagcgctggcttacacttttaagtaacatccgtaaggaggaattatgcaaagaagatacttctgaaaagaagggcggagatcaagaatttgagagtgatgggtacctctctagaagtttggaagggaagaaagctacagatgttagacttgctgccattacagttggaacagctagccgaggaggattgggagaactttttattcgaggaagcaattctggctgtggagttacagaccttggtctcaagtcgattgcccatggttgtccttctctaagggttctttctctgtggaacgtggcttctgttggagatgaaggtgttattgagattgcaaatggatgtcatctattagagaagcttgacctttgccggtgtcccgcaatctccgaccaggctttgtttgctcttgcaaagaactgccctaaattgactgagttaacaattgagtcatgttcaaacattggcaatgcaggcttgcaagctgttggaaggagctgtcctaaccttaaaagcatttccataaaaagctgcccccttgttggggatcaagggatagtgagcttggtatcttctacctcttgtgtcttgtcaaaggtgaagcttcaggcattgaacatcagtgatgtatctcttgctgttattggacattatggcagcacaatcacagatctcacttttaccagcctccctaatgtaggtgagagaggcttctgggccatgggaaatggtcaagggcttcagaagttgaaatccttgacaattacatcgtgtcaaggagtcacagatatggggcttgaagcagcaggaaagggttgcccaaatttgaaacagttttccctacgcaagtgtgtttctgtatccgacaatggattggtgtctttttccaaagctgctggatcacttgagagccttcaattggaggagtgccacaggatcacccaatatgggttttttggtgctcttttgaactgtggtgcgaagttaaaggctgtttctcttgtatactgcttgggaattaaggacctgaatgtgggattatctaaactgtctcaaagtgaatctttgctatctttgtgcgtccgcaattgtcctggatttggcgatgctagcctggctgtattgggaaagctgtgccctgaactgcagcatgtggaatttagtggtcttgagagaattaccgatgctggtctttattcactgctggagagctgcgaggctggcctcaccaaggttaacctcagtggctgtgtcaatcttacagacaagattgtttctgcaatgactgagtcacatggctggacactggaaatgctaaatcttgaaggttgcaagcagattactgatgcgagcttggttgctgttgctgataactgcccattgcttagcaaacttgacatctcaagatgtgcaatcactgattttgggattgcaaccttggctggtgcaaaccatctcaatctgcagattctctctgtgtcaggttgctcttcggtatcagacaggagcttgcctgccttgggaaaaatgggtcagactcttgtagggctaaatcttcagcactgcaaggcaatcagcagtagcacagttgatcaccttatcgaggagctatggaggtgtgacatcctttcctagatgggaacagaaatgaaggaactcatgccaacatgaatggcaaacaaaacaaacagtgagggaaaaactaatcagaaagacgtagaaattttagtcagcttttgtgagtagcagtagtgtcgtattttcgggtccattagctatgggtctcttgtcatccagtgtccaggtttccttttccagggagggtggctgtgaacgtttttttacaggtcttctgcagctgcaggaaatctgttttttttgactctcttaaacgagaagtcttttttgttcacagccatatttccctgagaagttctcttctgggcactggatttcctcttttattctgttttttttttttttaaatattgctaggtttttggggcatctgttttttgcttgcaatgcatacaagtgcttgtaagctgttgtattctccggatgtcctggggcgcctagttttaaagtcagtcctcctatcgttggttttaccgagtcttccacgtttttgaactttggggttctttgcgtgatggttgggtctttttaatatttccataaaagggtaggtccgtccctagttttgtgagttcattcgcatatattagagttgcgtttggcagttgtacaagtttttggtgcctagtgttttttgggggtcttggccatggtagcaggttatatatatgtctgccatgacaaccttgtctctttgttggagaggttgttttttcaaacatcttttttccaagccccttacttacaggcttcttcacttgtttcattaactgttgtgttcccttgcaactttttattatatgtaaaatgaatgaactagtaggtgatatctaccctctttagttctttttcttgttgttgttgtatcttttgaatggagatgatgataaataaaataaagatcagcgttttattattgttattattatttgttgccatctttgtattctttaatcagcgattactgtattgaaccaaaccaaaaattcaaccatatgatgatatcattgacgttgatcttgtttagtggaagtggggaccatatttaaaaagaagcttcctcattcatgtatcttaccttttatagagggaaatatatgtatctaatctttaataatgagatggcttttcttgtttggcattttatggccaaatgccatcgaagagccaacagcatatgatggctctcatttaactccatatagtcaaaaaagtcatctgacattatacaacgaatctaattttcgaaataataaaattattggttattataattatataaagcattattggaaactggaaagtaacgtattggagactggagagagtaaccgcttatataaagtatatatgatatggatagaatttgagcacttgcaacaaacgcttgagttatattgtgccatacattaacttgtttataatattaaaatatattttttcatatgcttttttgccgattatacaaatatatttctttatataaaaagataaatgagttttgatacgtattgtaaatgaatgtaaatcctttttaacgatataataacttatggatatctttctaccattttcggtataaatttaactacatagccattttacatcaacgggtgagactactctaaaataagttaagaaatattagaatataaggatatttgtagcaaaattctttaacatttataattgttacatattgatcttaataaaaaaaaaaaggaacggtaaaagtaacttattttaccattttattgtactcgtattcttttttggttgttaaatatcaattcaaaaacacgtgatgatatgtttttttagcttatttaatacatagtctaataatatgtagccacgcgtttttaaattgatacttaaaaagagtacgaatgtaacaaaatcgtaaaataaggtatttttactgtcattattttgattggaattatatgtgtaacaattgtaaatgctaaggaggtttcgccacaaatattctacaattatatacatattttaaagaaagaagaagaatgagtaattatttggattttcttctatataactatcaatatacatgaataagatttaataagttaaaattatctcaatcattttaatgtgattactagggagaatataatggtaacatctaattttatatatgtattattgggaagtaatattgaatgaaatagaatttcataaatagataagcaattaacaaggtttgatggtttaatttttggaaagtaacattgaattggatagaattttattaggtaaaatatattagatatcattggtcaataataaatcatgagaaaattattgggccaagatgcaaaatagccctaaatctaacaattaagttaataaatgtcatttttttaaaaaaaattaacaaaatgtccattcaattaaaaatttgat

SEQ ID NO: 109222 - DNA, 1572 bp, Cannabis sativa
taaaatttaaatattctttctttcgcatgcatacatacatacacatattaaataaattatttaaactatcattgaacataatttaattcattaaaaaaatataatatatttattaaaattataatatagactgtcattttaataataaacattattattagtcatatttgaaagacctaaaaatttgtgtacaattcagaatgatccctctcctctacaatctacatagtcaaaaatgaagaattaatttagtagtcaaaagatgtttgactcaatatatttatatgaatacatttattttgggagagagatagagatatatagtcataggaataggaataggaaagaacaagtgtgacaaaatcacaatcacaaatctctatgataatgacatctccactcacaacctccacataatctaatctcatacttaccataatatccatactcttttcttttaattcccaatctaccatattattctcaattcatttttactctttaattattatacaatttttagcaaattagttcctaattttcttttagtaaattgatccttcaattattatattgtagtttttataatttttattaaattaaaataattagaacttgatattaaattatattaataataatattatttcttgcaagaatttagcatttctcttttaacaaataaattttatttattggtaaattaattagtgtctaaacttttcttttttatataatattaagcttctcgaatagttttgcttattttcttattattattttacatgtttttatttattttttgcgttaattttttatattttattttgttttcgtaatttccttaaaaaataaagtaattttttattttttttcacatgaaaatatatataactcacatgttttttaaattattttaaatatgttataattataataaatatataagcaaattattcaatattcaagatgttaatgatatgattaaacagggaataaaaacttaccttttttctaatctcttctgaagttacataatttttacttttggttaacttttttagtggttaaaaataagaaaaaaaactatcacatctatgatatagtcaaactattatttaaatgggtattaataatataccagtttcttctagctaccattattaatacaggagaaacatttattataggttcaacatatataatttgtcaaactttagatttatttaaattaatgaaaccttttaattattataacataatatattgatttaataattataacctaatattccctttattatttcaaatttctaataaattagagccacacttctttatatagatattaatttgattttttttctgaataaatcagtggaaaatgagtttcttttttaattaaagtaaagtgtacttaataaaccatatgaaacactttttatgtttaaagaaaaatgttaacttttgtaaaaaaaaaaaaaagtggtagttggaaagttgagcttttcattattatgatgtctaataattgtacctaattgattgatttatatatttgtgtagtgtata

SEQ ID NO: 109223 - DNA, 618 bp, Cannabis sativa
tgtttgttagtcttcacattaaattgaaaagatatattatataatataataaatactgcacaactctagattatatcttagttttggtggacaaaaatgaagcccaaaattggagtactgtattctggcgctgtcttatcctacatagcgatatatcttggagcttatttccttttttttatcatttctgtcagaacgtctcagaaattatagtctcagaaattatagaaatataatttatagaaatataatttttttttttttttttttatggaaatagaaacacaacatttttcaatatatatatatatattagggatacgattttatcctgtaatgtactttcacggaatgtattccgtgatctaaggcagccgttaaatgggagagttatttaatctgagggctgggattgatctaggagtaattagggttaaaaaatggcaacgtactcatctaatgtaccacgaaatatattctgtgaaattacatcacgggataaaattgttaagaagattatgaacaatacgcaagtgcacgtaatcaagtagtaaactcacgcaggtgaggtcgaaccacggggaattaaactgaataccactaaattagacttatgat

SEQ ID NO: 109224 - DNA, 827 bp, Cannabis sativa
ttaaaaccattcatattgagtaaccaaaagttttctattacaaggacaagaaggtaaattctaataataagtctattcaatggacttaaaaaaacttcctaatccaagtatcacaggtttgagattattcaaacctgtggcttgtggtatacttagtaatttacttaatctagtgcaagcaacttactttagtaagatgctagagcatttttctaatggctaactctaaaggaagtcttttgactcctagacatagattttatttatctaagaaaaagttttaactattacaggaaggatattttccacggaaagaattccttaagcttcaatagtgagaggtctcatatgctttggtatgcattagaccagacacctcctattgagtgggagttatgagcagcatcagtttaatccatgaaaagaactttggaagacaattaaataaatcttaagatcaaaggaggaactatatgttagtcgataagggtggtattttaatattctttggctaagtaaattagatttccagacttgcgttaatgctagaaaatctacttatgagatggtgattcatttaggggtggagtagtgatttttagagaagtgtaaaaacaaattcagagtctctaactctactagtgagactgaatgttaaagtgacctagaaggctactagataattattcagcctatagaaagttctatacattttttagcgctatttcagtaatagattaattactagtgttacttcctgataacacagatatagttgtgaaacagtaaagaatccaataccctaagaggagtaaaacatatagaaa

SEQ ID NO: 109225 - DNA, 505 bp, Cannabis sativa
  modified_base (121)..(126): a, c, t, g, unknown or other
aacatttcaatttcaagcctccattggaccctcttcaactgtgtagtcccatacctacacaattagaatcatcacacttgaccttccctagaaaaagtaggattacacaacttacccggtnnnnnnccttacggatcacgggactattgattgtgtcacactcactcccccttacaggattcgatgtcctcatcaaccacactttcggctgggtcaaggctttgataccattttgtagcgtccccatttcaagcctccattgggcccttacacccacggaatgataactcttatacacgagtacgtcactatggctgcttcatggaatgacgactaaccctacagaccaacacgaatgttttcagtgtgctttgtcctcactcacacactccttggaaaaacttcccaagattataacgtccccgcttctagcccaatgaaggcttgaagcggggacattacatttctcctattccactgtgttcctcttgaagaagaggaagct

SEQ ID NO: 109226 - DNA, 3642 bp, Cannabis sativa
tctctactttgtttatacattttgataatggtgatgagatattttatttctaaaagctaattatgcatgaatttatattaaaccaagggtcctttgttattagttgttttcctactgggctttatgagctcattttctcccattccaggaactcagtttgatgctagtggatgaggatagtactgttgaagaagaaagtcgttattaatttagtcttattctacttattaaactgccaatgaaactgattttatatttaagctagaatggaatggtctgaatgacttaaattagttatgtactagttagaaatgaggaatgatggatgctagatattattttggtattttattgacttatcaaatttatctattcggtgactacataactgtgaggatattattctccttttatatattaatgagtggtcttgattttattactaatattttcttatcgatacatatataggaatcaaactattatttttcaataagtattttgtgatataaatcaaaaaatcatttataagcgttattttcttacaagggtcaaagtgtgacatttgatcacccaaattatgaatattacatatgtggcacagcctagcgctccggtcgtgacacagtgtgtaatcatattaaagaaattcggttatactattgtaattaaatatatatattttagatatttttaactaaatggataagttagaaaattaaagaatgattaacaaagcttaattaggatttaataaatttcacagtacaaaagggcaacattggaatttcagattataggcatgaagattcatgagcaagcggggagaaagccataatttagaggacctttaagaaagctttttctctcctaacactcgatcacttttctaggagtggcaactggcaaagttaaattaataatatcccaccaaaaaaataataataataagaagaagaagaattaattacttgtatctaggtattctacctatggcagccgcaacatccaccagttgcaccagcttcttgaacctacgatcatcatcaacgaaccagcagcagcccaataaggtgcggaccaggtcctcatcatcatcgagccacggaaagcttgatggggtggccatgtggctcttcaacagtgttaccaccgctttctttgcctccttagagaggtgttcttgtatccgcatagccactgtagacgacggtgacgatgccaacgacttgcccttgatcttcaacgatggaaatcttccacacgaagcaaggaccctcagccgtagaagggttcgcaaagggaagactaccagaactactactactgctactgttgatgatgaggacgatcttaattagtacgtaactttttaataaatttttatatatatgtatatctatataagatattgacgatgtcaacgtctcgaccacgacgatctgcatattgttaattttctctttttgcggtttaaatgaattttaaaagtttcttgcttatgtttttttctctatggaaatgtccacgaagtaatcgaagtaaaaactatgctttatttttacacactcactctccttaatttctctatgctctgttcataaattttccaaaaggctaccggccggcagttaattactgagatattaaacttttttttttctttcaaataaatgatcacctaataagcttaaaaataattaatttcagtctttattagtgccattatactttctttctctattttttttttcttaatccttttcgctgtgtttaatttatctgcaatatttatctctcatgagctggagagtggaaagtaataaaaagttccttatgaattttactttaaataatagtaataataataacgttaccgagtgattacatttgtcaacgttaatagcattactttgtcgactaaaatgatggtataacagagcagtgatttatttttattttttgatccaatgattgatctttattttttttggtggggttggggaggatggtttcattctcattctaacattaattttacatatttgaaaataatttctgtaaactagaattttaaaatatggtatatgtaagaattgcataaataaaaattatatatataaatatatattcaatatgaataaaattatttatagtgattgcactcgaaaaaattatatacgtattaagagaaattacgtaaaattgaaataaaaatatgacgtgaaattaaaatggaagcatatattaaaatgaaataaactgaagaagaatctgaaaatgaagtgtgtgtatatatatatatatatataaatatagaacaatagttgtatgtttcaagtcatgagaaaagctagatttataaatgttgcgaaaggtagctaattagtgtgagatgctttcagagtaatggtgtcatttcgtaaaatgattatgttgtttcatttaaggcaaagtttcttttctttttctctttattttactttccgttgcccaccttttacgaattacaatcaaagatggagtaggaaaccccactcccaccattataattatatatatataaataaattttttgaaagggaatttttttaaagaaatttttacactaaaaatataaagagaaaattacacttactttgaaattttaaattttaaagattcttattatcatatgacacatttaagtttgatcaatttatatggtattttttttttaggtctttttatggtacttgatataccatatatatgtaattagggtttcaaatcccatatttaatatttttatttgtttagaaagttttatttgtcattgatgccggaaatatcaccggagtttgatgacggtgccagaaaagttgccgaagtagcggtcggtgctggaaaagtcgtcggagttgctgccggcactggaaaattcgtcggaattggcattgtcgccagaaaaatcattgaaaaatcaccaagaaactggtttctttttcaagaaataggtttcttgatgaagaaaccacaatttcttggtgatttttccgttgacaatgccaattctgacaactcttttgacgactttttcagcaccgaaacaaacttcggaaaagtcatcagaattggcatagtcgtcagaaaaaattaccaagaaactggtttcttgatgaggaaaccagtttgttaatgaagaaaccagttacttgatgaagaaaccagtttcttagtgatttttccgatgatttttctgacgacaatggcaactctgacgactatactggcgttggtagcaactctgacgactaatacaccagcagctactccggtgaatttttcagtaccaacagtaaactctgggaaattcgtcggaattggcattgtcgccggaaaaattaccgaaaaaatcaccaagaatctagtttcttttcttcatcaagaaacaaatttcttgataattttttttttttttgtaatttttccggtgataatgccaattctaatgacttttttagcgcccgtagcaattccggtgactttcccagtgccggtagcaactctagcgactatgccaattttgataacttgtttcagttaactttattgtttaacatttatatttcgttatgatttttcatagtgtcgaatctggtt

SEQ ID NO: 109227 - DNA, 577 bp, Cannabis sativa
  modified_base (27)..(27): a, c, t, g, unknown or other
actaatcagattgtaaagagttttatntagggcataaaacccaacaatgtacttgtacacaaaataaattattgtacaaattttgcatagacatgagattgattgaaataagacttaaatattgagaaaatataatcatgatttgattatagcttggaatatatttgataagaacttataagtgtcacataaatattgcaacaaaaagttatttactttgagctcctaatatattgaaaatttgaaatatgcgttatctaaaagttctagaagaatttaatacatgtctttagtgataaaaatttaatgctgcacacacatatgacaaagatctttgtgtgaataaagacatgtaagtaaattattatttggaaaacatgtatgattgtctatgcaatataaattcataaattatacgttgtgatagattcttgaagagttttcgattatattataaataattgaagaaaaaacttttaattttttgtatattgagaaatattaaatgtatatagtttgttcataagtagaaaaatcctgaagtacttcatatgcatcaagaattatagatatatga

SEQ ID NO: 109228 - DNA, 2079 bp, Cannabis sativa
gtatttttgtaacttaaaataatctatttcaatttcaaaataatgttaacacattaatgagaatatttccaatgcctacaattcaagtaatacaacttataattttgattgtgattcctcaatctgattgagggtaaattcgatttttaattaatctgatatttaatcattctaattacgtataggtatacacactacaaaaatttaagaaattaatcacattaaaagtagtcctttttatctaatattataataaaaatatggagtactatttactgattaaattggaaaaaaaaattaaaattttattaatgaataatttgcggtataaatacttaagtttaattttcagttgcaaataaatacttaagtttaattttttgcggtaataatacctaagttataattctaaaacttttataggtacctgactgtaaagtgttaagtaaattgccatgtggtaatctcttattggtcaagtgattaaatttttattttttttttaaaaaatagtttaaatattctaataaaaaataacacgtagataataattttttttttttgactaaaaatcaaaagctttatcaattaataatttcattcaaaacaatagaacgtactttagcggaacaatcatccaactgaaacacacaacctgtaaagaaacaagagtcttttgctaagcaatgagctaatttgtttgcagatcgtttaacaaaacaatactcaatatatgaaaaaactaaaagcaaattacggacatcttgaacaagtaaactaaattgagaaatcatataaaaatataatttaagtattattcccacaaaaattaaacttaaatatttatttataactgaaaattaaatttaaatatttatgccgtaaattatttttttattaatattaattaattagtaaaaaattattaaattataaggattaaaaactcaaaagtttgggtatagggaaaacattgaaaacaataataacagcactgaaattgacacgtacgatcataattgtttgtgcataattggatgaacactattttgatgatttttttagttaattaaaagagatattacattacgtgactatgatttaatacttgtacaagcacagaagtgaaagaaatgatatattttaaagttgttttgaaaaaaaaaagtaaataaagtcaaataataatgttaatccggatagtgatagataatgtatataatattagaaaagacaacaaaacatacaaattaaattattgctcatctccaaatcactttgccttttggagatattaaattattgaaaattgttataataaatcagtattgataattaagtatggaatctaaaaataatttaaaaaaaaatcataaaacgtcatttataaaaaatatcaagcactattaatattcaataacgtaggaatggttttaatttaatgaaatgagaaattatttcatgggtactatacattatacacattagagaaaggtataggtagctctaacactcatcattttatataggctaattagaatttttgcatcatgctcttgaatttttaagatggttaaaaatgcccctgaactagggccggccctgaaacaaagtgggccataggaagaaaaaaaaaatttgggcccttatgttagaaaaaatgtggtatttttcaaaatcgataaaaaatgtataattttaaaagaggaaaaaaaaattaggcccctgggctgggtagcccgcctatgctcagggtcgggcctgctctgaactattgaaattgttgaatttaaggatttttgtcaaatttcattcagttttactatttcaaaaattgtttatgtattaaattatgctcccaaactttgatatcttacaaatcatgtcctttaaactttgacatgtactaaattatgccctctgaactttcatccatgttagatttttttactaaaattagaaaaaagtcttataaaaacaatctcaatagttcagggggcatttttaacgaccttaaaagttcaaagggcatgatttagtttatgtcaaaattcatggggcaaaaatcttaattagcct

SEQ ID NO: 109229 - DNA, 596 bp, Cannabis sativa
agggcttttgcaattgatatgtgtggcttttgtcttccaatgcatactgtccttgatgtctcgctattcgcattcagtgacatatggtttctcgctaatatactaagtgtcagtttgtatattgattcctcgcctaagaccttacaatcagcaagttacaaatatactctaatacttacgtaattaatcacgtattcaataaaaagcgattgcatcgattcatattcattttatcttgacacgtgtcctccattgagatggcagtcgagttttggatataacaacgatcactctagactttaccttatgcaaagaaatttgaaatgtttgataaatttcatgaatgtcttgcaatttttgaaaaagataaaggtaagtggttaaaaatcttacgaactgataggggtggagaaatatttggttgtgtagttcaaagattattaagttgaacttttaattatatccaaacttaccttcctagaaatcaaattggatattgatgatagtataaggtttatgattagttactagcagctgcctaagtccttctaagggaataccctagtgataggaaaatttcaaaaatgatgcaatgg

SEQ ID NO: 109230 - DNA, 1107 bp, Cannabis sativa
ggtgaccaaatcccttctcgaccactgcgattaccttttgccttctctacaagcttttcactatgaaactcactatcaagcagatgaaaatgatatatcataagtatttggtgtgagcaactgatcaactcttatgcaattgcccttcaagaagagaacacaagtactgagtgagtaattgattttgaaaatttattaacatcaatcaatttattatactctattttcaaaccaacattttttaatttaattgcatgcccacgattacatgcatttttgtttcttatttattagggttaatagttctctttaaacaatttccacaggctaaaatagttcatggatcgatgatgtttactttgagtatagtaataaaatagttaatataagagacaaattatttaggcagaatcttatatataatgataatagtttgtgttacttggtatattagtttttagtctttacatgataattgggtattacattgaaaagattcaagtataatatagttagatatgtttttaagtgttttataatttaataattaacagccaaaatatggttgaaaaacttgtatgtttttatccatagtggtctattataattacttaagtcatatttagattgtattatatttcttcattttgtcctcaaaaactagtttcttgcaaagaagattcatcgaagatggatgggcttgatacactgcagtgatcttatggtatgatacactgctacagtatgcatttctttcttgttcttcaattttgtttaatttatagtttggttgctcgaaaatgttgaagggtttaattgggtttgtaattttgagtttttctgcaaaaatagagataacacagttgaattaaatagaatggatttaaatttaagattttcctgacactaattgtgtatacattggttttaatttgttgtcattgttatgacattttcaatttgtaatttggtcttatttgtagggcaaaactaataacaattttcaatttgtaatttggtcttatttgtagggcaaaactaagtaagagaacaaacttttcacttggttgtatactatgattctgttaattatataatcaatcataa

SEQ ID NO: 109231 - DNA, 1473 bp, Cannabis sativa
aattcatgagggacgatcgaacctgggacgtggatatggtccataaatggttcaaccggagtgacgcgaaagcaatattgaatatccaactaccgatggatgacacaagggatgcttggatgtggctgggggaacctagtggactcttctcaattatatcagcgtgtcgtagtgtcaaaggtgtcacacatacaaccctagcggatgcaaaatggaagttcttatggacatccaaaattcaccctcgtcttaaactcatttggtggcagcttgagagggatgcattcccaacaagaggtaagatagctaaatttatggaactgaatgatgtgtgctgtcctgtgtgtggggaagatgtcgagacaatttttcatctgatatggaaatgcaatttggctaaagccatatggtttaactcacctatggggcttcgggctgaattggttgatgtgaactgttgggaacattggaaaaattggtttaaggtggactttaatagacccccaaatctcactttccaagagattttgatcactgctctctgtgtggcggaaactgtgtggtctgaacgaaactctattgtgcattctcattcgagatgcccgcctccgaaggtgctacttaatgttaacaataaaattagagatcatctgaaggtggcttgcaacgaggtggcggaattctgtgaatggcgacccccacccgactcgtggctctgctgcaattgtgatatttctgttgatgaggaaggtgtggttctagcaactgtggttcgagatgacaaaggtaacattatcaccatcaaaactgagagaagtctctccactgatccgctgattgaggaagggcttgcagtctgcatggcggccgatttaatgcataagatgagggtcagaatgtgatctttcagagtgataatatggaggttgctacagatctttccatggagccagggaaggatatttacttcaaactcacgaatattcgtaagcgcttccatcagctgtgctcatattttactgggtgggacattggtcatgtgaatcgaaggtgcaattatatggcacataacgttgctgtttgggcgagggagacaaggaaaataggcttaacaaagcctacggatatggaccctactgtgcttaccgattacatcgaatggaggaagcatgctggctaaactgccgctgtttatcttcctaatactgatttatttctgtagtttatttttcgtatgctttatgttggttgcttatttttggtttttgctttcttgtagtttatattttctgcagtttgtacttggttaaaccttgattatttgtttaatcgatttgctttgggggtgttcacaccctctcttttatcaaaaaaaaaaaaaaagaaaaaactcttaacacaatttttttgagagaactcttaacaccattttagttcttacaacaattataatttcaatttatatatatatat

SEQ ID NO: 109232 - DNA, 1314 bp, Cannabis sativa
gtaaagagtttaagggtaagaaatagcaaactctcaatttctataaaattcggtagaacaaagtcacctacgtccttggccttcaaagctatggacctagctttgagtttcactatcgagccaatttaatgggcttgactaacccttacagccgagaatttttcacaaggtattttcaaacttcttacaatagttttccaccaccacgaaatatcaacctctttctcagattgttgtagagccaatctcactccaaccaggctgttaggttgtttataatacctgtgtcaacttcaccttaatcacaatttgaaaatgtgtttaaaattacaagcaaactcactctagaagtatgatgatacaatgaagaacctagagtgattaacaagcacacttagaagaaataaatacaaattttggcacaaagtgtgtgaaaagtattttgttggattttaaacttgtaagctcttaaaatcacttgaatatatttggtatatggaataaatgctcagccaacattttattttgagtgaaaaacgagtttatatagtgcaggaacaaaaactaaccatttatagtcattagcacgtttttcaaaaagacgtgctgggatgaacgatctgccatttaaaaaggctggccgaaaacaaggctgtggcaaaaggccacttttttggctctaaaacgtgcataactttttactcgtttatccaattttagaaattttagttttgttctcttacttcaatgatatgtgaagttaaaaatcaatttaaaaaatttagatatcatttttgtgaaataacttgtcgcacaagttagttagccaaatttcataattgttttaagtgtgaacttgtaattcactgtacaagattagaaaatgtaaataaaccttcatggagtcttgtattaagttccttgagtctttgagtccgctttaggtcactttcgagaattttaataaaattaccattttgtcatttgagttaatttttccttaaaagcttaattctgtttagttcttgctacaaaattaacaaatcattagtaacacataataacaaaatatttgttaatcatcaaaacaaagagacttaagagtttgagtcaataatctccccattttttgatgataaaatatttaattattttgaaaagggaaatgaaataaattgaaacaatatattagattagctcccccttaatgtgtgaaagagtttaaattttaattttaccttttagttttaccttgcatgattttgtaaactctccctcaatttaatatttatattcaaataacattattagtcc

SEQ ID NO: 109233 - DNA, 1753 bp, Cannabis sativa
taattggaccaaggaggtttggggaggtttggggtaagctaaattccttaaacattgctttatcttttggttaggtgtgaaaaaaaatcgataaatagtggcatttaatataagagaaatataaataaatgataaaattgaaaaacaaaatttaacaaagagatgtagcattgtagcatatatgtatatactttcacacgactttgaagatattcatactttaaaccaaattacatgaacgagtatcaaaattttcctcttttagattaccaaacaaaactcaaattggaatacgtttcattcactagaaaataaaaattgaaaaaggaccattgagcaacgtttacaatagttggtctcgttctagttgagacacgtggaggccaagtcaagctaaactgtcaaaacttggtcgtgcttatcttggctccccattaatttgttgcacccacccacctcaccaactcacatgttaattaggcttcataatctccaatggcctcttccctttggctcctttcgttatctttagttgagttggccaatcaaattgagtagccccatcgagtttctcatgtaaccacaaattattcaagcttccatgtgaggacacatatgttaagctttagataacagaacaatatctttacctttgtttcagtttcgaattcccaccaaaccaaagtctcccaaagagctccttaatggcaagtttggacccgtttgacagttgctttgtagaccaaacttaaatctccacagcctatgatgtttcaagatttgggatagtactgtgaggctctggttttctgtttcattgggcattaattgtttggaaatagtttgagtaggctagtatattattgttgtgtgtctcgagagctactgcatatggatcaaggaactagaaaacttgtcaagaagattatttgactggtggcaagtgggtataacgttgacaatggaaaaccagtgccaagatataatacccaaattagtatatatagtcaaataataacctcttttattgacaacccaggagtataggaatgtggagcttgtggctgattttctggcagagtacaagagcgttgtatttgtatagatagatgaccatataatataaccttggattttcatcaaagctagagtttgtaaaagtatcaaactggactggtccttgaagatcgatcattggatcgatgcaacactcaaaaatgacaatatatataaatgcagatgcataacttgaagctggaatttcatcactccgatagatcttgggagagatcttgaggttgtttggatgtggtttcagaattatttttttttaaaaagtgagaatagaaaatagtttttgttatttttaaaatttagtagtatttgacacaagttttttaaaattacttttaaattttttcttactatttttttttttaatattttacactataccatgacattaacccattctactctggacctgacccgaacatgaaccccagcccgagcgtagacttcgccctagacctgaacttggacccagacccaaacctgaacccggaccccgacctcggaccccagaccccagacccgaactcagaaccatatcccaaactgcaacctcggaccctaaccctagaccgagacccaacccgaacccagatcccaaacctagggctaggtcggggtccaagattcgggtcggggtcaagatttggggcctgggtctgggtccgagtcaggggtctcg

SEQ ID NO: 109234 - DNA, 768 bp, Cannabis sativa
  modified_base (311)..(313): a, c, t, g, unknown or other
ggacccagctcgtgacccaacacagaaaatggaaccagacagcgacctgagattgggatccggatctagacccagggctttgaaaaaacccgtagtttgagtttggatttgggacgaaggcctacacccgaaccctaacgaggacccgaacccacacccggacatgaacccaatcccaaaccaaaaagtggacccgaacccgtaccgtatgacccaaaattggaactaaaacttgaagttcattgggactggaactaggacttggacttggaatcataactgaaaaatggacctagatccagaaccgtaannngaccaggacccggactccaaataagacctagacccaaattgtgagccggacccgaatcctgacccgaacctggactcgggaccccaacccaaaccgtaacttagacccaaacatggagccggactagggccacagaacaagggttaggacctagaaccgcaccccactctccatctcgaacccaaactcagaaatgggttctgggacctgaaccagaaccagaccgagacccgtgacattgatccagatcttgacttgggaatcgggtaacgaggcttggaacagaccagttgtcggtgtctagatctgggacttagactaggacagaacccaaacgaagaaccaaactagaacacagacatagacctaggactaaaaattagaacctgaacaagaattgctgaaccaggaccctagaacaagactaggagcctgacgaggacccgaacccagac

SEQ ID NO: 109235 - DNA, 502 bp, Cannabis sativa
taaagttttaatttgacacttttcaaaaattctttgattaacaaagacaacactgtaattgaaaaagaacgtagcgtgccttagcattagggcgttacagttataattaaataatatataaatattaaagaaattaacaaatttttaaaatatgaccataattaaaaaataaaataatcaattattaaatttaaatctcaaaatatcaaaaattaataataatctattaaaaattaaatattattaatttaaaatgtatatttaagtttaaatacattaaaaataatatgttattttgaaattacggtttgaaaattgtaaaaatttgaaattggggaaatatcccacaaaaattggatttttggggttgcctgcccagtaggaggctgcatgtagcctccttatgtgagcggagagtggtgatgcagtgtgagacgccgaggaaactcagcatttggagccttaggacacgggtgcacgcaacatctcatgtcttatgata

SEQ ID NO: 109236 - DNA, 738 bp, Cannabis sativa
gtaacggggcctggaacagaccagtagtttgtgtctagatttgggactcagactaggaccagaacaaagacgaagaaccaaacccgatcctagacgtagacctaggacccaaaattagaacctgaacaagaatcgccaaaccaagaccttagaacaagactaggaccgtgactaggacgcagacacagacctaggaccgaacacagacctagcctcagactcaaactgagaatggaacgcgggcccgaacatggtcgtgtacccacagcggaactgagaccccgaccttgaccaaaatctaggacctgatcccaaacacagacttggacctggatagggatccggatacgaacctagactcggaccaagacctagagtgggatcgaaatgctgaaccaagatctggaccgcgatcctaacccaaacccaaacttggacccgcactcgggacccgaaatgggaccttgacctgaacctagaccttgatcggggtccagacctggacagaatcccggacacagactcggacccgaactcaaaacccacacctagaatcagatgcaaagctagacctgaacccgacccaaactcgaacccagactcggattagaactaaggacataaacccaaaactaaatcgagactcagatcgcgattataacttgggactcggacctaacatagaccaagacccaggacaggaacccacacccagagcctgatctggacatagactga

SEQ ID NO: 109237 - DNA, 1151 bp, Cannabis sativa
taataaaataaaaattaaacatgcatgatttaaaataaaatgatatactatacaataaaacttatataccatataacaaaaagcatatagttacaatcaaaatatatataataccaataaataaaaataaaaatatagaatgctaataaaattatatattatgtcaacaaaagtataataaaaaaataaaacttaaacattgttaaaaaataatgatattaccgtctaacaaaaaatacatataccattcaccaaaatatatactaacaataataataaaaatatatattactaatatatatatgaatactatactaaccaaaatatatgccacaattataatatatatcatgacaggagcagagcgaggacttggatgcaagggggccaaattttaaaatttagtataaaataaaattttatcatatatttattttcaatattaaaattaaaaacagtttcttttgtatattaaaaattgtctataaaaatgtcaaaataaaataaaaagtactatatattattcaaattaaaaatattaatatacttttaattaaagtataccttaaattttaaattggaaaataatttataaaacaaaatatatatgaacaaaataatttttcacatttaataaaatttaacacttaactagaggagatcataaatctcaacttctactttaatgataaaagttatcaattagtgaatgattttgagcgaaatgtataaaaaatatataacaataaaaggtagtagaaatagttgaaaaaaataataattaataagtaattgccttattttatttaccttctactcatataaatttaattttatgtcaatttacttttaaaagaaaatcaatttctattttattttttaaaaaattaaacacttaatttacactatatatatattatcagttatctatacactttatttttatatattatatatattaattagtttgtttttatatatatatgtatttttatttataaatatataaatatttacctatatatagaaagggatattaaaattattggggggccatggccactctttccttggctgtggctccgctcctgtatcatgaccagtgacaaacccaaaatttttattttgtgggagcttatttatcataaaaa

SEQ ID NO: 109238 - DNA, 602 bp, Cannabis sativa
tgctaataaatctattagtttattctgacatattgaaacaaaattttatttttcttttcgtatattggaacaacaattcattttatttcatatagactactattatatatgccaataaatctactagtttctgtgtgttagaacaataatttatattttttaatacagagtaagctataatcaaacataatgatatacaccaataaatttattagtctatttttcatatattggaataacaattcattttttcaaacacaatctatcattatgtatgcctataaaataatatttttaggttcaatctagtaagcacattgttagaaattctttttaaagttaaagataaaagagagagaaagaaaaaatagaaaagataaaaagagagaaaataggtaaatgatgtattcttaagaaataaacttaagtaaataagtaaatattaataaatttttactcactttcaataataaataatttttttatatcaaaaaacaactaatatggtaaagtatgtaatttttgcaagctattaataggggtgttcattcgatccaatccgtacttttttagtcaaacaatatccaatccgcactaagtgc

SEQ ID NO: 109239 - DNA, 924 bp, Cannabis sativa
  modified_base (33)..(55): a, c, t, g, unknown or other
tgtaaggttttctaactttatatgtgtttattnnnnnnnnnnnnnnnnnnnnnnnaggttgttaatccaacatacatgatagtaaatagatagtgggaaaataattccaacacagtatacccccctattggtcctgaagctagtgcactcttgatccgctacgtgcatcttaatttggttgtaaccgtcgtatgcgtccatgaagagcaatagctctaatctggaggtggcgtccaccatctgtcgatccttggcaaaggtaaacaatcctttgggcaggctttgtttagatcggtaaagtctatacaaacccaccatgttccgttgggctttggcaccagtaccggattggccagccttccgggtagtagacatctcgaatcatgccactcgttagtagtttgtccacctctttttctaaggcttcaatctttactgagtcgaggggacgtcgtttctgctggactggtggcatgtccgggttgacattaaggacatgggttatgacgtggggacttatgccggtcatgtcttcttggcaccacgcgaaaacatctgtggcgctcctcagtgtttttattattttttctttttcctccggttctaggtttgttcctagccggaggactttgctggagtcgaggtcgcacactgacacttcctcgacgtcctccattggttctacaattttttcagatcccacgcagcgatccagctcatcttcttccgccatttctggctcaataacttcttggaccattaggacgggtaggtgggcagcaacgttgtaacactgcctagcctcgccttggtttcccctcacagttcctaccccatcttcttgagtggggaacttcaggcacaagtgccgtatcgacgtgactgcaccgaaatccacctgggccggtcggccgaggattgcat

SEQ ID NO: 109240 - DNA, 663 bp, Cannabis sativa
attattagacattattatgaactgaagttttacgagtaattaataatagttattcaattaattgatattaaataaaattataacaataattataatattttaaactataataaaattacgataagatacaagtaatgtgtagcattatttataggttagttagcgatattatttaaaagttattataatgatataatatgttagatggtgctaaacactactgataccttttagcatttctttaagattaatgttcagtagtagctaacaccctcttaggtgttatattaataaattaattaaaaggtaaatagtgacatgaatacttaaagttttaaatttataagtgacataaactcaatatttatttttaatggcataagtatccgatatttgtaaaactgtaatttttctctaattttatcattatggactctgttattatcttaaacaggacacatataagactcaaattctagataaaaacatgtagtatcaattacttacaaatattcttttaataaattcaaaacagaatttatactgataaaactgaagaaaaattatatttttacaaacactaatcaaaacattaaatttattttacctacaaacttaaaattttaaaaacttataccgttatacatgtattttaatattttt

SEQ ID NO: 109241 - DNA, 565 bp, Cannabis sativa
acttaactaaccccataaaaacactaattgaaattaacctaataatagtaaattaataaatgaaacaaaaagcatacattcgtatatatgctaatgtaactatatgtgtattgattacaaattacgctaagtaaatgcagtgtttatttagaatttacacagctgtgagtatcccgtttttattgggtcgagatgaacgcatattaaagatatacggtaagccttatctcatgaggatgcctcgctaggaatggagctgagttaactttgatggggaactagtgctcgtcatatgacttctcgagattaatattactttaattctgataactacattttctgatatcgagatgatctttctcgcatgcataccatcatacagggagatagacgcctcgctgtctgtcatcttgattcaccaaactgtatattcttagtttgtataccatgtaatatacgctaagtgtttttattgttatcgtttctcttccacgtaacgaggttgaagccgcgtcatgcacacttgcactcacatggtttctcgttgatacataagttagcagtt

SEQ ID NO: 109242 - DNA, 677 bp, Cannabis sativa
cgacattccctcaatttgaaccagttcagtgaactctttccgctttgcactgcggacaacttcattgtaatatttggagttaaacaactccttgaactcctcccaggtcataactgtgaagtcccgggtgagggttatcaattcccaccacacgagggcgtcttcctgaaattggaaagtggcgcatgtcacccgatcattaccaaccactccaataaaattgaggatacgctcgatcactgtgagccactggtcagccttcattacatcaggacctccaagaaacactggaggtgcctgcttccgaaatctttaatacaacggctccatacggttgccaacaacaggttgttctgctggcactgctggaactgcaacggcctgagcaacttgaggaggcacggcaggaggaccctgctgcctcaatctctaaatctctttatcttgttggcggatccgatcttgcatttccgaaaatctttgctcccaattcggaggagcttgtggtggatttacagggcgaccaccctgagctctgccatggccacggccgtgaccaggtggattttggggatttctttgaccgcctccagtctcaaccatatcaccctgacttcttgtattttgcgaggcatccattttataggacttaacctacgaatccataagccaggcag

SEQ ID NO: 109243 - DNA, 1281 bp, Cannabis sativa
ggagtggatttgcaatatatcatgaatttccagatagactacggttaatcatacacacatatatatgcccctcaagtaattttaaagaataaaactttgtaattacttgaatagtgctttagctttattaataattgaatttcaaaattacatcagaaagagagattacaacattagtttactggtagtagggttgtaaatgctcaacattctagtggttccttattagtgagccgttaagccgggctaatttataaaccctggttcccactattacctcgatcacataaggcccttcccagtttgggttaaatactcctacagatgcatctctcgtgtttgcaaatactcgccttagcaccaagtcactaacgttaaagagccttttcttcactttcttgttgaaatatcttgtcactcggtgttggtatgctgcattagtaatttgcgacttagtacgtttttcctcaagtagatccaaggataatttcaagagttctcggttttcttctagattatagaaatctcgtatgtgggtcgcaatattgacttctactggcagcattgcctccgagccaaatgccagtgacaataaagtatgccatgttgttattttcttagttgttctgtgagcccaaagtacttgtagtagttcatcaacccatcaaccttttgtagcgtccaacttctttttgatagtatccttcaaggttttattaacaacttctacttgcccattcgcttgaggccttgataatgacgagaagctcttaataatcttattcttctcgcaaaacttagtgaataacttaccatcgaactaagtttcgttctcagatactatcttaatgggtattccaaacctacaaattatgttcttgacgacaaagtcgagaactttcttgcaggttatggaaacaacaggttccgcctctatccactttgtgaagaagtcgaccgccaccactacgtacattgctcatccttgccctgtggggcgtgccccaatcaaatcaatctcccatactccaaatgggtaaggcgaggtcatctttcttagatatgtgggtgggacgcgaggtatatgtgaaaacctttgacatttatcgcattttttgtcaaattcgtgtgtgtctttatttatagttggccagttagtatccttgtcaaattattttctttgacatgctttgccaacctccatggtctccacaaaagccttcatggatttctttgataatcttatttgcttcagtggggagaacacaccgtaggagaggc

SEQ ID NO: 109244 - DNA, 834 bp, Cannabis sativa
tcttcatggtctaaataccataagaaccaccactgctataactggggcattaaggaataagccaaaacagtacatgagacaagtagtatgctcaaaactacatcttgtacgaaaaatgtttagcttataagtgccccagtttcttagcagttcattccaaaagcttcattaaatgttctagtgactcatatcgcaacgttccatctacaaataatgagaagactttcccaaggaagtcaataaaatgtaacaacattgaatctaacagtatgtcagtgtttgttattggaacgatgagtttggaagaacaaattgaagagttgcaaagaaagttggcagagaaagacgccgaagttgaacatcttacaacacaattagctaaacaagctagtttaagtaagcaaaaacaagtagaacaggggcaagtgtcaacaactttgcaaacacaacctttttcaaaggaacaatcaagtatacaggagcaagcagaactagggcaagtgtcaataactttgccagcgcaaccttgttcaaaagagcctacaccatcaacttcaataccccatcaagaattgaaagcactaatcatggattgtatccaagaatgttatgaaacaataaacatgcctattcttggatatcataaaccatacccgtctcattatgattatgttccatatcccccaaattatataaacttacaatttaaaaagtttgatgggataaatgggtcccccaaagaacatctggcgtactttgtctcggcatgtggtgaatctgctcagtcagatccattactcataagacaattcgtacaatcgcttaaaggggtgg

SEQ ID NO: 109245 - DNA, 1976 bp, Cannabis sativa
  modified_base (356)..(356): a, c, t, g, unknown or other
  modified_base (1288)..(1291): a, c, t, g, unknown or other
  modified_base (1458)..(1476): a, c, t, g, unknown or other
  modified_base (1605)..(1631): a, c, t, g, unknown or other
aatgatcatggaaatcaaagaaaaagactctacagctgtggctgagagcaatggagatggaagttcaaatggggaattattttctatttcagaaaataataacagtaaagagtggatccttgattcaggatgcacttatcatatgtgttccaacttagaatctttctttgattttcaagaaaccaataatggtggtagagtactaatgggtaatgatgtttcttgtagggttgttggaattggtaaggtggctataatgcaatttaatggtgaagtgaagattctccataatgtgaggcacattccaaaattgaggaggaatctaataacacttggaaccttggaagatgaaggtnatggctataagtccttgaatgggagcctaaggatcacaaaaggttcaatgcttgtgataaaaaaggaaagagagtacatggtttgtatgtgtactcgagggtgaaactgtacctatggccgaggtagatatagtaaaaggtttagaaagtgttatgcagctatagcatcaaaggcttggacatatgagtgaacaaggcacgagggaattgcacaagaagaagaagtgagtcattgaaaagcttcagacatgtgcattaccattctgtgagacttgtgtttatggcaagcaacccaagatcaaatttacatcaacaactcacaacacaaaggcagttctaaagtatgtgcatgctgacctttgggggccaagtagaatcccaccacatttaggtaaaccctactttttatctattattgatgatttcgatagatgtgtttggacctatttacttaagaccaaagtgttggggattatattactaggatctagatttactaacatgtatgttatttaatgccctaaatatgaattctctaaaacaatggaattaaacataaataaaatttaggaaactttatattggtgggaatggaataatatatctccttccacatagatctctaacccttgttcatttttatcacagagtgttataaatacctgagcctgattctccttcaggtgttggattcttctcagtcttccacactatgattgagtacttaacttgctatgggtaggtatggactctttcactataagggacgaaatttatgaagggaatcagaaggagattcgaattctatagaagaaggctctcaagtttctagttgtctaacaaagttagaaaactaggttaacttggactggatgggaatgagagccatcttattccttaaatagggtttttcctagggttagatttaaatnnnntggaattaaaaaagataaaaaatagctaaaattctccttaagtgattggacatacaatgggccccactagttagaattttgccattttattcaataatttatcttttctttcactaatgccatatttttcaatttcaatcattcaaatgtcaaaactatttatttannnnnnnnnnnnnnnnnnnaaataaaattgtcatttaatttatttattgattacacttaattaagtctcttaattaacaaataaatcttaaaacctcttttattcaaaattaagcccttgctaagtgaaaattcataaataagacatnnnnnnnnnnnnnnnnnnnnnnnnnnnaattaaaatcaattaactaagtctacatagtattatttaacctagggtgggaaccatgggcctatataatcaagcttccaataagcagatctaaaatttactaagcgccactatagtttcggaaattgtactcttaattatatagaatgctctatatgtttcaagataaagatacactataattatttatcgttctaatccaaataaccaaagatccactatagatgatttacatcgactaagaacaaatttaccattctaatgtattttatccttaaaacacttagcttcctatacatgatatttcattaaactaatataattactgaaataagagctcttcca

SEQ ID NO: 109246 - DNA, 600 bp, Cannabis sativa
  modified_base (270)..(271): a, c, t, g, unknown or other
aaagctagactggtatgtttgaataataccactaaacaagaagaatcagattctgatgattctgaaatctgtgaagagtctcttgctgaatcatacaaagtcatgtatgaaaagttgattcagttactgctgaaaatagagagttggttaaaataaataaaaaaactgtctcatcaaattgaaatgtctgagttaaaaataaaagaatatgagacagatttttgtgttaaagatgaaaaaatcactcttttaaagaaggaacttgaaaannttaagaaaaatgttcaaatgcttaatcctggatattctaattttgaaaagctcaaaatgcaggtcaaagaggttttgcaggcattacatcaaatgttatggaatgtcctggaatcacgaagtttgtaaaatctagtgttccgatgaatcttcctgatgctacaaatgtgaagtctgctgtaacagtttcacaacctgtcgttgaagaagctgtttctactgtcgcaaaatccccaggatttacaaaaaaagtaagatctgaggtaaaaagatttattcctacttgtcatttttgtagtagaaaatgtcatatcaaacctaaatatttca

SEQ ID NO: 109247 - DNA, 592 bp, Cannabis sativa
cattatcaatatccttcccagtctccaaactcgccaacgacatgaaaaccaccacatcatcacgatcatccaatctctcactccttgaccgagacgattcaaacgacagaaacctaataactgtcagattaatcttttgatgcgacgcgatcctcttactccatgcgatcgcctctcgattatcgggcccaccgaagaacagcgtcgccacttgctgaaccgttgtcgaatccagaagtgacgaagtatcttctggttcgtggtcctcacaccctccttcccactctccatcttcccaacgatcctttgctgcttgtgaaacgacgcgagtatgatcgacgcgcggaggtcttcgtacatagtagcgaaggaggagactgccttgatgaggcggacgaagactttggtgtcggtgtggaaggcgtcgactacgtcgttgatctcgacgatgtcgtttccaccgtagtcttcgttgtcgctgagctcaccttcttatagctcgtgatacgatgatggggctgtgggctcaggtcaagtgaagatggggacgatgatggggctaattttgggggctagggtttcaaagatgaag

SEQ ID NO: 109248 - DNA, 2975 bp, Cannabis sativa
ctaagttacttaaaaataaaaaaaattccttttcaaatttgtactgaatgggaaacttttgggatcttatagattcaagaaattgtttatcaattaagaattagtttgatgtagatacccatcaaatcattatattgtatttctgaagcaatttactttgcctatttgcagttatctggtcgcattgccttgtccatacgcggtgattgtgatttcacagctaaagcagaagttgcacaggcaggaggtgctgctgcactattggtgataaatgacaaagaaggtttcattctttcctcctcgctttttaaatattataatactcttctatcacatgcacttcttaatctgttaatgaagcttagttttgatgaaagacattaacctagtcagtcgtaggaaagtaaagccttgatgcaggccttcaatgtggttgtgcaacttagctgatggaaggtcaacgttgtgcaagaaaagaggattattttgtttattatatgtttaagttagctagatagattactgagaaaattagccatggtgtgcagctataatatagatatgttagctgtttaaagtgagggagatggtgcccctaatatctcgcctctgtattttatctatttgtattttcatccatgttgattatatctctcagaaacttcattttgcagtcatttacgacttgtaaaccatccttattggacattgacatgctcatgtgtctcccaccaccatttcaggcatctattttgaggctgtcaaattatgtagtagctttctcaagcaaattgcttttctttcttttttttttagttttttattatttttttttttatgaaaaagagattgagggcacttgtcttagactaaccccctcccaaaattcattcgggagcattgcttatggcggaggaaaattgtggttacaaaacaagcacgagactcaaaaataatagataaatacaaacatgaatcttatttacagcagactatgttttcttagtgcaaaatgagactccattctctagtcaaatcttgaggtgctaacccctcaaacccttttgacttaaatagtcagttagccacccagtatttaatctttccccaaaccacttcagccgcattttcaactccttcaaagatcctcccacttctcaagcaaacaacttagtttcatctggtcctccatggacctcttataattaaaattgtagcataacattttcctgtgaaggatatatgtgaaactcttatttttatgtctgttttcaccctttttagttgtttgatgtgaagttgggtgttcatctatatttggcatggccagaatgaaagagagagggagagtttctcagaatcctgcatgctctccttgtgaatcctaatgattatagggttaaaattccattcatttgtgggtggggagttgattggtgggaagtgtgcacttgtcttagactcctcccaccggtgaattatgtattgataacctcatttgttgtggaggaataccatgggaaacataaatataatagttcaaatcaggaaacataataatacagaacatattttctttcttggtgtaattaactgctttgtttgttctgagaatggcactgctttgtttttgctttttggtgtaattaactactaccccttgcacacttgtgcttttttcaaaaaaaaaaaacatattaaacatgtttttctaattgaattttgttaacgatagttgatttgtccaaagtagtaaaagaagaaagtaagcaaaacaaacatgttgcaaatggaaattaatgctgaagtgtttttttttttgactcttcacctctaatgctctcttttaaatctatggtatcagatctttacaagatggtttgttctgagaatggcactgctttaaacatttcaattcctgttgtgatgattccaaagtctggaggagatgctcttaacaagtctctggcaagtggaaagagaggttagttgtaaaattcttaaacgttggtcaaaattgtgttacctagaatgttgattctggtgacaagaggaagtaaactgggaaacaggatgcaatagtcacaaaatagaaattataatccaactttctaacactctttttagattctgaattatctaacatttcctacattgtatggtatagtgtttgaataaataaactaaagacgcaatggacttccaagggtttcaatgaaacttatggagcatcttataatttctattaataccatattcacattttcttttgatacccttatgacataatgtctcgctttctaccagaaacctccttgtcatttatacaaaaggactttattatgaagctgtatttccaaagttgccaaatgaactatcacgtgctccattgtcgtcccaaagaaaatttccaattagtctttgagtctgtgtaacaattgcacagggtattttgaattaataagattcctccagggttgatactatagcttcatgtcttctaaaggttaagcagtccaaatagtagaaaaatataagtaaattatccttgctactttatattatacaatgcctttcattatgctttgctaactaactctttaattagcaagaagcttgtcattcagattgttctctttatatagttagctaatcaatccactgatgattggacatattataatttttttttacaattgatttttttttaaacacttgattgaactatttgtttattttctgtgatgtacatgtgagcaatatttccttccaaattgtttttttttttcaaacatttgttgtaattaggatattgcttttttttttccttcttctttttaatctttcaaaatgctctaagaatgtgaaaaatgtacagaagaggttaatttaggtaggggtttgatgtaaacttgacggggtttatagctttagaatagttttagccaactaatgcttgactgtgccctatgttt

SEQ ID NO: 109249 - DNA, 799 bp, Cannabis sativa
ttcccaatacaagagtaaaagtagcagctagagaactaccaataactacactaattaatggagtcattgagagctttgatacaacaatagaatacacaaacaggaaaaaagtgcaaaaaaatcacaataattttgacacctactactgagaagaagttagtcgataactttgtggactcattgacaaaaaatgtaagaattcgttaaactcctagtttcataacaattgcgttgtagtttgtttttggttttgttagcatcaatctatactcgaaagtatcactgaccaaataatattattgttaatcaatactataactgtaattgtgaataacaatatgttttggatttaacaaaaattgtatattaaaatcataatcataaaaataacatgtaaaacttagatagtttctaatctactattgatagcaaataagattatattaaaatagattttatatagagcataaaatcccaatatattggtcgaagtgggttttgatggtgttaaaaaaatagagtttttgaatgaaaaattgaagatgataagaagaaaaaaatattaaattagaaactaaaaataataagaaaaaaaaaaaaggagagaaaaggtaatgcaatttgaagtgagacgcgtggagtatatataagtgatattttagtaaatgaaagttgaaaacaaaattattacctacacctcattaaaattttaaaaaagaaaacaatatcattattatccaaagaaaatgtggtctatacatttttaatttatatataagcaaaagattctctcaataca

SEQ ID NO: 109250 - DNA, 1566 bp, Cannabis sativa
aaattaataaaagaattctcaataatttaaagataacaactctcaaaaaaattatagttaaattaaacttatcggtaaatctctgtaatagttggccctcctaaaaactgacatacaaattaacaaaataaaactttattaccacacaatttaaagaaaataattaatgtgaataaagatgataaaacaatccatattataatatcaaggcttgaaacacttatctgtcagatctgaaaaagttatttgtagatgacatgactataaaaaaacattcattgtgcccattgacatatcacaaaataccctaaataattaggggcaagccataaaaatggcacaaacaaccataaaaggcatgagaaccatcaaaaaaatggtgcaaaaaccaaccgtcatcaaacctaaacatcactattaaactctataatataataaaaattattaattaaagttagatacactatagaaataaaaattaaaatctcaaaaataactattagtgtatataaatacaattaatatgaataaaatatttcactaaaaattaatgtaaattattttaacaaaaatatatatataaatgatatttatttaattattaaataaaattaatatacagtatataataaaattattaattaaaagattatataaaagataaaaaaggaaataccaaaacgtcaagcaaaaaatcaataatcaaagtaagtaaatggctaaaatcaaagctgaaaccaagaatatttcagccataaagatgcaataaatagcgcattcagacaataaaaccaaccataaatctggccatgtagtaaatctatttaaatatggaaaatatacataattaaataaaattaaattaaaatgaatctaaaaagtaaaggccatatttattttaataaaaacagattttaaaaggtaaaaataaaacataattaacatcattaaatatggtataatcaccaaaaattggttccaagtgactgaaaacacacaaattaccactactatcacgtcaaaagtaactcaccccaaaacccaccagctgaaacatgaagaacagaaactcacttcaacaatggcagcatccatgagcctgaaatctttaagaaatctttgaaaacgaatttttaattattaaagaataatataacattaaattaaaagtgaaaaataaaacaaaaccaaaatagagaaaaacactaacacaaataatattaaatgaaatgcaaaatcaattttaaaattatattctaaaataaataaataataaagagaataaagaaacataggtttgacctcaataataatgaaatacacaaaccataaaaccttacattgacttctgttgcccttggttttgtccaaaatacgtggaccaaccggattgagacacgtagactgaagaggttaaactctgggataattcaactaagtctctttaatcaaagggatcaacaatttaatatgcctccctgagaaggcatgtgagtttcacatactcccagagagcaaagctacaacaaagcatctccgggaggtatcaaatcctatctgaacagt

SEQ ID NO: 109251 - DNA, 604 bp, Cannabis sativa
aacataaattaaaataatttttctagttttattttattttattttaatgaatttcaaaaatgtattattatacattggattttgaattcaagtatatatatttctagagaattaaaatttgagtttaaaattttaattaattttggagcaacttaaattaagtaattttcattatatttagtggaaaatttatactaaggatgaaaaatattttttatttttcaaatctttctagggtataattttataaatattaaattaaattttatatttagagttatctaaattaggaattttaattaaataaatagattaaataagtattaaatgaaaatacaactcttgaaaattatgagctttagctaaaaggatattcgatctccattgttggttctacacagttcttgttttagtgagtaatcatccttaatggatgaacatttattagtaatttaacaccgtagaatctcgaaagataagtagtattgtaattgttttattcttagtaacgtccaccctaaagtggatgctaagagtaagactaggaagatatgaaacaatggtggaagctcataagatagaatggcctcgactctcgcctaaa

SEQ ID NO: 109252 - DNA, 654 bp, Cannabis sativa
  modified_base (197)..(197): a, c, t, g, unknown or other
  modified_base (399)..(403): a, c, t, g, unknown or other
actcgcaaccattacaccaaagaaagttcaagactttattgtgaagaacataatttgccggttcggaatgttgtacaaaatagtttcagataatggcaagcagttcaagacttttgtgcgaaccttggtccaatttcaattatgattccaagtccaagtcctagttccggtcccggtcaacttccggttttggttcnaattttgggtcacagggtacgcgttcgggtccacctttgggtttgggactgggttcaggtccgggtgtgggttcaggtccaaggctgggtcccaaatctagacaccgactatggtttttgtccaagccctaggtccaaatcccgatcccaatctcgggtcccagtctggttcaatttctggtgccaggtcacgagctgggtnnnnngttcaagttcgggtcttggtcgggtagtaggtctcggtcctagttctgtttcccaagttcctatcctgattctgggtgtagttcttggttattgtgtgggtttaggtcccggtctaggttcgggtttgaatcctagtctcggttcgagttcaggtctctgtctgggttttcatctgggttcgagtttaggtttaggtccttctgctgggcctaatcctagtttggttctagttccatttgcgattctgagt

SEQ ID NO: 109253 - DNA, 910 bp, Cannabis sativa
  modified_base (842)..(861): a, c, t, g, unknown or other
aaaaaaaacaataacgaacaatgcatcaatctcacgaaatggaattaagcttactggataatgaatgctcgtctcgttgcatttgtaagcctgaaaataattatataaacaaaatgaaaagctattagagagttggcaaaatattaggaaccaattgataatttcataggatatgaaatgaatctttgtaatcggtaccaacatagccaactcgcataactactttcttctttcgtaagggttcccatttccccaaatcaattattgtatcttgggtggtaaaggacgcagaagaagtagagaagcaaagcccaaactcctgaatgcaaaatctcaaatctcaaaatcacagtgtatattgcctcacgatcatcgcacccaaagattcggaagaacaaaacccaacatcaaccacaaacgaaaagccttcctaaatagattcaacttctgacctggaaacaaaaaataaaaactaaaaaaccaaaaataataattataattataaaagttagaattagaagagcaatgtacaaaaacataaaataataattataattataaaagttagattagaaaagcgatcttttattcaaggaaacaagattattattatcattctttttcgtaccaatctcatcagaaaaactcaaacttttcttttttgattgggttcacatttattgttttagtttattgaatgttgttaaaatcagtgtatatggtctcatgaaatactttttgtattctgcgttcgtccatcaccgaaacccctaaagtctacaatcaaaatcttatcatttcggaacttaaacctgtttgttttatttttattttattatttnnnnnnnnnnnnnnnnnnnnttattattttattaaataaaaatataaaatcacctatgaatttctcata

SEQ ID NO: 109254 - DNA, 634 bp, Cannabis sativa
gtggattggattagatccaaaaatgaaatccgcacttagtgcggatcggatgcactgtgaacaaaatagtgcggattggattggatgaacacccctaggttaacccaaccaaaccaactaattttattgaacgggttactattttcttttttcttaattggatgagttgcacttagatttttgtaattcgatctttacattagattgaataaaatgtagcataaaccgaccaaactgagcgacatacacatacatccctactattgggatacgtaatttggctccagtatttgagtccaataaacatatgtacaatataactatactaaactagttttataactataacatttgatccatgccattaaattaataaacttaaattttttataataatttgtatctaaataatgttttttagtgataatgtatccttttgaatatcacaaaaacttataatatttagttagaaaataaagtactataaacttttttagatgtattaaaaactattcagattatgatagtcttaccttcgatcgtattcctgtctctcttcgcagcataagtaaataaggaattgtatatatatgctgcaattatatatatccaaatgagatttttgttataccat

SEQ ID NO: 109255 - DNA, 1197 bp, Cannabis sativa
  modified_base (1145)..(1146): a, c, t, g, unknown or other
gttcttttcctacagaccttaacataaccattttggtcttaatccctaaaaagaagcagcctatggatatgggggatttaagacctattgcgttatgcaatgtgctgtacaagatcgtgtccagagtggttgctaatagacttaagagtgttatgccgtctatcatatctgatactcaaagtgcatttttacaaggccggttgattttggataacatcatgattgcttacgagattatgcatcacttaaagaggaaacgaagagggagggatggtataatggcactcaagttagatgttagcaaagcctatgataagcttgagtggggttatctccgggcgatgatggtaaggatgggctttgatggtcgctggattaatttagttatgcaatgtgtatgttttgtttcctataccatttcacatggcgaaaaggagttggggcccattgttgctcaaagagggttgcgccaaggggatcctatatcaccatatttgtttattctttgcgttgaaggtttctctaatttgttgcggagttatgaaaaaagtggcttactcatggtgtgtaaaattgctcgaggtgcgccggtaatctctcatatgctctttgctgatgacaactacatttactataagacaactgaggaagaagcgtacaatgtgaaggagcatctgcatacttacgaggtggcttcggggcaaagaatcaatttctccaagtctttcgtgttttttagaaataatactggaattgaggtgcgggattccatttgtgctatgttggaaatttatgaggccgatgaaaatggttattacctgggtctaccgtgttcgattgggagaaataagaatgttattcttggtttccttaaggataagcttcagaagagaattcaagggtgggaagggcgtatcttgtctcgtgcgggaaaggaggtattgttgaaatctattgctcaagtcttgtcgagttatgctatgaatgttttcctcttgctgtcagacacttgcaaggagttagagcggcttatggccaagttttggtggcactcagattcaagtagtggtaagggtattaattagatgagctgggagcagttgtgttgccataaacatgcagggggattgggatttcgaagcttnngagactttaatttggctcttttaggggagcaatattggtgtttgttggtta

SEQ ID NO: 109256 - DNA, 763 bp, Cannabis sativa
  modified_base (37)..(53): a, c, t, g, unknown or other
tgtctctttattgatatttaaatgatagagattacannnnnnnnnnnnnnnnnttagggcataaagcccaacacgtacaatttccaagtatccgcgtctcgttgaacaaggggattttcttctggagttattccttctattaagaaatctgccaaggcttggcccttggtggatgttcttgggtgataagttatgtcaaactgccccagttcaattgaccattttattaatcttccagaagcatcaagtttttataaaacttgtctcaagggttgattagttaacaccttaatcggatgtgcctggaagtaggccttaattttcgagatgcatggattaggcataaggcaagtttttcaagagggggatacctcgatacttctcccagtaacctcttactaacatagtaaacaagttgtcggtgcttcccctcttcacgcattattgctgcacttatcgtattttctgaggcagccaagtagggaagtaatgtttctccagttattggttttgccaaaactggaggtgtcgataaatgcctttttatgctcttgaagacctcctcgcactcttctgtccactcaaacattttgttgcctcgaaatacatagaagaatggtaggcacttattagttgatttcgaaatgaatctgttaagagccgccattcttcctgttgaggcctgaacttccttcggtttagttagtgatggcatctctatcaaagccttaatcttctcaagatttgcttcaatgcccctcgc

SEQ ID NO: 109257 - DNA, 625 bp, Cannabis sativa
tgtgagtttgtgtctcacttcttgttgggctgaaccattgtgtgagtgaagagagaagagctttgtgtaacttgttggacttggctcttggattattgggcctgaaataaaaaaggattatttcacaaatacacaaaaacaacaaaaaaaaaattacaaaaatacggtttcacaaaattttcaacatatttacgatttttttatttttctttacagaaaatacggccattttatattgtactcttgtttatttgttgttgattttttgttatttgtatgttatttttttttgttgttttgatattatttaaatgtaatttgtatgttacttttatatagttttcgtgttgttttaatgaaaaaccgtaaaaatatataaaaaaaaatgtaaacaaatgtaaacgtaaaaaatgtaattttttttataaaaaatagtgtcttatgtaattattccaataaaaatatcaagttttaagggataattatataaggcattattttttttaaaaaaaaaaatttatatttttacatttagataattttttgtattttatagttttctataaaaatgacacgaaaatcactactacaaaaaccccctttagaggcggttttttagcccttt

SEQ ID NO: 109258 - DNA, 2470 bp, Cannabis sativa
  modified_base (1002)..(1004): a, c, t, g, unknown or other
  modified_base (1879)..(1885): a, c, t, g, unknown or other
ctgcttatgtgatcatttgcttactgctttccattttaggcagtatgtaggcatctagagtatttatatgttatgtgatgccatgctttaaatgctatatgtaaatgtttatttatatggagtaatagttgagttagggtttaaggcaataagtgcataagtgtggtattggtgcctaactcgctggggttgttgattacatgggtactagtaaatggacccttcgcaatcatctagaccacagggcgagcaagtagagcttggggttgaccaaaccaatccactggcaccgcctgcatctccgcagaattcgagggataatgcgggggttggcaatgctaattctcctgctgactggcagcagatgtttcaagaaatgcgaggtatcaattttaattcattttagaccaacttaaattaagtaattttcatcattaaaatatatagattaaaataagtgattaattaaaaatatattattttaaataatgagctttaatcaaagagatattcgatttccattgttggttctacatagttcttgttttactgagattcatccctaatagatgttcgttcattagtaatttaacaccgtagaatctcgaaagataagtattattgtaagtcttttattcttagtaacgtctaacctaatagtggttacttagagtagggcttacaaagtatgaaacaatagtagaagctcatgaaataggaataaccttgactctcgcctaaatggaacaacgtcggattctcttttcgatcgaataaaaggttgctataatggatttcatttatatgaactgactactctattcaatgaatgatatcttaaactcttgcctaaacgtgacagtgtatcagtttgttggaaaccttagaaataattgaatatgttttatttttatatttttacaaacgtattttcttgttattttttgaacttgtgtatgaatttgtttgaaccaaggaatttatttctgtttattgatattnnnagtgtcaaaatgaacaacccacacccaaatcctcatctgttacatgcctttgcaaataaactctatattgtgaagatgtctcctagttagagcatcacctcacacttgctcatgatgaacttgaagttctagaaagcaaatctactgggaattgaactattaaaagagcgatgggttcaatttactctcaacagccttccccttgagtataatagatttctaatatcatacatgatcaacaattttaactcatccgacatagacaagctggacgttgaactacatgcttttgaacagactttgccacttgcaagacgggctccttcaatattacaaacaagggtaaaaggaaaggtgaagatattaaggatgacacctctgacaatgctgcttctttgagttaaactttgagagctagaattaatattgaaccaacaattgaaacaattaaagaacaaatgagcagacatttgaaatcgagatgtcccagacttctgaaccattggaacgaaggtaatgcttttatttttgaatcatgtgttttagagaataaaaaatctatttggattgttgattctggatctactaaccatgtttgctcttcattctagctgcttgaaacttgggatcacttaaatccagggaagttaaagcttaaagttgggaatggcaaattagtatcggtccaagctaggggaaaaagtagcctcaagtttcagaacaaatttttttttagacaatattttgtttattctgaattttagtagaaacttgattagtgtttcatgtttagaaacacaattttatcaattgaattttgttctatttccactatttcttgtaacggcattcaattatgtgttgctcacatggannnnnnnctttatgttttaagaccggatataacataacaattgcgcttaataacgaacttcttaatatagttaaacctagaaaccataaaagaaaagagattgataatgatgaagaaacatatctacgacatttacgattaggtcatataggctatgatagacttcacatgttaaccaaacgtggtccattgaaaaatgtcaccttaggtgaattaccagtttctgaatctttcctagaaggtaaaatgactaagcgttctttctctgtaaagggagagcgtgccaaagaacccctagggttagtgcattcagatgtctgtggacctctaaatgtaaaagtcaatggatgttactttgtcactttcattgatgacttctctagatatagttttctttacctaatgcaaaagaaatctaaaacgtttgagaaatttcaagaatttcatgctttggctaccaattaggtaaaacattcatgatcttgtgaactaataggggtggagagtatatggatatgcagttcaaagatcatttaattaaacttggaattgaatcgcaatatactgaccctagcgctccacagcaaaatgg

SEQ ID NO: 109259 - DNA, 907 bp, Cannabis sativa
acaatagaatacacttcagagaaatagtcctcctactgaagtacacgacctgtagagaaataagagtctcttgccaagtaatgagccaacttatttgcagatcgttttacaaaactcaaatcaccaaaagttaaagccaaaagcaaatttcgaacatcttgaacaataaaactaaattgtggaggcataaaaataccaatattgaacaataagaccaaattgtgaaggcataaaaataccgttctgaatcgcttggacacacaccaagctatctgtttctaacagaactctattccacaaatgagttgcaatccaactcaaaacttctttaatgcctattatccaagcaatttcgggttgaacacaaccaatcttccccttcttgaatgtttctaccatagcaacatgatgatttcgagctacacaactcatgccaaagcgccccacataaacaaaaaaactaacaaaaactaacaagaatcgaaccagaaaaacggaaagactagagaaccatgtcaaaagacaagactaatgaaaaacttaattagttccaacacataaatacgatcacagcatattaaatcaaataaagaaagtactccttatataattctacccccataaaaacactaaatagaattaaactaataaaaaaggaattaataaataaaacaaaaactaacggaaacaaacagaaacgttccaacacataagaggagactcgtacgttcaaggtgatggaaacgaaccaatctcagacggtggccgtcgtttaaaatataagaaactttcttctctcgtgactatcactacaatatataagaaactttgaatgaaatacttattgtttctttaaaggtcttattaaactcatattatgtaagtattagaaatttatgcagagacg

SEQ ID NO: 109260 - DNA, 1065 bp, Cannabis sativa
tacatcaaagcttttaagggaattaatgtatcgatttttgtgatgaattcgtttgttgctgatgctgcagtcttctatgtcgtctctaaaaaatcaaccgatttctatagaaagttcaaagccggtttatggactcttccatcatgagtaggatcgactaggcttggtgagcttacactattttagtaggctcgagaaggataggctcgctcgctgcctgcttttttgtgacgggaaacccttctagcacggattttcgttaactacatacatagtttgctttggtttagtatcaaagattaggaaattattgatttttgcttttatgttgtcttgtgtcaaaatcttcaagaccctatactattatttaaactctagtatttacaaggtaaaaagtttaggtttttattgatttgattattaatttctatgtgtggttggtttgtatgagcagttcaagtaagtttgagaatataggaaaagtattattgtatatacaagtttgttataaagtattacatcatatttaatgaagtgctaaaaatgtagtgtattgatatattttgagcctacttacaaacaaaatactctaagaatggtggttctgaaaagtgtgtcaaatttctttacaagaaaaagtgtgtcaaatttaatacatattaaaagttatgattaatttggtctaatatatagtgatcaaatttatttttgtatttaaaaaatttattagattaatttttgaatttttatataatggttgataataatgatagtgtaaaccgctcaaattgcagtacactacactgcatttttgtagttttaagatttcgctgtgcggtttaagaaattacaaaagccgcatatacgatttaatttgaaaaaaacgttacaatccacactattcgttccgccaacaccccaatcctaaccatagattttaagaggaagaagagagcattttgtataacaaatttcaactagttggagtaaaaaatttgctccaaccatatcatactattcttaacttttcattttaaagctataaaaccaaggctcattaatcat

SEQ ID NO: 109261 - DNA, 1062 bp, Cannabis sativa
gcgtttctctcagcttgcacaatacgcattttctgctgggttctctgacaaaaaatgagcaaggtcggcggttgaagcttcatgttcttcaccttgaggacaaggtgaatttcgggcggccggtagtgataggatattaaataagaggggtatatgggtaattgtaaagagaggtagtggcaatatatatatatgagtgagtagtgaggggatttggtggggaggggagagaatgaattagttaatgagcagtagctctccggagagcactgggtctctcgaacacccagcaactcattgttctgttatcttcgtatcaatataccagctattattgtcctatatttcctactgttatattaaattgatacaaattcgtatcaaatattctctgcctaaatctaaaaaggagagatcctcgaagtattttgttttaaaaatccaagttgctacccaaagtttatttttctcccacacttcctcttcctcggctgtacactcttttccttaaaagttaaaacaattctagagtttctctcactccatactgtcgacaaatggccaacaccgctgatctccatagtgttgaccttctcttactccctaccatcttactctcaatcatttgagaaccacgacagggtatgacctatagaatcccgaactcaacaaataacttggacagtaatgtcttggaaaaggtacactccaatagtaaatgatcaattgattccccactaaccttgcaacaaatgcaatatcctggagtaagcacatgatatggtcatttttgtcgcaatctatcatgaaacctttcccaaagttgctaaccagccaaagacattaacttagatgcaccactgtctaagaattcagattagatccatttactcactgaacaactttaacttgaattcctagtgtgttgctcatctcatattgctaaattcctacatcacttttggttattttgtgataagctttttttatggcaattttgtgatacactattgatctaatccaatacttgaaacagttagaaaataggtattttattgatat

SEQ ID NO: 109262 - DNA, 587 bp, Cannabis sativa
gtatgctaatgttcaagctgatgacgcagcgagctcttctgtggtggcaggtcagctccctataaacgacttcttttattttgtactgtttgatttgggaactacacatttatgtgtagctatgtgaataattaatcttttagggtaaggcattgtgatattttagaaagagggtttggaaccctaatgcctagtgggcgttggttatctctaataggcgctttaggtctatgtcggttaggatcgaagatagggagttgagcgctggccttatagaattataattaactgagtttgacgttataatgggaatggatattttttgttcaaatgttcggccagtatagattgtaagcagaaaatggtgacttttcaacccgaaggtgaaagattttcttgacgtgttttccgagaagttgccggggttgccacgctgccacaacgagaaatcgttttcgtaattgttatggcacctggagtcgaacttgtttttaaagccccacatagaatggctccagcgaggctttaggagtttaagttacaacttcaggggatgtttgacattgggtttattcgacccagtgtat

SEQ ID NO: 109263 - DNA, 591 bp, Cannabis sativa
ttggaacctatgaaccatcataactaaatcatgacaaaatataaatgataaacgatgaagataattgaaacaagtttcatcagtccacaaatatgatcaaaacagtacacaatgcacaacaagaatctaaaaaatatatgtgtgaaaaccagtttcgaacctagtaaaaaaataaaaaaaaacttaaaataaaaaatgtacaatgacataataagaaggagcaacctcattgtagagatctcaaaacttgtgaaaccagtttcgaacttatgaaccttgtgaaactaatttcgaacctatgaactggtgaactctgtgaaactagtttcaaccctgtaaaaaatcataacaaaacataaataataaacaatgaagatagctaaaaacagtttcattcgtcaaccaaatagaaaaaaaaaaagcgcacacaaaaatgcaaaaaataaaaaatacgtctcacaaatataatcaaaataatgcacaatgtacaacaataatctaaaaataaaatataagtgtgaaaactagttttgaacctagaaacaaagtaataaaaaaacttaaaataaatatacattaatatcataaaat

SEQ ID NO: 109264 - DNA, 722 bp, Cannabis sativa
  modified_base (680)..(686): a, c, t, g, unknown or other
gaatttgggatccctgaactgatcccacaaaaacaaacggttcctcacccttaggttggaaaattaccatattctccatttacaatcaatactagctgagtacttggacaagaaatcatttccaagtataatatcaaaatccgctaaacccaattctaccaaatcagcactcaactccctatcctcaattctgattgggatagacgtaatccacattttggagataactaattctttgccaggcagtaaggttgtaaaccctttctcataactatcatacggtctacccaatttattaaaaatttggctgccacataggaatgagaggtccgagagttaaacaatacaaaggagtaagagttattgatcgagaggtgacctgtaacaactgaagggctagcttttgcatcagcccgagttaaagcaaacacccttgctggagtgggttttaatgttgtaatttgttcttccttcttgagctgcggacaatctctcttatactgtccatgcaactcacactggaaacgtcctcaccctttacactcacccagatgatgcttcctacaattgggacaatctgggtgggtatatggagtttcagaaccaccttaacaattgcttcgaccctggttccctcggatgctcttgtttcgacttgagccaccaagtgcaaatggtgnnnnnnntttttggtcagtggtcgagtcactacaacccctacc

SEQ ID NO: 109265 - DNA, 696 bp, Cannabis sativa
  modified_base (338)..(340): a, c, t, g, unknown or other
  modified_base (510)..(511): a, c, t, g, unknown or other
tgaacataccagagtggaaatgggaggacattgctatggacttcgtggtaggtatgcctagaaccacgggatagtttgactctgtgtgggtcattggggacaagttaacaaatttagctcactttttacctgttcggatgaatttctccattgaccagtatgctgagttatatgtcagagaaattgttcatctacattgtgtcccaaagtccattgttttggatagagatccaaagtttacatcgagattctaggagagtgtgcatcgagctatgggtactcagttaaagttcagcacgacatttcatcctcaaacggatgggcaatccgagaggacnnnacagattttagaagacatggtacgggcatgtgtgcttgactttgagggatcatgggtaaagtaccttcccttgatcgagttctcttataacaacagctcccaggaaacaatcaggatggccccttatgagcttttatatggaagaaagtgtagatcacctattcactggnntgaagtaggtgaaagaaagttcttgggtcccaaggctgttcagagaacaagtgagttagttgacaagattatagtgcgactgctcacggctcagagcagatagaagagttatgccgatctaaagcatcaggatattgatttctaggtcggggacatggtatttctttgaatatctctgatgaaag

SEQ ID NO: 109266 - DNA, 850 bp, Cannabis sativa
agtttccaaacaatccaactcaagtataatttaaataaaattacattaatactatagtaatatttatccttgtgtattttttgttgtttaccaaatttataatggtgattttgttcatattaaaccacgaaaagacatgtagatagagttacgtacgtaaaaacactattctgatttttaatgtttcataacagttgcattacagttgcataaacattttgctaacatttatttctccacatattactattaaggtacaagtaattatcgattagtgacaaaaaaatacaaatagtttcttacatatacacattcacatttaatatttttagttgtaattaagttgctcgttagttgaacaatagttttgttactacaatatcatagtattataaaaatagggcttggaattgtcaaaatacgcagcttgaatagataaaacacgattgttgttgttgggttttgtgccctaaataaaacatatttcaatataagcagatttactatttaataaaagatcataaattattttatgttgcatggttcacatgatttctttcatgattatatatttattgtatagattctattaaatcaagaacatatagttattcatgattatagtgtatccaaattgtatgttaatgtatggattatgagttttgtattctgtgattaaaacccacttggactattctaagaactctttgttgtaactagacctaagtcatcaaaagaccacaaccacataatataaatttatggcatttgtgtcttattcatagtagttttaacaagatcattctttgcgaagagaaaatatgcgaatatccacttgaaagtaagatca

SEQ ID NO: 109267 - DNA, 661 bp, Cannabis sativa
  modified_base (36)..(36): a, c, t, g, unknown or other
attgctatagcaatcatcgcgtagcaatttgtcagnccagtaagtttattttggcagatagtccagctggcattaatgaagagaaaaatgagttgaggtggcgaaatgtggttaatgactcaacaaataggtggaaaatgaaggaaaagtgggcgatgacttggatttccaattagggtaaactttggtaccctaattggggagcaaaaagaaagagaaggacatagaatagaaagggtggctgcacattgaagggctagtacgaaaacttacaacagaaaaaaataagtacagagaaagaaagaaaaaagaagagagtacgaagaagagaagaagaagattgagaagaaggagaagaaggcaacctacaaagagaggatttcagctaaaaagtcatttctctttctctcctcttcattttgtatcattttctactctctagttttctctttagctccatgaacatttcattttctggtttgatgcttttaatttcagccatgaactaaaatatttgagatttgggtgttatgaaccgttgtacggactagtattttgattttgcaatgattaagtaatcttgtcttagttcaattagttgtgatgaaatgttgattgaatgttaatttttggccaattttaacatttagcaagctagatc

SEQ ID NO: 109268 - DNA, 625 bp, Cannabis sativa
  modified_base (376)..(378): a, c, t, g, unknown or other
catatgtaatctaatcctggtaacataattccaacagttctttcttcccctttatatgtctttatgttaatttctgtttcaatttttattgatgtgaacatgagttttttaaactaaattcccaatttaaggatatgatgaatgatagatgatgtttctttaatttagttaatgtgattattagtttttcttccctatattgtgtgatttgttcttatttattttaattacatattttaaactggccatcttgaatgtgatttatgatcctaatatgaaatctgagaagtaaatattaggaatgctctaatcggacaaacataagttttgatgtaaaacaagagtatttacatagcttatgtgatttttagattcnnnatttaatgcaagttatatgttaatttacttcaaagatgcaagtagataatatatgatttaggaccttaatgatctgagaagagttagagttaatttgatagtctgtcatcaccaaaaagggagataattaataattaacattatcaattgagaaactgaactaataggattcatattcttaaatattcatccatcattaattacactttttattattatttttctgcttttcaatttttagttattt

SEQ ID NO: 109269 - DNA, 604 bp, Cannabis sativa
  modified_base (217)..(217): a, c, t, g, unknown or other
  modified_base (343)..(351): a, c, t, g, unknown or other
aaatgattttcctcacttgaaagccgagaaaggcagtgtgttacctgatgcagattcatctggcaagagggaagatttgggagagtttgaaatcgaggtcaaaggatttgaaccagcaagtgagaagaatgacagtacagacacagctccagttgagactgaggaacaaccagatctatctgactaccagcttgctagagatagaaccagaagaganatccatataccagcaaggtttgcagaagctgatctgattgcctatgctttgtcaatagatcattcatgtgacataccagaaccattaagtatagaagaggctttaaatgaaaagtacaagaaggannnnnnnnntgtggatgatgaattaagctcacttagaaagaacaagacatgggtattggttcttagacctgaggacaagaaggtgatctcatgcaaatggattctaaaaattaaagaagggatgacagaagatgagccagtaaggtttaaggcaagattagttgccaaaggtttcactcaagtggaagggatagattacaacgatgtgctctcttgtagtgaagtataagaccattagacttatgttgtcaatggcaactca

SEQ ID NO: 109270 - DNA, 510 bp, Cannabis sativa
tgacatttcttgtagtgtaaagaaaggaatcaagcaagggctagagatctcgaacgaaaggaagccatttggcttaaagggttcacaaatgagcttggtgtcaagataaatgagttgattgttcattaaagtgctattcaccttatgaagattctcttgtttcatgagctgtcaaatcacatagatatcaaggtgcattttataagagatatcattggtaataaagagatttcagtcaacaaaattcacaccaatgagaacccagttgacatgttcaccaagagtataacatgagaaaagtttaggcatcgcctaaacttgttacaaattaaggagcactaaaagtcccatgtttttagaggcagaacagatgaaacagtcaaagctttaaggggccgtttgatatttatgaaatttttatttcatgggaatatgtttaacattgcttgaagagtgatgaagggaatgataaacctaggaaatcatcattaccgtgtttgattgtgcaca

SEQ ID NO: 109271 - DNA, 927 bp, Cannabis sativa
taaataaatttaaaaagaaaaatataaagtgtagttagtggaatttgaacctttaccctctaacctatttgtcatttaccttaacaattactccaaactcactattatgtgtttataaatatcatcttttaatacaaatatatgttgtaactaattaaaatacacatacatttttttcccaattttttatttcaggggcaactgccccgcctcgctacaatgtgggtccgcccctgttgcagtgtgcataaaacggaaaccaaacacaagctaattggtgaagaagccagttataagcctcctagcaatgcaagctaaagaaacaaccttccaaaatagatcaaaacattgcaactaatcaaaaagtaaaacataaattgccaaaagacaaccagtaaatataaaagctaacaacatttcataatttacactccaaagaattatttattacaccaatgaaaaaggttagaaacttatcacaataaattaaaacaaattttactaatacaaatttcttttttttattcgtcagatatatattactatatatattatcattatatttgacaaacagtttaatttcatggtagacaaataatccaaatgttagttaagtttcgtatcatgattatatataaaattaagagaaatacaaacttttttgggtattatttatttatttttttttttgagtgtttttcgggttagaacaaaaaaggaaagaaggaaaatacttagaacctttagaaaaatcatagaacctttagaaaatttcacccctaataataataataataatctatatatataaagcagaagtatgagagggtgatgtggcagtctaaaaatgttttaaagtactcatccttttttctcaattttttctacttttttattaagtatttattcttctttctctatttttta

SEQ ID NO: 109272 - DNA, 721 bp, Cannabis sativa
ccatggaagatgaggctataaatacatttcttcttccttctctataactgtttttgtgttttttattctgattctcctataaatacatttgacaagctcattggcaaaaaaattttgaggggtgtaattcttttatattttttttaagtagttatatttgcttcattgttttacattaatttttgtgttgttttagtagttttttattttgattttttcaggactgggcttgcaaatataaccactattgtatctagttttgaggttgtacagaagataattagtttttttaatccttttttcttttattttttttttaatttgttttagtgttgttttaccatgattatttatttgacgtcgatttctctatttttgctccatcttgccagaattaatggttgttttaaagtgttctcatattgctggggtggttctgtctgtgagtgtaaaagatagaggtttggtatatgattttcggcgtctacagtatgaaaaaaaaaaaaaaaagcaaagacagtatcaatgtaatttttgtcgtgtgacagtataaatgtaaatttttactcaaaatctattatttttgtaagtcgctcttcttttattccatatttaataaagttctctttttttttttttttaaattttaataaagtaaataaatataagtgaatgactgtcttattattaattcacattacttattaataaacatgtcatt

SEQ ID NO: 109273 - DNA, 1013 bp, Cannabis sativa
  modified_base (173)..(179): a, c, t, g, unknown or other
aggatttataagtgtcacataaaaattgcaacaaaaggttatttatttggagctcctaatacagtgagaatttgaaagccttatctaaaaattctagaataatttcatacatttattaagtgatgtaaatttaaagtcgcgtgcactacatgacaaagatctttgtatgaaannnnnnnatgtaagtaaattattatttgaaaaacacgtatgattgtctatgcaatataaatttgtaaattatacgctgtgatagactcttgaagagttttttttataaatgattgaagaacaaacttttatttctttttgtatattgaaaaatattaaatatatgtagttaattcattaatagaggagtcctgaagtacttcatatgcatcaagaattatagatatatgatcatgtgatatgatgaaacaaatatatagtcttggagtaccgtcattgtcacaaataaaaatttatattatcattaaaattatgttcatatctacttgaaattttaaactttagtatgaacaaagttgtatacaggcattgctggccaagtggggctgggctctgattactgaggaacagtcgttgtactgtaatgttctcagatttaagtaccttaagggcaagtagttttttgactgtgaggttaagagctctgattcttaattttggagaaatgtggtgcgacctaaagagattttaagaaaaggggcgtgcaagctaatatctgatgggagagagacaagtatttgggatgacccttgggttatccatggtacggatttttaccctaagcccaattatcgtcaatagctaagtttggagaaagtgccagatttatttttacctgacggaaacttggacacacccatgctacacaacctttttgactaggaaactattagtaacatcttaagaggcggtaatccgagcagccggggaaggaatagatgggtctggacaaaagaactttatgttcatatctaatggaaattttaaactttagtatgaac

SEQ ID NO: 109274 - DNA, 957 bp, Cannabis sativa
  modified_base (186)..(200): a, c, t, g, unknown or other
  modified_base (718)..(731): a, c, t, g, unknown or other
catgaatttctctaatgatttcatttgcttctgcgggaagaacacaccgaagtaggggcattgaataccctcttttatatagtttgccttcgatcattttgtagcaaggaactgtatacaatagtttttgcacctcgtttttgtcatttggaagttgcccgttgagtaaatagttgataataggcnnnnnnnnnnnnnnngagctatctatcatctcgatgtcttcagtctcacatatactttgctcactcagcatatcttccagaaccagatttagttcatccaggtccttctgcgaggccagctttgctaaggcatcggcgttggagttttgttctcttggaatttgtttgattttaaagtaattaaatctttccaagttcttcggaactttctctaaatacttcgccatttttaagcctttggcctggtattccccgaggacctagttcatgatcagttgtgaatcactatgacaaatgagatttttgactttcaaggcctctgctatctttaagccagcaatcaaggcttcatattcagcctcgttatttgatgcgtcaaattagaaccttagagcatagttatttttaaagccttccggcgatattaatattacatctgcacccaaaccctattcgttggatgccccatccatatataactttgaggtttctacatctcgctgatcaagtgggatttcttctggagttatacnnnnnnnnnnnnnntcagctaaagcttggcccttgatggatgttcaaggatggtatgttatgtagaactaccatagaagtatgtccgtagtttgcaagacacatggactaggcataacgcgagtttttctagatggagatatctgaattctgcccctagtaaccttttgcttacgtagtaaataggttgctagtgcttgccctcttctcacactatagctgcactaatcgcatcttccga

SEQ ID NO: 109275 - DNA, 504 bp, Cannabis sativa
ggatcctcagaattattcaatgctaaagtctacagaactactatacaatatgatgaaatttttatttatatgaataaggcttagaatgaacaaaactacaaatcaaatcaaacaggaaccctagaaaaaaaatacaaaaaaaacaactgggaaagagtaataatgttgctctcaggcccctaccttgacaatgttagtattgggatatgatatataataatataggaagaaacaaacaagaactgatcaaataaaattctaaattctaaattccattttaaataaaatctaaatttagtaatacttgggatatgatatagatcctaaatacacgtctaactcacgagaaaactagcgcgtacaagacaaagaccaaaaaacgttaccacaatatatgtgtttatatatatattaataaataattatgacatctttcttgctatgatgggagaggaaaatatactttacactgtagatttcacctttgggaatgcaataactctg

SEQ ID NO: 109276 - DNA, 899 bp, Cannabis sativa
  modified_base (256)..(275): a, c, t, g, unknown or other
catgccaaaagacaagactcgaactagaaaaaaactaaaaggaaaagactaaaaaaccatgtcaaaagacaagactaaagaaccatatcaaaaaacaagattaatggaaaaactaaatcagacataaacacgatcacaacattaaaattaattaaggaatgaactctttataattttaaccccataaaaacattaattgaaattaaactaataatagtaaatttataaatgaaaacaaaaatctaaaacagaggannnnnnnnnnnnnnnnnnnnccactctcagacgactgctcttgaacccctcacagaagaagacgttgacgtgggaatgagaaaaactctccgttcacactatagtctcaggctcaattgattcatcatgcacagagtcaaagacgatctatcatatgcaaaaaaaacagtctaatttgaaagggttttcttcatgaccttcgcccattcttgctccaatcaattaatagttcttgaaaaaattgcttctttcaattttccttaatctagcatcaacaactcaccgtcctcccttgcatatatcaacctaaaatttcactgcctctactaaaagcgaatgtttatatcgttattttaataatgaaactgtaaataatgtcgcgtattaatttatcacaatttttttttatttagcatattactgctatttaaacaataaaaaagaataattttgtatatttttttttttataaaatattaaatgatgattaaattcaatgataatttttttttttacttattttacatctagtgcattagaacataatgttaaacattcacatagattatgaactatctaaatatacattaaacatcattgttcataatcattaaaaccaaaatcaatactttatttagagcatc

SEQ ID NO: 109277 - DNA, 1459 bp, Cannabis sativa
atatgtcgataatttttgacaaatctaataccatgatcattgttatctcatattagtttgttgcatatgcaaacattaaacatccattgtcgataaaatttttattatatatatgataatttccttttatattgacataacttatagaaatctctttaaattatatattttttaaatatgtatatcatttataggtacttatatagaactacttcagtggttcaattatgatcaaatatgttatgtctaacttttctagggagtctattctgaagtaccatttctatcacgattattatttttaaattatcaatactttataacattaagatatatctccatgtgtacctctagatttaacatcttcatgataaatgaaatgaatatttattaataattttttatattttttatttacgcttcaagcatttttagactcattctaacttaaatttgaataaaattaatttgcaattggcgtatatcattttgaattgtgtcgttcatattatactttgtgcaaggattatttctcaaaatattcatctccctgatcgatagaatttttaaaaaacttataaaatctaataatattagtttaatacacctatagggatttcaatatatcacaataaattaatatttgtctgaatccacatatattatatgacattgaatttcaggttcaattatagttatgagcttattttatttcaaagaatgagtcatacgtgtataattagaaatacatatatttatgatcatatgatcttatcacatcgataagaagctatgcaataaaaatctaacaatggctcaaaattgctaaagaagtatatttcaaatatttttcttcaaataatctaatatatagattcaaggcaaataaatatattcacaaatattcaaatgagttatattagacaaataattattaataaaaatataattttagcttataaacaaatataaaagaaaaattaaatgaaattatacatatatcacttttaaaattaaaaatattaaaatatacttttactttttctatgtgcaaaatacatgcacattcttctttgagcatgataaattaacaatgggaagaatcttttgattcttcaacaaaatttaatcaaattattttacaatttactgcatataatttatcatattaaaacaagtcaattcataaagttcaggttcaccataatttgtatttcaatgaaactttcgtagaataatttacaaaatcactacaacatataaataatcattataaattttatttttatatacacaaataaaataattatattattctcgaaaacatatacatttttctggagtcactgttatgtttatcaaactttatatttcctcatcatcaatttaatgatgtatacattcaaaaagtataagataacttcatcatgttgttgtaacggtcaaatatatatatata

SEQ ID NO: 109278 - DNA, 1363 bp, Cannabis sativa
aaagaatcaaataatattttaatctttaaaatggtttatttataattttttaaataacaaaataaaaataattaagaaaatttatttgaaaaattgtaacttataatagttacagatgcaaccttctatattttgtaataaagtaagttattagtcgcgacttaaaaaagttgtgacaacatcctgatcatgatttacaaattttaaatgtaattataaagaagaattttaaaaacgatttagtgttattatttctaaaacaacttctaatatgtttttcggagatagaaactcagaatgagaaagataattaatcatcaacattcaagttctgtcttcttttttatctctattcaaaccataatattaaaagttaaaaaatatctctattataatgttaatttttttttttaaataaaataaataaatttttaaactttataaacatatcaataataatatataagagaaacttttatggtgcaccctttacgaaatcgatacactctctactatttcagcatttataataatatacagaaagctttttgtataattagaataaacattatcatataaagtatctcttttaaagattatcattttataagtaactacaacacacaagtcttaaataattaaaatagacatcacatacaaaaaaattaagattataattattcagatatcataaaaaaaaagtccactggcacacccaattttgagtgtggtgcattgtaaaaaacctattaatttatatgtacactgcctaaaacttttattaaaaaaattaattcaaaatgaaggatagaacttctatttaggatttatttaaatagaataattagtgttttgatcattctaaatggaagaataaaaatatctccttgcataatcatagtcttttatgttagattttacttatttttactattaaaatattgaataattagcgtttttatcttaagctttaactattatcatattatgtctttttatatatacatatatatatatatttaatctttatgtaattcttaattttttttatattgaaaatgcaataaatcttaaggaaaaaagatttaaaattctttctctaaaaaattaagttcacttaagcaaatcatattcaaatttcttcatatttatcaactcattcatattcgttacgatatttctttagttacaaacctaaattgatattattttcaaaacataagaaatgaaggtgcaaattttttatctaaatcaacaaaaatatactttaggttggattttttttaatctttagaaataatatttagttaaattcttttttttttaaaacaaaagaggtataatttagtagttgtctatgttc

SEQ ID NO: 109279 - DNA, 974 bp, Cannabis sativa
  modified_base (50)..(53): a, c, t, g, unknown or other
  modified_base (80)..(83): a, c, t, g, unknown or other
  modified_base (109)..(112): a, c, t, g, unknown or other
  modified_base (141)..(144): a, c, t, g, unknown or other
  modified_base (171)..(174): a, c, t, g, unknown or other
  modified_base (201)..(204): a, c, t, g, unknown or other
  modified_base (305)..(318): a, c, t, g, unknown or other
attattttaattattaaatatatattattttggcatttatagggttgaannnnatttatagggttgaagttgcaaaaagnnnnttatagggttgaagttgcaaaaagtnnnntatagggttgaagttgcaaaaagtggtannnnttgaagttgcaaaaagtggtatttgtnnnnaagttgcaaaaagtggtatttgtgaannnnagataaaatagttgagaaaaatggcaaaaccaaatttgtgtgtggggcccattaagtggtcagccaccatgtgctctttttactctaattttatcaatttnnnnnnnnnnnnnnttcaaccctaaccctattggaatttagtataaaaggaaggttatggtctcattatccaactaatgcctctaaagctaaaaacctagttttccctctaggtttatgagacatcttccttcttcttcttctattcaaaaatacctgttagattgagatttctctcacctagaaactcgagaccagactcctgtttggaagacacgtgtactcagttttccaagaaaagttgagatgtccatgagagactcctcgggtttaaacctcgcctgagctagaatcaacgagatgatgcgagcataattaaagtctgatcgcattcgtgtaactcgaattatgcggaaccaaagaacgaatccaactcgcatgtatcaggatatgtgcgggtatcctttctatactcttgcgaaaacatagagatcaattctctataatgcgagttggtctcaatgacctgacggcctcgataaacgaacatagactcgcatgtctaggttctatcagctcgtcatacgatgtccataaaggcgactatctaagaatgcaaacatcttaggctaatcagatgataggtctatcctaagcccgcgagcttataccagaatatgaacactcaactcgcatattaaaagtcgcatacgttgctgtattcagtgaat

SEQ ID NO: 109280 - DNA, 754 bp, Cannabis sativa
tttttgtgtctttttttttccatccccctcctcgtttttatgaagattatttatagcgattggtgggaagaagaaaaagagtaacttgtttttaagtgccaactatgggcatgcacaagttcgtagaaggtacaaaatagggtatgcacaaactacgtagtaggcagtgtaggtgttaggtgagattagccttcatccctttttaattgatgtgattcttcataatggagtcgtcattagctcccttgactattgtgtaatcgccctaaattgagtttatgatgtctcacacgtccccttatgggcgtttccagacgttttctctatgccgcattaaatgtgaaatgactgttcaactccgtaaggcctgaagaagcatattcgtgctttaactcccggagaagaatatgggtcttttgctcatgtccgtgctttaagtattggttattcaattgaatgattgtgaaccagtaaaatttattgtcattttacccgttgctgtcaaattaattaacaatatgaaataataaaatttataaagtaatcttatttaatttatgatcataatggttatttataagtttattcttgtatggtaaaattttttgtaaaattatttaataaaaatttccatgaaaaatattttcacaaaatactttgtcttgctaaattataacataggttatccaaagcacttcattcatggtgtcttgcaacaaaagtaatagatgaagcaatagagaagtctccaata

SEQ ID NO: 109281 - DNA, 933 bp, Cannabis sativa
aaaaaaaaaaaaagaagtaagatattgcacaaattaatttattacttatttcattacattattaattaatattaattatgtatagtatctatatgtaatattcgggttcatattaattagttaataaaaatgttatattatcaatctattatcaggatttggtgcttgggttgtcattggtgagaccttatgatacatttagtaacaaagaattgttaaataaacaactaaaattgacgaaggagaaatatggatcagtgagaagagtttttatcgtgtgtgaccaagaccatactatcgaggagagtttgcagaggtggaagattgagaggaacccacctcatcaagtgatgatcatcaatggaactgatcacatggttatgttctctaagccactcaaactcttttctcacctacaacagattgcacacagatattattaatttattaattaatgtgattatatatgataataaataccatgattcatcattagtatctggttgttaatacaaatttcgtatttttataattatttgtatataaaatttaatcttttaaattttggacatttggcttgggatatttataaaaatattgaaaaatatatttgatatatataagatgcaaacttaattaatgtattatatatatgaaatttttatttaaaaaaacaaaaatataaaataaatcattataactaaataagaagaaatactataaaaccttaaaaacttacaaactcataaattttacttctttataatcaaaatcaatatcgtgatgaataaactaatttcttacttaaagaaactagttttttcatttatagtagaggtatctagaaagtcatccaatctaatcccaaccgatccaatagaatcgaatatccaatcataattggatcggatcggatgcaaattttaaaaatcc

SEQ ID NO: 109282 - DNA, 1952 bp, Cannabis sativa
  modified_base (827)..(834): a, c, t, g, unknown or other
ggattatttacgtgcatttatgcattgtatggggttcgctggtaagtggatcaatttaattatgaaatgtgtcacttttgtacgaggttccattatacacaatggtcatattatgggaccgattactccttcctgaggtattcgttaagggaatccattatcaacttatatgtttatcatttgtgctgaaggcttctcttccctgatcagaaagtttaaagatgaccatattattcgtggttgtcgtgtgtctattggggctccttctattgcacacatgctcttgctgatgatagttatctcttttgccaagctactacaaatatgactgtcagtgtaaaacaaatggcccactcttttgaaattgcctttgggcagaaggtgaatgctacaaagtcttctatcttttttagtcccaatgccgaagcaacccagcggcatcaaatctgtacatctcttggtatgcctgaagctactgacgactctctttatctgggcttgccaaacataattggtagaaagaaaacacctattctcgaatttctcaagaataaagttatcaaccgcatttaaagttggaatggtaggtttctctctcgtgctggtaaagaaattcttcttaaagctgttgttcagtctctaccaacttatccgatgagtgttttctttatcctttgggagacttgtcaagaaattgagaaggttatggctaatttttggtggaaaacatcgagttctaaagggcaaggcattatatttttatcacttgtaaaagaaaaaattataatttataagaaacttaggttgatattgtttgttaataatannnnnnnnaatataaaatattttttaaaataaaataaaaattagaaatttaaatattatttattttaaatatttttcattgaaaaaaatattttattttttgtaatatataataaataattaaataaattttcaataagaaaataatttattatagagtcttttaatcaaaacaattttttctaaaaattgagttgtaccagctttagcttttagctgtagctttttcataaatttttcaataagctattttttaactgcttactaaatacttttctgtcacaacttttttgaaagagattttaattttttttaaaagttgtgccaaacggactcatgatattaatttatttaaattattatttatatataacaagtgattttagttaattaatataatattaatttttttattttaaaattattataataataaataatatttttattataatttttaatattgtagttggagtaaaaataattttttacactaaattgacactaaaattaatatgatctttgaatactaggattcttaaaagataaatggtaggcgcccactttgatttttcatgtttgctcaaggcaattgttatcccatgttctttgaattttcttgttagtttcgggcaaacaaaattttctttgcttgtggataactctcttcacataattttgaaagtgatacttctttgatcattagctcattttgaaagtgatatttcccattagttaatttctctttcccatttgaataaacctatttttaagattttctagttttcttctaaaagaatgtttgggtaataaataaaagtcattgtgtaattcaaacgagttaagaataagatcattttgtaattcaaacgaactaatctctctctcattttgaaattatttgataaattagaattatttttatattatttttatctaaagggagaatataaaatttagaatttctgttcccaaacatactactattaaatcgtattctttggacatttttgctcgattaatcctcggaattatttacaatgctaaaatatagaacattttgttagactttttatttgggcttacattaacttttattggttttattaaaacttgggttgattgga

SEQ ID NO: 109283 - DNA, 1093 bp, Cannabis sativa
tactttatataatttattagagttgatatataattgatagtatctcacatgaaatttcttaactactttgttgcctagcattttgacatgttcatgttttgattaattattgctcaaaagttttgacagctacacaagctattccctaaaatggatcatttcttttgaaccaattgttttttatttcctctttcatttattgatttatttcatccatggatcagtacccttccaaatattatggcactgagatgatggtatgatattcctagttttaaattacccaatttactatcatatatagtttagttgcagctgtaatttagttttgaactattgtaagatcttgattgtacattacttcaatgcatatgtttaatttactaatttttcaggtgagattttatagtactgttatctgtcactgctatagatccctctctgttgctagacaatgcagagtggaactttcataatggctaaattgtagtgacatatatgtattgctgctgatttttataatttttctataattctttcttgcacataacatttgaggttttcgtaggaaaattggtattccattgtctgtgggttatccccaatcaataagtgtttattttttttttgttcattttactgttatgtgttctttagatacagatttgggcttcaaaataattagtagatgtattttgatttttctcattaatcgagattcaatattacttgcttttatttgtagtgacaactgaaaatgatgatgtgttatttgtagtggaaggactctacaacactcttccttgaggtgagctttggtatagtgttgcttcattcaactttcgtattgtgagtgccttaatggttatatcaaaaactactttgtatcatagatgtttattaacagatatagatatataactttttaaatttcatctattaaccttgacaatacagatacaacatggttatggtgtttagagattatctttcaatgtgactcccagtaggcagttcaagcaatactagcatcatagatcatgcctgcagacgctcaaaggatgcttttagagtttgaggggtgtgttcttct

SEQ ID NO: 109284 - DNA, 1604 bp, Cannabis sativa
actcttagtaattatagaactatatttattgagttttactgcagtgtctactgatataatcaattccagtaattagccctccatgtgttggttcttaattagttttggccaaattaccgttttacccttgtgattatttctttatcatttagtaccattaattcactagtagaagtataatttagatctcatctaaatttgtgcacaacattccagttctagaattaattcttaaaggaaaccagcattcgatccgttaggaaagtcaggattccataattgtaaatcatgttcccagccatccacattattagattcccaaaatagaagttgtaagaattatcttctctgagaaattttaacgagtgaatcaaagaaactaataacatgaacatgaattcatggttacttaggattcacgcgagtctactattgatcgtcgttaggatatgaattaggtctttatgataaacgacatgttaataaagacaccttcattcatattggtccttgtcaaatataatctctattatatacaataccttcactttgatgtcatactaacattctaatctgaaccaagattacttgcaccaaagaacatgcatcagtgaaccatatcaataatttagggggcattttcaacgactttaaaagttcaggagacatgatttggtacatgtcaaagttcaagagacaaaaatcataattagcttttaatatattttatttttatatataattttttttacatacaatttaaaagaaaattaaactgtaattttttttttctttaaatttgttttttttattttatttattttaatttattattagagacaaaaataataataatttattttattttgttattaattatgtgaaaaaaaataaattggattaaaataataaatattaaataatttaatattaaaaaataatcaatctaaaataaccgatcaaatccatgcttttacaaattggattaaattgaatttgagttattatacaaattgaattggaaccaagatataaaattcgcacttagcgtgaatcaaatgcactatgaacaaaatattgcagattgaattgggtagttagttcatttgagataacaaaagaaaaattttcacaaccagaatattttactcgtgtgtggaatgaattagataaaccaaaatgacatcccaagtcccaactatgctcgtgatatataatatggcacaatacttacttcatagacttcacttcactgataaagtaaagtgtaatccttatgaatattcaacaattctcattaaccattaaatcctcaaaactagaagaaaaggactaatcttttttcccaagttcggttttagaagtacattcgaaacattattttgtaccattactgctcaaatttcctcctcctcaaaaggatctcgctcagggaagtcaccaacctaagatgataaatttgtaaaatcattcaaatctaataaaaccaagcaaatataaagaaactaatgtatgtaaactgccagaagccacagagcaataaagacttcatagaaagatatgtaaaccgcgaagacaaacatgtacaaatgcatattagaata

SEQ ID NO: 109285 - DNA, 749 bp, Cannabis sativa
  modified_base (717)..(723): a, c, t, g, unknown or other
ggcattccaggaggaagctcaacggagggaggccctcgtggaggcgaagctccgggaggaggccaagaagaaggaggcccttgcagaggcgaagcttcgcgaggaggccaagcagaaggaggccgaggtggaggcgaggcaccaggaggcgctaaaggtggagggtgaggccgctgcccgggccagacgcgagcttcgggaggcaagggaagccatggacgaaatggcatccaaggtgaagtccctagaggacttgcaccaggcagacttgcagtctaatgccaacctgaccgtggagttcaaggagctgagggacttcagagaccaggccttgaagaaggctaaaagagatgagctcctgaccccagtctcctgcaagcattgcgccaagcgctttgacgacggcatatacatggcctggcagtcaaatggccaaagtattaagcttgacttctatcccaatcctgaagaggttcttgctaaattttaggagaagaagaaaaggcttgatgctttgcttgaagcacgtcggggccctcgtcttcctcctcgtattgactaggacgtggagtccaacccattataatcatatctctttttttttggacctaccctttgggtcaggatattttaaatatatatgctcactttgatacatattcttcttgtctgtttttactttcggcctgttttacatctgtccgtgtggtatgcctnnnnnnncccctgagtggcatgaaaactttgtt

SEQ ID NO: 109286 - DNA, 1141 bp, Cannabis sativa
cgccccttgaagtcaagagagcctattctaaatggccaatgataaatccccgggcattaatgggttcaacaatcagttttaccttaataatcagtctgatatatcccactttaatactatccttgtcaccctcacaccaaaaattaaaaattccttgaccttgaaagactatcgtcctattagcatgtgcacaactatctataaaatcatctccaaggtactggccaatagacttaagttggttataaactccatcatttcacctactcaaagtgctttccgcaaaggtcgtctcatttctgacaatattcttatggccaaagaaattctccactccatcaaaaataggaagaagggaaggattgattggatggcggtgaagttggacatggctaagacctttgacaaagtggaaggaattttcctgaataaaattatgcaaaaagttagcttttcctctaagtttatctccttaattatgacttgcatgtccactgcaactttcaagtttaatatcaatggccttgcccttgggcatgttattccttcgaggggaccccctctcaccttacctcttcctcctttgctctgagggcctctcctccattcttaagcaatctgaactctctgaaaatgcttttggtctcaagattgctcgtactgcccctaaaatttcacatctcctttttgccgatgatagtatcttgttttgtcgttcgaacatccaagcttgcaatgtcatcaaagaggctcttgccaagtacgagaatatctcaggaaaattggttaattttcagaaatcttccgtctttttcccccaatacaagtctcacctatcaaactcttattcacgattacttacaaatcccttctaccaatcaccttgataaaaaaccttggattacctcagtattttggtagatcaaaaaaccactctttcaaccttctcaaggacagaatttggtcttatctctctaaatggtaaggtaaatttctatccaagggaggtaaagaaattcttctcaaagttgtcatccaagctatccctacctatgccatgtcgatcttcaaactttcaaagtctttctatgactttgttgaaaatgagatggctaaattttggtggggatctaaaaatgga

SEQ ID NO: 109287 - DNA, 933 bp, Cannabis sativa
taacctcttctaaggtggccaagcgctttcctcctttcttggaagatttggaaccggatgtagacattttggttctgaaaaagagtaaaaatttcagcagtcaggtcccatgccaaaccctaagtccaaaaaagggaatgggggtcccctaaccgctggaaagaggccccttccggacggttgtcaacaagaaagccttaaaagggtttcctggacaagagtcgggtgcaagaatctcacagatggtgacattacacataagtaaagtaaggaaaagaaagagaaagggcagaaatcgagaaatacaaagtcttctctgtacccttgaaggccatcacgaaaagaactaatgggcctttgaaaaatataatgtgcaaaataagagtgacccaaacaccagagaagagaaatctaaacgtattacgcaaaaactcaaggcgaaaaaaaaatcccagaaacttcgaacaattaaacccagaaaaacagatggtcagtaaagcatgccatggacacaaacagtaaagtgagtggtgtgaaaaacttacataaagtgttagaactgggagttgttgttgatcgacgaagaaatgtagattgacagtaacgaacaaaggttaataagaaatctgtaagtgtttgaaggtgttctgatctaagggtttctttctctctggaaagctcgaagaaatttggcgaaaagatgaaagtaaccaaatgagggaaaggtggtggcttttataggccaaggtgcatgtggaacaggcgcaatcacctaccaatcgaacggctggggaggcgcacgatttgaattcccaagatccaacggttagattgatatgtaatcaaggcggtggaaacatttgagtatccgtctgacacccattaatgcgccgtatcaattaatgggcatgaaacgaatcaacgcctgcaaaa

SEQ ID NO: 109288 - DNA, 1672 bp, Cannabis sativa
agaacactgataccacgtataaacctcttgtgtcaagtgatttaattttctccaattatttttatattctgtctgttttgttttgtcacttcaaaacttgtttctgcagtaacggaattacattctacttctgcagatgtatacatttttattttttcgtatttattattgacatttgcgaaaacttggtttttcaaatcattcatttttaaataagttttttctatacatagtctatataattataaaaataaaaattacatttattagttattgaaataagataaatgaaatgaaatgtaatgtaataaaataaaaagaaaaaaaattaaaacaacttatatatttgtaaaataggatcaaaattaaggtgactttatttcttattttttttttaaaaaaaaaaaagtgggataaatgggatcaaaattaaggtgactttttatcccattaattttaaaaaaaaaagtgcgataaaaggtacttttttcccacttttcttaaaaaaaaacacggagataaaagagatatttttatctcgattttaatgataaaaactggaataaaaagtattatttttatcacagtttgttaaatattttttattttattggtatatatctcggtttttattttagcgaaaattaagataaaaagtcttaaaaatagaaataaaaggcattttcttgtagtagtgtgttgtcaaacacaaaaattaattaagaaattgtaataagacattaattagactcctctttgctaaagagtgatacataatttaatgctatttaataatgtctaatttacactaacactcttgtcttgcccatgaatttgtcactcacagtagtcatggtgtacgataaatccaacatgagtgtatgtaagcctaatcattcacttgggttttgcaagtaatgaaaggacagacaattgtaaggacagtatggcagtattttatgaacatatggatcacccacttttacagctgctatattatacgctctatctatattatatacatataaatgtgtttgtaagtaagatgtggaatcataaaacttgtactatcgtttggttgagacatatgggtcatgcttccacaactagatatatgctcttgtctggttctctttctcatatatgtgggtcttattttaacaagaaaaaaaaattataataataaataaaacgaactagcttttctatttccctaactttgtcattaaatcgggcattttattcattaaaaaaaatgataataaaaaagtgtacatgtatgtgatattgagatatgtttataataatatgaataagtttctcatgccgatgtgtaactagtacggtatactttattttattattttaattttttaaattttctactatttcataattgaatgggtgagaacttttgggtggattttgattttgatggaggagatataaagttatccattattgaacacactgacatatgatcatgatgcattagaaaatatatgtagtaaaagcataatcatgtagctcaacaatctcaagagatccttataagaatatttttattttagttaatatatttttatttaagaaaataaaataaataattaattttctaataattgaatatttttatattcattgaatctggacaaaattaattatgtaatat

SEQ ID NO: 109289 - DNA, 774 bp, Cannabis sativa
agatccagacctggcccgcacccgagacccaaagtcggacatgaaatgaccctagacccagaccgggatctgaacctggacccaaacccaatcccagactcggactaggacttagacctcgaccaaaacccggaacaaaacccgaaccgagacactgaatcaatatcaaaactgggactaggacccaaacccaaacatggacctagaccgggacctaagacccggactaggatgggggacttggacctaggccttggaacccagacctagatcggaactcaagactcggacccaaactagaccataaccaagccccaaaactcgagcttagacccaatccctagtccagaacccagactaggatagagactcgaacccgaacccaaacttgaaatcgggacttgatcttggacccagaccaagcccttgatcgagactgggatttggacctagacatggacacgaacttagacctagaacagaataccaaaccagacggagactgggatcgaaacacgggaccttgactagaacccaaatgtagacccagacccaaacttgggacccaaactcaaacctagaaccagccctggatccgaaaaacccgtacccaaactcagattaagactcgaaccccgaccccaacctggaccaagaccctgattcgaaaccaaacccggtacccaaatgtagacccagacccgaacatgggacccaaactcaaacctagacccagcctgggatccgaaaaacccgtacccaaactcagattaa

SEQ ID NO: 109290 - DNA, 1302 bp, Cannabis sativa
  modified_base (415)..(423): a, c, t, g, unknown or other
aaattaataaaaataaataacataaaataacttaatccagttataattaaaataaaactagttctataacagtgttataatgaataaaaaccaattatacaaaataattcaaaaccggttataactaaaataaaactgattatataacataatgaatacaaacaagtaacacacaataattcaaatcgattacaattaaaaaacaaaggggaaatcagttcctaaaacaatgaaacataaattaaaaataaaactagttctacaataaaaaacctcataacacataatatctcataaaaccgattacaaattttttttaaaaaaaaatatatagatcaattttaaaaaatattgagacataaatataaaaagaaccagttttataacaaaataaataaacacaaataataacacnnnnnnnnncaaatataatataaagaaaccggttatatttatcaactaattaaaaatttaagagaaaaaaactggttctgtaaagcaactaagataaaaattcacacacaaaaatcagttaaataaaatagctcaaacaaaaatattcattcaacatgctccaacccaccaaataattatacatataccatatctatctaaaaaatacttatttgttatgttatataactagttctatgttagttatagccggtttgagttatttcgtgttatttatttttattcattataacattgttatagaactggttctaatataattataattagtttgagttattttgttttatttgtttttatttattatgtatagaaccggttatatttcaattataaccagtttgggttattttggattatttattttctcttattatattatagaatcgtttttatttttgtttatatttgagacatctaatacttcttgtaacttttccagtgactttttccagtgccggtgaatttttctggcgaattttttggcgtcagtaacttttctgacaacttttcctgcaaaacatattattatttacaaatatgggatttccatctttttttacagaaataagacataaaaaaaaacccatataaatatatacataaaaaataaaccataaccctttaacattatttatttataccatgaaaaaataaagttacataatttttccatatataatggaaattctacttcaattaatgagttcaaaaggcaatgcataagggttttttttttttttttttataaatatggtttttttgtaagtggtttagaaatatatggagaaataaagaaattttataaaacctggaaaaatgaataaa

SEQ ID NO: 109291 - DNA, 988 bp, Cannabis sativa
ttaaatacatgattattttgacctggtaaaagcgggaaaataatagctatatgattttcaaataataaccgcatttacatttcgtgatatgtaatcaaaccctattattttagggggtgattgttgtaaacagattacagtcaactttgtaattaactacccactatgtaaatataaatagtggcgaacaagatcaaaaaaggggacgaaaaaactcatgcgaaagagcacctgagcaaacaatcaaaaatttgaataagattgactcgtggactatgcagaaatttaactgcaaaaccacgtaaaaaccttttgtgttcaaactattattttataacttttattttttctgtgtgagattatcacggttaggctcaaattttgttaaggaaaatctgcgttaacaataaggataaagataaaactcagtatgttgcatatggaacactgttatagaaagtacaaaaaatattagatatggaattatctatgacttttacaaaaggaattaaaataaggttaaagtgttccaagtatgtcattaggcatatctaatgaaaataagtttttcactatggtttgttttataaatgatttaatttattgtacctaactatacttaataagtaaatttttatgaaatttcttatgtcagtataactatagaaggttatctatgaaactaataaccaagtgatgatgaaagattcaactttaggggcaaaagtgaaacatctacagatgaggctataaggattttcaactatgattaaagactagttattttgaatttagaaaagacttatacagtatcatcacctagatgagttttagttttgaattctattttgaataattaagtcattcttgttaatttagaatttgaaaaattagtatttgtcaatatttcaatattggttctactatttctttaatttataaatttattaaaatttacctcatataaagaaaccttataatttctctt

SEQ ID NO: 109292 - DNA, 957 bp, Cannabis sativa
  modified_base (220)..(226): a, c, t, g, unknown or other
  modified_base (309)..(312): a, c, t, g, unknown or other
  modified_base (412)..(425): a, c, t, g, unknown or other
ttctatataagatggtcccactgtctctgttgtcttgacacaaccgatgaggttaataccatttgttttcttagatagaaggtcacggtatcttgtcgtagtgggagggtttcaaggaactcaccctattatgacttgggagatacttgtgataaaatctattgttagtttaaacaagtaatggatagtcagaacaaggaactaagaagtaaagccaagnnnnnnntggttaaaactattcatatggagtgaccgaaatattttctattacaaggacaagaaaagaaattttgaaaataagtctattcnnnngacttaacaaaacttcctgtttctagtattatatgtttgagtttatctaaacctatgtcttgtggtatatatgcttggtaatttacttactctagtgcannnnnnnnnnnnnngtaagatgctgaagcatttttctattagcaatctatagatgcttctcgacttctagatatagattttttttatttatttaaagaaaagtttcagctattccagaaaagataaaggctaaaaaaagaattccttagaatcaacagtgaaaggtctcagatatcctttgttatgcattagaccagacacttggcgttgagtgtgagtaatgagtaggtatcagattaatccaggaaaggaatattggaagacaatcaagtgcatcttaagatcaagaagaggaactatatgttagtcgataggggtggtattttagtactcttagactacaccaaatcaggtttctagacttgcattagtgctagaaagtctactgatgagatggtgattactctgagggtggagcaatgattctggagaagtgtaaaaactgatccagaatctctaactctaccagtgagactgaatgtcaaagttgcaggaaagatacttatacagtctatgaaaagttctatatagtttttggcattgtac

SEQ ID NO: 109293 - DNA, 528 bp, Cannabis sativa
  modified_base (456)..(489): a, c, t, g, unknown or other
agggcctcaatgactcatatcatgctgtctgtgatcaaattttccttcttgatccattcccccctttaaacaaagtcttttccatggtagtcaaccaagaaagacaaagaactttgggtcatcgatcccttccaccccttgctgctgcaacatccaatactccccaagatactgtccctgcagcaaatgcagcctccaaaaacaaacgccctcgaccacatttcaccaattgccaaaaacctggtcactacagggaaaaatgctacttccttatcggatttccacctggttatggcactcgaaaaccaagtgacaaccccacaataaataccaagaaacttgaaactggtattcaaaccagaaacccccaagtttcacaaatttcagcaatactgatgtgtctaatctacaacttgcccctgcccaatgtcaataatgttgggttttgtgccctannnnnnnnnnnnnnnnnnnnnnnnnnnnnnnnnnattaataaagatcataaatcacattttatgttgcatggt

SEQ ID NO: 109294 - DNA, 1103 bp, Cannabis sativa
actcatacagagttgagctatattatatttataatgatcgagctctacacattatagtcgagctatatgattaagtatgatcgagttttcatatttactttaaacaaaattatatattttgtaattgttataatttatattgccacattctctactaataaataaaattaataataatctagatgatttaatctatttaagaaaaaaattgtgtttctagaatattattgtgacatttcatatttactttagacaaaactatatattttgtaattgttataatctctattgccacattctctactaataaataaaattaataataatctcgatgatttaatctatttaagaaaaaaaattgtgtttctagaatattattgtgacatttcatatttactttagacaaaactatatgttttgtaaatgttataatttatattgtcacattctctactaataaataaaattaataataatctcgatgatttaatttatttaagaaaaaaaatgtgtctctagaatattattgtgacattttatatttactttagacaaaactatatattttgtaaatattataatttctattgctacattctttacatttcattataattttaatctatttaccaaatggtataatttctattgtcaattctaacctttgcaaaatttgatcaatataaaaattaatgtgattaattattatgaatcccaactatgatggtcgagctctactaattacagtcgagtcatataattacaatttttactaatctcaaccacatatagtcgagctcgactgctctcagttgatccattttttgaaattttgattaataattataaatctcaaccatatatagtcgagctccatgtttttcagtcgtgccctatcaatcacttatagtagagctcaactaacgtcagttgagccatttcctgaaattatattttataattataaatctcaaccataaattgtcgagctcaactattgtcagtggagccctctgttcaaagtctgataaatatataaaaatctcaacgacatatggtcaagttaactcaaaccaatcgagttctaattaaagcaaacacac

SEQ ID NO: 109295 - DNA, 761 bp, Cannabis sativa
ggtattgcgaactctgacaatatacatggatcattatcctttcaaagattttatgcttgaagaaactatgaaagattttcaaagaatttttcaagttaggtagctcataatatgaccaagtttagaccagattctcatggtgctggtagtcttcattatgtatatgtaaaattttctttaaatcaagtctatgatattttaattatatctacacatatctttaaaattatagccatttcgctttcatataaatcattgtaccattatttctaactctacctaagccatttgagttgtaagtggtgttaatttgttggataatatgaaatttataatgacataatgaacttatttcaataaataaaaaattctataacctatataattaattagaattttgggtagtctcttaggttgttttttatttatattgttcaatcttttctcaaattttcatataaggttttttttatgatttttttagtaaaatatatcactactacattttttttatttaatcttctaatttgtaacataaatttaaataagaacaatcttattggatagatttttgtattgattattctgttaagcaaaaatcaagtgtttttgtttactaaataataaatttatataataattaatagaaaataagtttactatgaagagccttaaacaaatgaataaatgttgtggcatgtaaaaaataattaatggttaataaataaaatttgaatgattcaaatatttatttttgccat

SEQ ID NO: 109296 - DNA, 640 bp, Cannabis sativa
  modified_base (31)..(55): a, c, t, g, unknown or other
  modified_base (247)..(249): a, c, t, g, unknown or other
aattgtgaaaaaccattaaggtaagtggttnnnnnnnnnnnnnnnnnnnnnnnnnggagaaatatttggtagatatgcagttaaaagatcattaagttgttttttaaattatccaaacttacctccccagaaattcgatttgcatattgataatagtataaggtctatgattagttactagccgttgcctataccctagtgataggaaaattttagaatgattgaatggttgtgtacttagtgtaannnattactagattcatggatgtcctaattgtaatcttaagaacagctaaaactgttaactaaggtttgcatgtttgatagctattctaagggattagtggtcgaccatcccatggtcattaagataagaaagtgtttgatttaacaaatactacttttctaagaaaattactaattctgaaaacaaagtagcaaataaaggagatattttttcatgattccaaaagtgttctatcatcttattctgtataagatggtctcactacctctgttgtcttgacacaaccgaagaggataattccacttatattcctagacaaaaagtcaggtaccttgtcgtagtgggagagtttcaaggaactcaccctgttatgacttgaaagacacttgtgat

SEQ ID NO: 109297 - DNA, 615 bp, Cannabis sativa
ttaaggatttgctatctcgctactctcagagcttagattgctaggtttcaggttgaaaatcaaagaaaatggatagaaggagagaaaaaaattattgaaggagaaaagagagggtttcgttcgttctgttacatcttaaaacttaaaatatatatatcaaacaacgaaactgataagtttcgttttataataagaataataataattattataataatataataatataatattaataatatattattaataataatattaataaaaaatttattgttaatagttatattattatttcttagtcactaagaaatctctatttttagggtattttgtcaacttcgagtaccctaaaataccccgatatttctaaaatcaacttatcccaataatcttatcaatatttctaactaaaattgttgtgacatttttggcctccaatcgagtctccagggttgccaaacttgaaaatatttttatttcacaaataactcatattatatccatgcatttcatataaatccccgcaattaataaattacgcttatatatccacttattgagtctccagggtcggcgaacctgaaatatttttattccacatatatctcatat

SEQ ID NO: 109298 - DNA, 973 bp, Cannabis sativa
gaaataatactactgaatatgcacctctaaaggacaaatgcaatatttcttcaagttccccaaaatagtcaaaacattttgtccctgcaacggataccccactgttttgagtattgtgatctttatctcgactgtgtacaacaaatcaaactccattaactattcaagctggatatgaatatacaacgagatcagagccgtatgctaaagctagcaattcatcactatgttctaatgacctgagcttatagaaattaaaaatctagaaaaacatgcataacaatcaagatttgagagatttgataatttagattaagtaaagagtatggaaaggaatacttgcacaccttcttatgaaaccacgaaggaattttttttttttttttttgtgtaaaagattatggttagcattcgggtccctctgtgcgattacttctaggtgctctctattaaaagaaaaaaaatattataaatttagctaaatagataatacaatgttattcgttaaacattatgtaataatttgattaacttacgtcatataagggtcgatcttcatacaattttgtaatatgtaccactcagctcttttgcgagtcttcttattgagagttgtgattatttgcttacaaagtggacgacattgagatttaaaaactgttaaatatcgagatagactagaagcatattcattgcgctcaggacagttgaattttgtatgcacacctttgaagtacatggaacaaaatatcaaagcctcatctataacgtatcctttggcaatagtccttccaaccttgttttgttcctaacataattcttcaattttttcatgtacctctcaaaagggtacgtgcatctcataaaaattggcctccctaatgtggcttccttgggtaaatgtatcaccaaatgtatcatgatatcaaaaaatgctagaggataaatcctctccattttgcacaaaatgtga

SEQ ID NO: 109299 - DNA, 796 bp, Cannabis sativa
agtttaaagcttacattactaatgcgagttacatcatttatttattgatagtagggtcgaaaatgttctacgttccagtagttttttattagcgagccatcaagtcgacccaatttatagactccgagtccaactactacttcgatgacatatggaccctcccagttcgggttgaacactcctgctgatgcatctcttgtatttgcaaagattcatcttaacaccaagtatccaacattgaatagtcctttcttgaatcttttgttgaagtgtcttgtgactcggtgttgatatgcagcgttggtgatttgcaactaagttcatttttcctcaagtagatccaaggacaatttgaaaagttcttggttcaattcttgattataaaactctcttctgtgagtcaatatgttcacttcaacaggcagcattgcttctaagccaaatgctagcgagaaaagagtgtcccgtggctattttctcggtagttctgtgggcccagagcacctgaggtagctcgtcaacccatcttcctttggcagcgtctaacttcttcttctcctttagggttttattaacgactgtccatttgcctgaggcctagatactgacaagaagcttttgataattttattcttctcgtagaatttagtcaacaagttgccatcgaattgggttctgttatcggatactatctttatgggaattccaaacctacaaataatgttcttgataacaaagtcaaggactttcttacaggttatggacactagggactcgacctctgtccatttagtga

SEQ ID NO: 109300 - DNA, 1040 bp, Cannabis sativa
  modified_base (198)..(198): a, c, t, g, unknown or other
aaacatagtgtttatacataaggccacatttaattacaatttcgtttattttttaaaacacatttttcaataactaataaatataagtgttatttagagtgtttattcaaataaataaataaataaacttaaatattctatttttaaaattattatgatattttaataaacaaattatatttattatcataataaacntactagattaataatagcattataaacattaataatactaatcaaatgtttaataaacatatataaatgcattgtttataaaatataaataaaatttataaatgtgtttgtatattctttttttaatttcatattaaattttagtaaacatattattttagtaatatatcaaaatataaatttaacttttatatttacatatttagctttatacgttttttttttagaaaatcaattgaaagtaatcaacaaattaaaattgtaaacatatatgtttatttgtaaatattcataaaattgtatagaattatataattatatttttttgcacatttttttgtaatattgtatatttacttgtactaggttgatgttacatgcaatgcacgtataattagttttttttaattaggttcaattaggtgatgttaagtggaatacatgtataatttattttaattaggtaatgcattttttaaaaaaaaaaattaaatggggtttgagattttgatctttaagaaaaaaaaatagatattgctacattagtgtgtcatttggatatgattatatatatacgtattttgttaattttttaaaattttctaaattaggtaacgtatactatatttttaaccaaaacttacataattaaatttgagtgtgtctatataggctggattcgtaaatttaatataaaggttttttattcccaaactttacgaaaaatatggtgtgtgaatcgatttaccctagctaaaatagaaagcaatcaatttcttattacaaccatttcaatttaaaatataaaattaaaaatatggttaaaaatatttataatattt

SEQ ID NO: 109301 - DNA, 517 bp, Cannabis sativa
ttgttatgaaatcccatatttcatgtaattttcacatttttatttttacctaaagcccaaattagcataaagtccgtcaattaataatgaaaaagtagatatagaattaaatctaatcaaatttaaatttaaatagtatatgatttaaataattttaattaatttatttaatatttaataattatttagtgaaagagatatctacaaacatcatagtgaaaatgaatttgatttaaaaaaaaaatcatagtcaaagaaaaaaaattagaagacagatcatcaccgtatcgcatttgataaaaaaatacaattgataattaatctaagaaaaaaaacttgtgagatgattttaaaactgatgtcatcactgtatgttacttttagtcaccactacattcaaaataattaaagttaagaaaatattagcaactaaaaaattttcacacaaaatagagatctatataaaaaataatcgataaatctataaaaaaaacttatcatatgatttaaaaattat

SEQ ID NO: 109302 - DNA, 840 bp, Cannabis sativa
aaacactattgggaatctgttggggaagatttctgtgatgctgtcgaggatttctttgacaaaggtagaatgcacaagggtgtgaattccacgaatgttgtactgatacctaaagtgcaaaacccaaaaagacctaatcagtttaggcccatatctctttgcaatgtgttgtacaaggttatctccaaaattattgcaaatataattaagcctatcctcccctcgctcatctgccctactcaagctgcttttgtccccggtaggaatattcaagacaataatgttctggtgcaagagattatccactcttttaataagaagaaaggaaaagagggtttctttgcgattaagattgacctcgtcaaagcgtatgataggctaagttggagttttattgatcatgttcttgattgtttcggtttcccccaaaaattctgcaggtgggtctctcagtgtatatccaccacctctctcaatatttgccttaatggtgggccggtgggtaagatcatgccctcgtgcggaatccgacagggggacccgttatctccctaccttttcatttgtgcagcggaagtgctctctagattggtagatgaagctattgggaaaggaagtattcagggaattaagctaagtaggggaggcccggtgatttcccatcttttctttgctgatgacctaatcttggtgggccgggctaacctgggtgaagcaaaagcctactgggagtgccttgacaagttctgctcgtggtcgggtcagacagttaacaagcttaaaacctcaatttttttcagcaaaaataccccggtagggatgaggagaggaataaaggaa

SEQ ID NO: 109303 - DNA, 1461 bp, Cannabis sativa
  modified_base (377)..(381): a, c, t, g, unknown or other
  modified_base (519)..(521): a, c, t, g, unknown or other
atggtgattgttggtaaaatcgataaaaagtaaggattatacctaaaaaccttgtggaatgctttaagatattaaagaagtataacatgaagctaaacctgaaaaatgttcctttggagtttcctcgagaaagtttttgggattcatatttaacgcgaggggtattaaagcaaatcttgaaaaaatcaaggcattaatagacatgccatcaccaacaaagcctaaggaagtacaagccttgacaggaagaatggttgcacttaacagattcattttgaagtcaactgataagtgtgtgccatttttcaacatcttgcgaggcaacaaaaagttcgaatggacaaaagtgtgtgaagaggcctttcagaacataaaannnnntctagcaacgcctctagttttggcaaaaccaataattggagagatgttgtttctctacttagccatctcgaaagatgcaattagtgtagctatagtgcgagaagagggcaagcaccagcaacctatttactatgtaannnaaaggttactaggggcagaatctagatatccccctctacaaaaactctctttgtgcctagtccatgcgtcttgtaagctacacaacttccaggcgcaccccataaaagtgttaaccggtcagtccttgagacaagttttagcaaaaccagatgctgatgcttctggaagattgataaaatggttgattgaactaggacagttcgacataacatatcatccttgaacttccatcaaggcccaagatttggctgacttttgatagaaggtataactccaggagaaattcgaccagcgagacgcagaaacctggaagttatacgtggatggtgcatccaacaaacagggttcgggtgcaggggtaatattaatataatcaaaaggctttaagtttcactgctctgaggttccaatttgacgcatctaataacgaggctgagtatgaagccttgatcgccgagttaaagatagaagaggcattgaaagtcaaaaatctcattttgtcatagtgattcgcaactaattgtgaactaggtcctcggggaatactaggccaaaggcttaaaaatggcgaagtatttagagaaagttcagaagaacttggaatgattcaattactttaaaatcaaacaaattccaagagagcaaaactccaatgccgacgccttagcaaaactagcctcgcagaagacctagatgaattgaacttagttccggtagagatgctgagcgagccaagtatatgtgaaactgaagacgtcgagatgatagatagctctcctacgtggatgactcctattattagtcatttactcggcagacaacttctgaatgaaaaaaatgaggcacgaaacctattgtattcagtgccttgctacacaattatcgaaggcaaactatatagaagggggtattcaatgcccctacttcggtgtgttctcc

SEQ ID NO: 109304 - DNA, 537 bp, Cannabis sativa
  modified_base (210)..(212): a, c, t, g, unknown or other
  modified_base (379)..(384): a, c, t, g, unknown or other
aatatacatgagtaattattctttcttgaaccaccactactaatctaactttaagtttaaaattgcctatagtaagcatatacaagttggagattttctaagatcgaggatttatcatttcgggacagaatatcgagaatatagtcatctgcgccattcaatttcatagaagaaaatagaatgatatcataagcagatgatttataaacnnntcatccaatgatatactatttaagtaaattcaaaatgaaaagctaagaggaaaaatcaaaggataatttcgattaaaataagaattcaacaatgtcttgctaggcgagtgtcaaagtcattcttatttaaaatttcttcatggtttcatattgtaaacactagtctnnnnnntcatctttggatgtacaactagatgttgcattttcaaatacttatcaattgagatctaacactattatgtttgtccaatggagaacaatcctttgggatttgtcccattaaaacaataaattaagttagaccaacaatgaagagtcgaaatta

SEQ ID NO: 109305 - DNA, 1593 bp, Cannabis sativa
agagagagagagagaggataaaggagatggaattagggttagggttattagttttcggttatttcagaagaagaagaagaaaaaaaaaagaaaaagaagaaaaagaaataaaaaaataaaataaataaaataaataaaaaaataaaaaaataaaagaaaaaaaaagcaaaagaaaaaataaaatgattttttttatatataatttatgtattttttttataatttttaattttttaaaatattttaataattaaattatgtggaccactaaaaatttgccacgtgtacacgtgtgtacacgtgattgtccaccgtggcacttaactgtaatttttggacggaggggtacagagcaaaatggaatgggagttaagtaggttttgccaccaaaattttagtttttgtggttaagtgttacaaaacgtaaaattcaggtggtttagtcgccaaatgtagtattcacatttaaatttacatacaataaatttaaaagtgtttttacaatgcacctctccaaaaaaaaaagtcacacatgcaacagacagtttgaagtttattttcagcgcgttaaagtttttcaagtttttcaaaattttacaggatatcttaaataacaataatgtacacaactataaaaaaaatagactaaaaaaatctttgaatgccgaaatatgtaggactacatcaatacacaggtacattattttcggcgtgttaaattctttttaaatttcttaaaattttgttggatgtcttaaataaatataacatacacgactataaaaaatgagactaaaaaagtctgtcgggcgtcaaaataaataggaatacatcagtacatcttatttagaaagatgtatggtagaatttttcaaaattaaattcttaattttataaatacatctaataagataaatatatatatataaatattaattaaaaaaaaaaaagacaaatgtcgtgtctacagtgcacgacatatataccatatactcggtatactagtcgcatgagatgtctacttggttattacatatactcagtatatgtgcgacaagtattaaatcgtctcggtcttgctatttttttgactatgcaaggcatagtatgcgactagaccctgtctcggtcgcatcttcttgcaagttgtcatcaagccaaattagtcctatgagaggtatctactaaaacgttatcatttctattgggaacccaggtccacgtgtcaattttacacgaggttgtactcgtacttttaggtaaaaaatttgcactataacaatttatatcatttaaatagctatgaacattatggatgatgcatacgatagatgcttaatattatattttttgttttataaattattaaatctgatcacttggtgattgaataactgtgcggatgttattgttttatatatattgagcaatggtcttattttatgacaattattttttatttattatagaagttatactattattttatatatgtattttatttaagggtaaataccattttagaccttgtgttttgtaaaagttacagattagaccctctgttttgttaaatgataaaatggactctgtatt

SEQ ID NO: 109306 - DNA, 747 bp, Cannabis sativa
  modified_base (286)..(294): a, c, t, g, unknown or other
atcataaagagacatatagatagatttacgtacgtggaaacactgttttaatttttaatgtttcataacagttgcataaatattttgctaacagttatttcatctgattgaaagctttgtctgatgcaaccttaacggccaaccacccaaaaaattttgtttgattgaaaccttcgcctgatgcaatcttcaaccaaccacccagcaactaccctacaactatcgtctgattgaaaccttcgtctgatgcaactaccgtgcaatcacgcagcaaccaccctgcaannnnnnnnngattgtgtaagtgatagtgtaagatgtatttcggtaattaaaattacatgaaaggtataaatattgtccacactttatggaagtgtttttataaataaagtgtcaatttatattttctatgtaataattcccttaaaaaattctctataatatatcttaattcgaagatagaaagtattctaattcaaagtttatctctttatgagagatgatgtggtgctgcaaacttctttttttttttttcattttttattgtaattttgttaaaaaaaaatggtaggatacaatgatttttcaaattttatattaaataatttgaatttattacctttaaaaaaattattagtgaataaatataagtttttttcttaaaaaaatacaagtcattttaatcaattagtaaaaatacagtatatatgtcattctcctattagataaattatttaattttta

SEQ ID NO: 109307 - DNA, 969 bp, Cannabis sativa
agtactcagtgtctggatcaaggacatagaccagaactcaaacccaaactcgaactcaaactaagagctggacacatacgaagacccagacttacactcaagaacaaaaatcgaaacatgtattagaaagggaccaagatctttgaacgggaccgggacctgggctgagacccagcctcgaaccctacctgagaccgaaacctggacctaaaccttgcctcagacccaaatcacgacccgaacccatactcatatccaaactcaaccaaaacccgtaccccgtgacttgaaactgaaatcgaaactagaagcggattaggacccaagaaaaagaacatgacaaggacatgaacatagagccaaaactataaccggaccaggacccagactcggtcaaagactgactcttggattgggtccaaaatctagatccaaacccgaactgggactcaggacaaaaacctacacctgaattcagaccagaacattgaacatgactcgggacccagaactggaccccagtctcggtcctggacctagacccaaacctagaccctgacctaggacatgaatggaaacaagactaggacctgtgattgggatgcagatcttgtccaatgattagagaaccggggcttggacatgacccatagtcaatgtcttgattagggactcggacaaggacccgaagctggaaaaggacctagacccaggcccaaacctgggacccaaaaccgaaacttgaaaaagaacgtgatcaagaccatggaataggaccgggaccgtgacctggaccttgacccggactcagaactagaccaaacctagcacagaactcgggttcagatccagtcctggacccagaccagcactgagactcgaaccagaacctgaacacgaactcgggactcgatcccagacgcagacgaagcccctgacctaaattggaattcggacctagacatggac

SEQ ID NO: 109308 - DNA, 826 bp, Cannabis sativa
catgggcttgggaacccatgggctgtacaattcattaaggatttaattatccaaaagaaacccaatgttgttttcctttgtgaaactttagtaaaaaaagaagttatagagaagcttcgtagtgcaattaactttgatggtgctttttctgtggatgcacaaggtaaaagtggaggggtggcactattgtggagagtggagggggatgttaatctgttggggtatggttcgaactatatagatgtgtcgatttcaggaggggagaaaggtcattggaggctcaccggcctttatggtgaacctaataggaatttgaggaagaacacttggaacctggtgcgaactttgaaagatcgagcttcactttcatggtgcattattggtgatcttaacaatgtcacctctcagtcagacaaaaagggaggcaacccgtaccccaattggcttattgagggattctgtgaaacgttggaagaatgtgggctggtagacttggagttgggaggcttatccttatacgtgggagaagggatgggggactaatgcttggatagaggttcgtattgacagagcagtggtttctcaaacttggttagattttttccctcttgctaaattaattaatcttgaagtttctacatcagaccattgtccacttcatttgattctggataatattgttcaaattggtggtagaatacctttcaaatttgaaaattcttggctccgtgagcctttatgtttgcaaattgtgaaagatacttgggattattatgctggttgttcaattctccaaaaaattaatcactgtggtgagaagcttcag

SEQ ID NO: 109309 - DNA, 1431 bp, Cannabis sativa
  modified_base (39)..(43): a, c, t, g, unknown or other
  modified_base (181)..(217): a, c, t, g, unknown or other
  modified_base (652)..(687): a, c, t, g, unknown or other
  modified_base (764)..(768): a, c, t, g, unknown or other
ttcatatctatgtttagcactcccactcaattgaactannnnnttcccaagatgtaaatatccgctagaaatattagttaacatccacgaataacttgaagaatatgaataatacaactaagttgaacctaaccatatcacgattaagatccataaacttaagatcaactattgatattgnnnnnnnnnnnnnnnnnnnnnnnnnnnnnnnnnnnnntccaagatcaatatcggtccctttgccaataccctggaaaggacagaacacttatccaatgtgtaagtataccttatcgccgattatcatgtcagtataaatccaatgaacagaaaaatcatgagaattaaacttttgaacatataatcatgattatatttaactgtactgacgacactataatcatgaacaaatatagatttatttatatatgttcaggacttaatagaatttatacattaaaataatcatgaaataaatcatgtgaaccatgcaacgatttttgatcttatattaattagtaaatctgattttattgaaatgggttttatttagggtacaaaactcaacaaactcccacttgcactaatataaaacaaagagtgcatttcaaataatctcaacaccttatatctagatcaagtgtagtatgtnnnnnnnnnnnnnnnnnnnnnnnnnnnnnnnnnnnntcaatacaaactttctccaccattgcatatccttaatcacaaaatcattgatattatgaaattcctctctatatgtnnnnncctctagggatactggattctttactttttggcaactacttttgtattagtcaggaagtaacactagtagttaattcattactgtacaatcccaaaaactgtataaaactttccatagactgaataagtatccttcctgtaactttaacattcaatctcagtggtagagttagagactccaggtcagtttttacaattctccaaaatcactgctccacccctagagtaatcaccatctcatcagtcgactttctagcactaatgcaagtctagaaacttgatttggtgcagtctaagagtataaaatatcacccttattgactaacatatagttcatcttctagagcttacgattaacttgattatcttcaaatgttcatttcttggatttaatctgatacctgctcatttactcccactcaacagcaggtgtgtggtctaatgcatagcaaaacatatctaagacctctcactgttgatcctaaggaattatttccttggcctttatcttttcttgaatatttgaaactttttcttagataaataaaatctatgtctataagtcggaaagcttctatagatttccatttgaaaaatgctctagtatcttacaaaagtaagttgcttgcactagagtaattaaatcaccaagcataccacaag

SEQ ID NO: 109310 - DNA, 636 bp, Cannabis sativa
atccaaaggaagatatgagttgagacggtgaacgtcaggctttgaagtctaaaaaacaatatgattttctcagcattgagggtttatttccctttttcaagtcttttgagggccacttcgacgtcaagaattttttgtgagctgggagctagaaggtctttggacggtgagtggtcttgatccttggaaacatttgtagaaagatggttagaattttgtttcttaagggttgttttaggctctgcttcgtttcttgccccttttcactggaagattgggttggtttggaagaagtttaacaaaatttaccatttctgcaaaaactaataagtaagagatgagcgagactagagaaaaaatttgtaaggcacacaaaaggcaaaccgataagtcctacctaaactactatctgaaaaagttagttgaaggtgaatcaactcgagtatctatgtacttccttgagccagtaatctcacaaatatctacaatgttaattcagttaagatcccaagtttctgcccagtacgcatttgtcacgcccgtacttttcataaattactaatttagttacaagcgttaaaatgcggaaaatctataatgtcgcttttatttataaacataaaatatttcatattt

SEQ ID NO: 109311 - DNA, 2979 bp, Cannabis sativa
aactagaaaaataccacaagtatacaaaaaataactatctagatatttcactaactaattacttattttctaactaaaatataatatattttaaattaccaaaaaaaaaatataatatattttagtctatttattttaattaatcattaatgaaaaatttactagatttaagttagtttaaaattaatttccaactttgatctatttttcaaaaaaaaaaaaattatctgcattaaaataatgcattttgaagtgtctagaataaaatcaacttaaatatttaattaaatatattaaataaaagaatcaaataattaagtatctgaataagatcaacttaattattaattctaatttaatatctaagaaaaatattctaatttaagttgattaattaataaatcaatttttaacttaaatatatttttttaattaattaaatatttagaaaatataattagttagtagaaataactatttagaaaatatctcattaaactaagtgtgtttctcaatgtatttcaaccacctcccttaatatttgcctaaatggaggacgatttgggaaaattacgccctcttgtggtctttgccatggcgaccccctatcgccttacctcttcatttgggctacgaaaattttgtctagactcctggttgatgctcagtgtaaggccattatcaaaggtattaggctcagtaggagggcctattatttctcatatcttctttgcagatgacctaatcttggttggaaaagcgaatatggagaaggtcaaaggctactagcaatgccttgagaggttttgcacctggtctggacaataagttaataagctcaaaacctctattttttttagaaaaaatacttccaatagtatgaaaagaggaatcaaatctactttggaaatcagctcccctgaaggtaatattaaatatttaggattacctcttttcagatccagacaaaaggatgccgacttcaattttatactagataacctcacatctaaactttaaggctggaaagctaaaacgctgtccaaagcaggtcgtgccactcttattaagtttgtgggtttatctttggccatgtatggtatgcagacgacgaaactttccaatcgtttggctactaagattcatggaatggttcgtgaattatggtggggatccgagaaggggaaccatggtttgcatctcaaagcttgggataagctttgcctccaaaaatctttaggggccctgggctttcaaaaatctgtagaaatgaatcaagcgtttctagcgaaatggggttggcctcttctaacaggcaaccaattcctttgttgttagatcttggaagccaaatacctgaaaggaaggccttttcttaacagtacctctaaagattcagattcatggttttggaaaaatgtagtgaagaccaaacgtatcttaagaaaatgggcttgcaagttggtggcatatggaaagaatacttttatttgggaggacccttggatcgcccacaaaaaagattttttccctagacctaagggttcttccatgcttggggtgaataaagttgctgagctcctgtatgatgatggtggctggaatatcccgaagttaaacagtcggtttgaccaagagaccgtgtttgcaattttgaaaggggatacaccgtctggctagggcaatgatagatggatttggactttggaaagtaacggttgattctcgagccaatcggcttatcttgaccaagcttttgatcgggcaactcattgtgaggtcgccccctcactctagaacaaactgtggaatagtaaaatttcagagaggctgaagatcctttggtggtgcttattgtccaaagcaatcccaatttgcttggagatatgtaaaacatttcctatagaggatgttaaatgccctctctgtggaacagaggatgaatccattgaacatctttttctttcctatcatgtggcgtctcacttgtggcgatctgtggcacgggtatccggatgtgggattgggtcaaattcttgtggaaccttaaatataaaggaatcaactctgatgagatctacctttatgcttcattaattgttgacaccatctggcgaattcgtattgataaggtacacaataattgtccagttgatgtatttacttgtattgacactatttgttcttcttttgcagatcaccatgcttcgatgctcccttgttcacctccgattggggcagttgtctggtgcccccctcctcaagactggattaaactaaattgtgatgttaaagtgggatttgacagcatgtgtgctgtagttgtggcaagggatcatcttggcaaggtgatttgggttcatacgtctagattggagtttgctgatgtgttatgtggagaagcgaaagcttgctgctttgctctagatgttgcattggacaaaggctagaagtttatcatggttgagagtgatttgagggtagttatcaacgctcttaatagggaggagacccgttgggagcttgagaattatgtctatttctatattaaatcctctctctattttaatagttgtattttctctaatatcagtcgtaactgtaattttgttgcccacaatgtggctaagtggacattttcccaccgaatatttggttgtattctggtttcctctatccctgaactcattttttgtaacgaccatgcggtctaactgatattatctattgaatgaccgcttttcttaaaaaaaaattgtttttctaaaattaatcttaaaataatctaatgaaaataaatttcatatatcttaaaactaattatgttgctaattcaatttatataattatttaaataaggtaaataaacattcacaattggagttgtttgtgtgagggagggctgggttcagtatgttgtacccactactatggcccctaactctcacacaaggtccaaaggagaggaatttaaccatt

SEQ ID NO: 109312 - DNA, 1628 bp, Cannabis sativa
aattagaacataaaaataaatagacataagattctataaaggttcggtccccttagttagtaacgacctactctctttttagctgtattggtattagagataataccacttagatcactatagtaatgggatctgaagtggctctcttaatattacaacgtgagaaccagagttgggacatatcaagtgagaatagagcaatagtaggcatgagagagagagagagagatgagatgaactgagttattagacttaaagcttaaggcttaggataacttagggttttagggtttgattaacgctctttatagagtagagcatacatccctaatattccttaaaaataggtaaataaagttattatctacaaaataaattaataaaaaaatgactaaattgcccctcaaaatagggaagttgctgatattttccctctattttcgtgggctgttaagggccaattagtggtttgacttgttgtccacggatgaaagttgcgcaccaaaaacttgccagaccaatggttggctagccatgcacctacaaagtgcatgttggccggccatatggtgtccaaaagctggtcagcctatgctggccatagggtcggacaagggtggctggccagccccttgaggtggctagttcgtcagtcgtccttcctaagtactcggaccccacgtggttgaagtactgagtagatggcttggccttcttgttagcgagctgtactcccacgcgacattggccacgtagacatgccacgtcaggtgggtaaaaatcgggatgacatttacccccaagtctctatgtagatgtctgtgcaaatagggaatttccagcttattcgaggctgatgtaaccttaattaggcaaatattagcctttaaaatattttctcttgactgctaagttaactgcattactcttctgtatgctttttagttacatgttgcatgacaagtgagaagaggtcccatagaagctatataagcttatgggagggaaatcacttcacatttcccagattgcaatgtctccttataagaaataacccttaaaagctcttccttctctctagagggtgacacccaatagtgctccatctctttcaggatttttgcaccattttgttaatctaaccttcccatcttcttcgtcaacactttctggtagcgggtaagctttcaaatcccgttcttcacttgtttatttgatttttccatggttgttatgaagtttttcttcgctttgaatattttctgatttccacgttagattgtaatctttttggtattttgatccgcatgatagttttgggggtgtgtaatgtgtgatttcttgaccaaaaagattcaattttgaccttcattatgattcttgactctctgactcacgaagaacatgtttgagttcttgaaaaacatacactttaatccataacacaacctggccagccataggggccttgtttaagacctagccagccatagggtcttctcatggtagctggccggccatagggatttaccttaacgtctggctggcccatgcctgggcttagggtccctgctcggcccttgactgggtcatggaacctgttggatattttttaccaggatctagat

SEQ ID NO: 109313 - DNA, 517 bp, Cannabis sativa
ccaagcaaaaattttcactttagagggaagttttaagttccataaaaacttccaccatgtttcttgattagaagaactacaaggttgatgttgatcttctaaagaacttgccaagtgataccccgattgaacaagatattctcccgaactggtgtaatgccaaatccacctatcttttaaattgaaaaaagaaagaggaatagtaagtatataatcaatatcagcaggagaaaaatgttggtgcaacagagggatattccaagtcctgtgaggagtaatataagtggaaacacaggtatcctcacaacccgagaaatgaagaggagtaaaatcagcattacgaggtatccaagggtcaacagcacagcgaatatcaaagccatcccccactttcattctcaatccttgtagaagaagctcacggccccaacaaatgccttgccaagtaagagaagacaaaccctctttcctcgcactcaaaaagtcattatgagaaaaatatcttccctttagaaca

SEQ ID NO: 109314 - DNA, 520 bp, Cannabis sativa
attaaaataaaaaaaatatataatatttatgattatttaatattttgttgaaaatatacaaaaataattatttttttttatttttttattatttaaattagacaatatagtcatttttcgcgagactaatttaatcattttattattataataaaaaataactattattaatataataaaaattattttaataaatagtaatattgaaattatataatataattacatattaatattattgattaaatttattagaaataaaactccataagaaaaaattatgtctattcacaataactaattatcattatttagaggattattgaaaagttcattagtgtgttctataatttattattgacctttttttcaagttttaataaaaaaaaagtaataatattacaaaaatactttcagttggccaaataaacaaatattcaacccaaataaaacaaattacacaaataccacttacacacaccttcgtttcctgggcaactatcgcgcaaccatcgcgcaa

SEQ ID NO: 109315 - DNA, 529 bp, Cannabis sativa
ccacatttctagcataaagtgtatttaaaatatcacttttgtgtatttcctcttgaataattttttaaggtcacttttaaaatactatttgatatttttagtttttcaacaaaactaaaatatcaaactcacaacatcacttataaaataatgtgattatttttttttaagattcaaaattgcttctccaattttgttatcttttcacaatttttgaatccacattgattcactttattttgagtctaaaattgctcttccaattttatggctcatttcacaagtttggatccactatgatcttaattgttcttgctatgagaagacaattctcatatgtgtaactctcatagtttactttcttatctcataaaatgagataattatcacttttaattctcaaagaatgtaacacttctcacaagttaatatttcttctctcaaaatcactattggaaaaggaattccaagttctcttttattcacaatataaatgataatatacttcacatcaattgtaataaataat

SEQ ID NO: 109316 - DNA, 3251 bp, Cannabis sativa
  modified_base (3202)..(3214): a, c, t, g, unknown or other
gtacacgcccaatagggctctccttctctcttctcacttcatctctcacacgcctacctaaggttgtccaacaccctaggctgtccaacaccttaggttgtataacacttgagatttgcctactgattcatactttgtaatccttagggtgctatagcaaatcccacctatagtgatatggatagtatttccctcgatataaatacaatcaaaaggggagtaggtcattacccgctatcacaagggagccaaacctctataaaaaaatgtcgatgtttattgtttttcattctttgtttgtgtaacacatcgcaagcatcagatacatacgaccctgctgtcaattgattactttttaaggtcaacactattcaatatctgatagacaatcatccctatcatactttaataactgttcattatatgaaaacgtaatcaaaggcagatacttgtttcgtgaattcttgagattcattacatgagtttgctacatatctttcaaggtcataatcatccctttggactagccatcttcctaagggtagaaaactgtactaccatacaagacacccacatcatacagggcatcaaactagcatagagaacttatgtagaaaaatttaaagcttagtataagcgaaaatctaccgctaagtcaatgcacacattctttgcttggcacaaaaaaagtaaattcagatacttacatgtcaaagcataagaagacagccaggattaaagactgtctgctcagtcacatatcaataataaaaggctttaaggctaaacaaaagtagtgttcaaaaatacagtgcctataggccaaaagtaagaacacgaaaaccctaaggctgaaaataggtaatgttcaaaagtaaaaggccaacattccatacacgaacatgaaactgaatatgtctactaatatgaattaaaatcataaatttaagatactaataaaatgtgtcttctcatgtgcaggtgtatggggagtcgagccgtgagttggatcatctggatcactaaggagttggccagccatagcctctgtagactgatcagcaacctcctccataggttggcttgccatagcctcatcaagatagcctaacgacgactccttaggctggatgaatgtttggccaacccaacatgtctacatctttctcttgtagagttcagtcccttgagcaagtgttctttcaatgaaagaagatcccatgtaagaaaggtcgaccttgggattacgcagataaaccttgtacaagaccttagaggacaagctaacatactcatccatgatgtcttattggccatcaagagcaagttgcaacgcttggtccttcttcacaagctccacctccaacttagaggcctcagcagcaaggatggtattttcttagttcctgataccaagcaagtgctccaaaccattgatcaagtcctaagacttttgtagatcagtcactgtctggttatgggcatccctctccgcataaagctcggtctccttggccttcggcttctcttgatgagaacccgaggagcccttagatctaccatgggtaaggctaaactttaacatggcctgaaatcaaaagaaaaaatcgagttagtgacaggagaagacctgggcagccagcccctgaatggtgcacttcttgccagccagcttctcagtaatacaaccttggtcagtcagcctttaccagtgcaataatttgagttaaatcaaatataaaacttatcaagttaagtcttggagactagtagacttcaggcactctagctcgtcatcctatagtttttggagctccccatcaatgatgggaagagtcctgccaatgtagctacaagcagcctcagcgaccctctatccagtggctaagcatgcctcacggccagacttttgggccctcttgctcaaagaccgatgtggaggtggagtcctcctcaatggaggatctacaatcatcgggtgaccaatcgctgcaagccccgaaggagggggaggtaacgaggaccatgtggcatcactggacctggtggtcagggccaccattgacttaggatgacctaaagaagctttatcaaaaggctcttcggcaagatccctcaatttggaagccatatctacaaaaagaaagtaacaaaggcaggatacaagttacaagtatttaatgcaagcaaaaacaaaaagttggtattattaaataccttcatcctcgaaggaggaattatctgaactgctatcacaaacagaagccttacccttgcctctagaaataggcaaaggatgggtaggcctagcagaatctgggcttcaaggcctaattgacagagtggcatcactagtggtgactccacaagccaagccttggcagagggccttctttctcctctccatggtcctcgcaagcctaaagagggggataatttcatccatatcaagagtatgcttgtaacgccctaacaatagaacgtcatgcacagtgacttaacataaattaatttcgttaaactgaaatctattagagctaagtgcggaaattaaactttaaaaaaatacaaattaaaaataataatttgtaataataagttttgcaaacatctaaaagtacacattttaattcgggatcccttaaaactttttcaaaatattactagttattcatacaccccaacctaagcggcagaagtggagatttcaacatcttcccccagtatacccaaccctcgcgatctagtttggcctgaacatgtataatacaccgctaaagtcctcgacttcatgactggtcaacaaaagatttaccctttcctacaaaatagagcacccatgagccacggcccagcaagacggtataaacaacaatatgaatgtcactttaaaatcacttaatattaacgccactgcatctattgtctatttgacataaacctaagtgttacgctcacacatctatttatgtctatatggcatagacctacgtgttacgctcacatgcctatttatgtctatatagcataaacccacgtgttacgctcacacatttatttaaaataaggccttagaatgatttatctcggttctgattatcgagtctaatctaattatgccttaagtgcataattctttatatcaatatattcagtataatatgttgggttgtctgccctatataaaacccatttcaatatnnnnnnnnnnnnnaattaataaaagatcaaaaatcgcttttatgttgcat

SEQ ID NO: 109317 - DNA, 616 bp, Cannabis sativa
ataaaacgttaaaattatataaatacctttaatttagcagtttctcattgatttgatttgattatttacatatattttattttatcaagttaatccaactcaagtttataacaatatttatacatccaatattttagtacatatattttccaaatcataaatctaagcacaataaaaaataataacattatcctaacaattaatataaacttaaataatatgctataaaaaaaacaataattattttttattgagatgtactttcatttcatcattgagaaatgtacatttgaatatgagtaatacatgatcatcttttaattccttggaagacgcttctaaatctttctctattttattgagatgagattatacaaatttttcataatatttaacatctaaataataaacaataaactaattaaaagtataaccctcttcatttaaactctaaatagggaacacctttacatttgtatttttgaaaagcttccttgcgtaaagttaactatgatttgatgaggatatttcatgttaagcaagccaatatgcaaaagtatttagaaaaatcatggttataagaaaaatgacttataataagacgatgagggaaaaa

SEQ ID NO: 109318 - DNA, 974 bp, Cannabis sativa
gtcctattgtcatatataggcatttggaattgcattagtaattccaagactttactccagctaatacatgcccaaatataggctcaagtatattattgattgagcctatattgaagtcaagccatttggatgctagacagacacctcattttggcgagataaagacctaaagaagaaagtttctggacagcaccaagcagtgttcttggaaaggtaattatgagcccccaaatgttaagcttagtatctcgctcatttattattacatctcacaatatcaagattttatttctaagattatatccaagaataggtatttcgaatatggaaataaggtaattatcaattaagcatttatgtgtctttattattcacaaagataggacacattttgacaactatcaatatgacatggcctccacgtcagcaaaagatcattgcctcatgggctgagtttcaacaaatggacccgaagtcaatatgttatttatcccattagtggataacgtttagatacaagaaccctatgtctataataagaaaacacattcatgcaaagggttagaatatcaattcttacaagctaagacaaaaccagggttcataaactcggcaaacacttgtgtaatactcaaagatttttctagctaaataatattgactcatagactagagtttattagtactcgagccgcgtaaaaatttcttatcttgttctttatttttttaatctatttctttaactttaatataattgttatcaatttccaaaaaactcggtaaatattttggtgctttcattaagagctaatgaaagagttgataccaaagttgtatactgcaacgatggtagccactagaaccattgtcggtaaatttagtcttcgtgatgagaacactcttgtaataccttggaattaagaaatggattagcaaaaaccctaattagataattatgaataattgaggaatta

SEQ ID NO: 109319 - DNA, 767 bp, Cannabis sativa
attttactttttcaaattgtacagggtacatgttaggtggccaacggttaattagtaattttttccattgaactttgacatataccaaatcatgcctcttgaatttttttggccgttaaaaattcctcttaaactattgagattgttaaatttaaagatttttatctaatttcattcaattttactgtttcaggcactaaatcatgctccctagactttgatatctaccaaatcatacccctcaaacttttatatatattaaatcatgctccctgaactttcatctatgttagaatttttttactaaaattggataaaagtccttaaatttaacaatcttaatagttcgggagaatttttaacgaccaaaaaaattcaaggggcatgatttagtatatgtcaaaattcggagagaaaaattactaattagcctttttattttatttttacttttaaacttcataaagaaaagtagataggaaaatatatatgtattttatttttcaaaactagatatatatatatattttttttttttttttgaaaggggcgaactttcattcctacaagatatatttgtttaaagcacctataataattacctaaaaatgaatgtagaatttcaacattagctagaaagtagtatttattttaattttctctgactaataaatgggaagtaaaattttaaaaatgcatattaatccttatctttgagtattccagaaaatcttatacatgaagctttcgttttttctctttctaag

SEQ ID NO: 109320 - DNA, 1108 bp, Cannabis sativa
  modified_base (185)..(186): a, c, t, g, unknown or other
agtgagtaaataagcgtaatttataaattacgaagatttatatagtatgtatgaatgtaatatgagttatatgtgggataaaaatattttcaggtccggcaaccctgaagatctgataagtggataaataagtgtaatttgttaattacagagatttatttaaatacgtggatataatatgagtnntttgtgaaataaaaatattttcaagttcggcgacgttggagacccgattggagaccaaaaatgtgacaacaattttagttaaaaatattgattagattattgagataagttgattttagaaatatcgaggtattctagggtactcaaaattcgccaaatactctagaagtagaaattttttagtgcctaaaaaatcataagataactattaataataaaatttttattaatcttattatcaatatattatttttataatattatttttttaaaagttatcgtactgtacgataagtttatatatataatatttatactacaagttatattagtaaacagtttaacgaaaaaatgaacgaaatcttctttctttttctttgataaatttttttctttattaatctattttctttgattttcaacctgaaacttatcaatctaagctctatacaagaaaaatatcttgtagctaccaagtaattagctactaaaatttaattggtagtaataaatagtattttgctaccaaattatagtagcaaattctaaataaattagaccaaatatttttactaccaaaatatttggtaggtaaattacttttttagctactcataatttttagtagcaaaatattattgttcaactaccaatttagcaaccatttttccttagtggcaaataacttgttattttaactaccaatttcgctaccaaatatatttagtagcaaattataagttttagttaccaatttttactaccatttttcttttgtcacaaaatattattgttaattggaaaaatactatttataatacaatattattaataaattattgggtgattctacaatacaccctcttaaaagggatatactgatacacccttgatttgtttcggcatccaaaaaaatttttta

SEQ ID NO: 109321 - DNA, 4505 bp, Cannabis sativa
caattcactgatcctcatttgagtaggataatacaagtaaaaacaatctacttaccgagcttttcccatcagacgggacagcttctgatggaggacaataacttatgttaagaagaggacactgccaagaaaagccaaaacataaaagtgaattgatgtagactctgttactgagaaaagtgtaataataatggtgctaaagattgaagttcaagaaaggtgcttaaataaatgcatcaaaattacacaagcctaaaccaatcacttttgaaacgaaagctaataaataagttcaatttcctccctttcaagcctcgatggcatgtagactcccaagtttcaattgactgagatgccttatgcaacatgggaaataaaaccaaaccatttactccgaaattgtataagaccgaaaaatgggattccagcagcaggttaaagaaaaaagagtacacagaggtcaaaactgagagaaggaaattattttaaacctaataacaacttgcctgttgaaatttttcaactccagagcttgaacctgattgtgtcaagtatgctaaagaagaggcaaccaccttctcagcctacagaataagtacatagaaatgattcatatgaatctaatatgtaaaaaacctataaagatcaattaattgttcaaagtatgcacctccttgtatcccaaagaaagtcgcaaagcataatcagcagcaacatgctgtctttctgtaccactaactgcatcatgatgctgagcaatcgccaaagcatcagcaagtacctcggtgtttggcccagagtcaacccttcctttaaaaaactccaactgccttgctgtctgctcatttataataaaaaaccaatagatgtttaaaaagagaaagtagaagcctaccagaaacttgagagaaacactaacgatataaaagaggctcaggatataccagatagtaaccactcaatgctctgacataacctttaagtcccggacggcttgtaaagtatccggtccaatatgcatttggatgatctgcataccttcagaaaaggtattacatttaatcaagcaattcttagaagctaaaatgaacatgtggacatcaaattatactcacgggaaaaagtcatcagttttaagaggccatttctcatcagttgcatgtttcgcatcagtgtaaacagaaggtgttgaatatagtgcattcacacgcccatcctaagactcgacaaattaatgcaatttagtaacttcaaacttcaacaaagagctccaagatggaatgacaatgaacatgtaataaatgttacttcagtattcataattgaacaatatatttttctttaatttattcaatatgcaaggccctaaaggactacctgatttacatagtgaataaacttgtccatctgcctgaaccatgaaattgcatattgataacgaaaatctgtccccatcatccacataatgtgattggttcttgtcacattagcctaaaagaagagataatgtttactttgaacattccaaaagaattccacaataattaatccctaggtaaatttgaggttaccaaaataaaaaacacacacaatatttatcagcttaatcacgatctacacaatgaaaataaggatatggagtttaatgcataggctcctattattttgaatattgatcatttgcatacgtaatctagggaatgtggagttcaactgaatgattcccatctaattcttacctgtgctaaagcagcagcaacaaagtcattcactcgttcttgaacattatagtcaaacataagagtatcatccttcaaccaaaaaacatgtgttaaaagacgttcatatgcaaattttgcaggcattaataaaattattgaccaaatcagatttacttgaataggtggcgaaacatcatttatttcaaacgtgaaaccatcaggaggatcataatgccggggtgatatgccggtgaaaatctgaggataggaatagttacttggatttcaaacacaattggactattagaaacagagatagtgcataaaatcaactagaagtgcaaactaaagaaactcctaacctgtgacgaagaaccaagggacctagatccttgccatacaacatcaagagttctctctttgagtctcttagctctatcttggtaatcaattcgagaaaaaaagagggagtcaaaacccaactgcaatcaatatggaactgtatgatcaaatctaatattccaatatggcttgggaggattcacaaaaggtacaatctatagatacctctgcaccaagcaaataagcttgaactgcagaatggccaaaagggtcaatctgccaaccaactcgaggagtctgaccaaattcatctttaataaatctatgccccaaagttgtctgatcaatcaagtctatgtaatgaggagttgcctcatcatgcatacacatacccccatttctagaacagcaacaacaaaaattgaaatagaatcaaaaagaacaaacttttaatcatacccagctactaaaaaagtattagatacaaacaagacagtacatgaattccagttgaccagagttgacaagctccttgaccttaatcttagtagacttactttgctgcctccaccatctctgaaaaaaagcctttttttttccgaaatgaaaaaccaataatagtaaataactaagtaatcaatcaacagaaaaaacaaacaaacgagtgaaaaattagtgaatactataagtacaataccatctcaacatagatgaacttgcgattcttctcttccaacaaggctgaaatgacagaatccaatacattctgtacacatgccccctgccaagcaaaaaaaaaaaaaaaaactcaatcaaatcaaaatcaatggcgatcatcatcaaagtatgctaagaagaagcaaaaactcacccgaattgaattgttggcgccaacgaagtactgatcaacagtcttgagccaaccaacatcgtcgtgagagtgaggaaccaaatgaacattgattttgtttggaacaattctggcactggtattgtactctatgtactcagacttcgtagtaatacccagtagtaagagtaacaacggggtcgccaccaagaacagcttcgtccccatcgccattgataaacaaaaaaaatggagtctttgtttttcttttggaataattatagtaagctaagttacgtaatattacattactgtttatctttattggataattttaattaattaattttttaatttaattatttttttttttctttttttcttttggataagtaattattattattattattgttgttgttattataaaaatgtaataattaaatatttgttgtgtcgttgtcacttaactataaagcgacagtttcttatttatgtgaccaaaatgaggaggcgtgcacactcactcactcacttattactcatgaatattctaagttaagacacaaaaaacaaaaaaaaaaaaaatatttatattttaattgaaaagtgatgaatttttgttttttttttaatggaaatttttgtttatttaattcgtattgaaatttgtatattattattaatattaatgttatcactcatcttatccaaatgtttgctacaataattacttcaatacttagtaaatgttaaattttgattaagtggttgatagtagatttaatcaaaaaaaaattacatttaattgtattacaataaggtaatgtagctagcaccatttaaggtgatactttataattaattaataattttttataatttttattaaagtaaaatatatagaactagattagatattaaattacaccaatagtaatattaaattgtacatcacaaaatattagaggcaagatacctattaacatttctttttattaaaagctataaaataccataagtgttcatattgtggatatattaaaagaattaaaagacactccatcggctcaaggccgagttgtccgaaattattggactaagtttaactaaacccttccacagacacttaccttgtcatattgctattctagacttttagttcttgaccaaaactatgcacacctttctccttgcaaatacttgtgcgagctaaacttgtaaaggagaaaataaaaatttaaaaagaaaagtgaaaggaaaagtaaaacttgttgaagagaatatatttacaaacttagtttttcacccttatttttaattcaaaataattaatataaatcattaaattataattttactttcctatactttctttcctttcttctaccaaacaacataacaaaaatacatttttttctatcactcctaaggatgtgctagaagtcatatttcaatatcacgtcaccctgttaatactaaagagtgttgaatttggacttgatttcaacataaaaatacatgaaaaataattatattttttgtaaataaaatcttaacagcggtaaaaatattcacaatttcgtacaacc

SEQ ID NO: 109322 - DNA, 826 bp, Cannabis sativa
aggtgggagatgaggatggttggcacagataaagattggattatttatttatttattttttcatggaataacgaccacatggaatgccaacaaggcttgaccttatttgaactcacgttttaacttaaacttgagtaaatgactaatatcaacggaagtgtgattaatatggtcattacgatttgaaaggttgtagaaactgttgggaggattaaaaaatttagaataatttggagcttaaatatttaagtttgactccatattgttatttatatttttgagtatgtgagatgtgacataaaataagggattagcctcttaataccactaattaagatcccctattgcaactctgtcgcggataagcctcgcgagccaggaacaaggcaagactgaaagatatacagatgtccaatttgccctatcctagcttcccagatactcgaaggcatgttatttatcccaaactcggaatagtcaaaatatggaagcctacccaaattgatacctagatggatacttgaggggcctatcgcggaggtcaaccgcctaagagtgttgcggacgtctacctttggagtaatcctgttcgcccaattacgattatattttttctgaaacaaaatcagatcttgtctcctatgtccaggcatgataatgcacacacctcatccacctttttgcaagacaaatattttagacctctgctttttaaggttaaatatttgggggccacgtgccctctactttttaaggttgaacctttgagcgacacatgtccacaacgtacaaacggtccctaattttccagctatacagcacgcac

SEQ ID NO: 109323 - DNA, 528 bp, Cannabis sativa
tttagtggttggttttacgattgtataatttatttatttgacgtcaatttcactattcatgctccatctcgctagaattaatggttgttttccaagtgttctcgtgttgctatggtggttctgttcgtgggtctggaatatggaggttacaaatacatttctttttctttttctatggttgtttttgtatttgttattctcattctcttataaatacatttaacgagctcactggcaagagagttttgaggggtgtcgttcttttatgtttttttaagtggttatatctgcttcattgttttacatttgttttgtgttgttttagttttgttttagtagtttttctattttgatttttcaagactgagcttgcaaatatagtcactattgcatctggtgttgaggctgtgcaagagttagttttaatccttttttccttttattttttaatttattttagtgtagttttacagttgttttgctatgattatttatttgacgttgatttctctactttgttctatcttt

SEQ ID NO: 109324 - DNA, 568 bp, Cannabis sativa
  modified_base (47)..(52): a, c, t, g, unknown or other
atttaagaattgttattctactatactttatttaataacaaaacatnnnnnntaataataacttacacatacactttaaatacacaagttttacaattgcattctcatgatattataaaagttttcattctcttatgaacaccattacatgccattaagagtaaaatcctttattctcttatgaacatccttatatgtcacttgagaacacattatacaatacaagaatatcaaacaacaaagagtagggtagaagaccttatgcaaacttctctttaattattcccattctttcgttgaacgttattacatacaaaaaaaaaatcttactattccacttaattttacactgtaaagctatagtgtcattcattcaatttcgtagttgtgactcactcatcaatagatacttgttccacgacacttggaaacaaacatgaaagctttttaaaaggtcttctatatataaatatttaatgatctatttcgactacttttttatctaacattcacttcttgatatcctttatccatgtattcattgtacttgtcacgccttcccattttc

SEQ ID NO: 109325 - DNA, 1169 bp, Cannabis sativa
cttttgaacatataatcatgattatattccactgttaagttagttgcttccgttatttcaattaatagttaggattagttatagtagctttgtactataaatagactcaactctttgtaccaattcagattattcaattcaataagattttctctctgtttttaccaaactaacaacatgtggtgtccatcatatttatttcacctactcaatatgttcacaatacttggcaattgaaattattcaagggaatggatgtcataaaataaaggaagagactagaaaaatagtaattatttattttttgtaataaataatattttaaatttaatatttaaataaattttagagataaaaattatctccagaagataagatgacaccacgacacatttgttaagacaaaaagagtggcgcataccactaccattgtgtaataacacagtgatgagtgcttatcagtcatatgtgggacttactggatttatttttggattaattaactaaatctaaagatatatatttctttaaatttaaatttgaaagtttgttatatatattttgagaggttgaaaaattctctcaatcgattagtagatatgtttttaaatattatagtaagtgtttaccgagattttccaaaaaatgattataaataataagaactgaagaaataaataattaaaagagaaaaaaataagaaagatacaaataatttttatgtggttggggcgttaattagcctagtctgcgagtcgatattattcagtagttctttagcttgataatcctttgggaatacaatgaatataacttctcaagttttctaaagcaggtattgtaagagaattcaacccttaatccataggatttactgggtatttatagtagtttaagaattacatttagtttcccgttttcctctattggggagcttacagtgaataacacacttgggttgcctcatgaagtccaccccacaaaggagaggatttactgactaggaagatcgaatttagtttgatttggtcaacaccgtatatcttgattctgggcaattaactgtgaattaattgtttgatatctgctatagaaagtttcctcatttagcttgatactatcctctattgagatgtgacagttattatttccttatttatgcacaaaaa

SEQ ID NO: 109326 - DNA, 1128 bp, Cannabis sativa
aaaatcgggttggtcgggttaattgggcgggttagacctattttcaacccgcccaattaatagattgggcggtttgtaatttttttgggttatttcggtcgataatttttatcggttttttcggttcggtttgggcggtttacaaatttttttctacaaccctagtagtatttgcttattatcatgaggaaattatactcacgattttacaacttatttatttaaacgtgacatttttaaatttaattaatttatatatagtattttttatttttagatatttttatggtatttgatatgacatatatacgtaaattaggttttcaaatctcatatttaatgttttcatttgtttatgcaattttatttgttactaatgcctgaaaaatcgccggagtttgttatgatcagtgccgaaaaaatcatcggagtagctgtcggtgctagaaaagttgacggagttgccgccgacgccggaaaagtcgtcagaattagcattgtcttcgaaaaaattaccgagaaactggtttatcttggtgattttttcggtaattttttcggcgacaatgccaatttcgatgatttttctggcaccgacaacaacttcagtgactttcccagcgccaacaactactctggtgccttttcaccagtgacaactctgacgatcactgtagttttatttgttttaaaaaaatatgaagatttaatatttcttatggtaattcaaagtggcatatcccatatatgttaagtttttattttaaatagagtaatttgcggcataaatacctaagtttaactttcagttgcaaataaatacctaagtttaatttttggcagtaataatacctaagttatatttttggaactctatagataccaaaccgttaaatattaagctattaaatctacatggaattttcttattggtatatttgaactatttttttaaataataaaaatttaatgacttggaccaatcagagattgccacgtggcaatttacttaaccaggtacgtactacagaagttctaaaattataacttaggtattattaccgccaaaaattaaatttagctatttatttgtaactggaagttaaacttaggtatttttgccgcaaa

SEQ ID NO: 109327 - DNA, 588 bp, Cannabis sativa
  modified_base (195)..(197): a, c, t, g, unknown or other
taacagtataaatatttatttaaataacagtataaatatttatttaaataactatataaatatttatttaaataactataaataatttatttaaataactataaataattttctttaaataactataaataattttcataaaataactataaataattttcataattaaacatgattaactgctaatttctaaannnaactaagcggtctttacaatatcactctgctaaagaaggaacttgaaaattttaagaaaaatgttcaaatgcttaatcctggatctactatttttgaaaaagcttagaatgcaggtcaaagaggttttgcaggcattggatcaaatgctatggaaagttctggaatcacgaagtttgtaaaatctactgttccgacgaatcttcctgattctggaaatgtgaaaactgcagcaacagtttcataacctgtcgttgcagctgtttctgctggcgcaaaacctcttgaatttacaaaaagagtaagatttgaggtaaaaagattgttcctacttgtcatttttgtggtagaacaggacacatcagacctaaatgtttcacgttgaaaaatatg

SEQ ID NO: 109328 - DNA, 507 bp, Cannabis sativa
aaaaaaatattttatttttaaaatgacaattttgtaattttactaatcaattttttctccatccttcccacctcacacttaataccaaacaatacaaagaagcttaacaatcctttctatccctcttactctccatcctctctaacctctccatcgatccatcctactctccctccctcccaccaaacatagccttagggaaagggtaaataccaagtgaagattgttcaatcaactgatctgtttgaagacataattaggaaaagagtttttgaggtgtgtcatttcattattttgttttaatgtttttttatgcttgttttttatgttctttattatttttattttttttgtgttgttttagtattgtattcttatgtttttttataagattgggaatcctatggagataacataatggcattcttcattattgtagtgacaacgtttatgccgtcggattccaaggtaacatttgaccatcctttttgcttaatccaactcaat

SEQ ID NO: 109329 - DNA, 1718 bp, Cannabis sativa
  modified_base (282)..(284): a, c, t, g, unknown or other
  modified_base (359)..(387): a, c, t, g, unknown or other
  modified_base (449)..(457): a, c, t, g, unknown or other
  modified_base (1650)..(1662): a, c, t, g, unknown or other
atttatttatcaatttttttaatgccaaataatttaaacctgaacctagaaggattcctataaatagatagttatggactcaaaactaacagcctaagatgcacttgccttcagtcaaaacttgagtcttctatctctctcaaattcgaatccttctctctatctttctctcttcaattttcaaaccttatagtgatagagtacatgcccacgcatagcaagttggtactcaatcatagtgcgtaagactgtgaagtatccaatcaactgaaggagaatcgnnntcagatcttggtgatactctggtatagaaaggatacaagggttagagatctcagcagaaggagtcatttaattcnnnnnnnnnnnnnnnnnnnnnnnnnnnnntttatatgtgtttaaattccattgttttataaattcatttttaggatgttaaataacatacnnnnnnnnnaatctagatcttggtaaaataatccccaacagaggtgtccctctcagagtcgtattcgattcctttttcattataatattttaagggatgtgatggttctgtgaactgacttaaccctttgctttcaatttttatattttaagggagatgatggttttgtgaactgactcaactatttttttcaatttttaagggatatgatggttttgtgaatcgactcaaccttttgctgatttctatttatttccctgcgcacactttaggactaattttgagaagcatacccctcattattgcgagtgctatttcttgtggaactatcttttggctttcactctttacttggacggttaggggtggtcgatccctgtagtcctaagagttaacttgccattgccaagcatgcttctcaaatagtggaacttcatttctaggagcatcttagatgtttgattttaacgggtcgtattggaggattcacttgaaagtgtggacttatgagcgttgggagtagcatctaatagaccttgtagagagctgacgatcttcttaaagaacactcactggtgtcttctcttaagactctatttccttcctccacatggatgtatttctccgctcttttgtaaaagttatctaagtcatccaactttcttttcaacgtattcttccacagtccactcctagggtgtaccctagcgactatggcgaacttgagttcttctttggataccttccctactttggtaacttcggtgttggagcgttggatgtagctctgcaaactttcttgtcccccctatttcacaatggtgacacttgtgacaggcataattttattgcatgcagcatgatgttgttggaggaattcgtctgaaagctattttcaagaggtgatatacctaggtgccaaccgtttgaaccacttatacgatgcacctctgagcgtcactacaaagcattgacaccttgctttgcttgtgaccctcttcatcttcattatttcgttaaaagcatcaaggtggcactttgggtcggttatgcctttgtaaggcaacatgttgggctctttaaagttcgtgagtagaggcttcgctttaatatatcttgagaatggggattcttcatcgaagtcgtcctcgtcccaattacaatattcagatgcagctgataggggtgtacatcaaaccgcnnnnnnnnnnnnnaccgcaaaaaaaaatgcggtttgaaattcttcgcagtgcggttgcggtttgaattt

SEQ ID NO: 109330 - DNA, 609 bp, Cannabis sativa
  modified_base (43)..(46): a, c, t, g, unknown or other
  modified_base (500)..(506): a, c, t, g, unknown or other
tatctttgactctcacctactgggacactgtatcagtttgttnnnnaccttggaaattatttaagatatgtttgttttgtatttttacatttccttattacttgctaaatgtatgataatttttgaattgtgtatgaatttatattgaaccatcatgttgttttctattattaattattgtagtataaattttgagtcttcattgttggtctaacttaatttgttgtttttaatgggacaaatcccaaaagtttgttatctattagacaaacataataatgttagatctcgacagataagtatttgttaatgcaacatctagttgtacatccaaagatgacaacttaaactagtgtttacaatatcaaataatgaagagatttataaaataataataactttgactctcgcctaaatgggacatcgttggattcttattttaatcgaaattatcctttgttttttctcttagctttttcatttagaatttgcttagatannnnnnnattggatgaatggtttataaattatctgcttatgatatcattatattttcttctataaaattaaatggcgcagatgactatattcccgacattctatcccaaa

SEQ ID NO: 109331 - DNA, 1065 bp, Cannabis sativa
acaaaagaacatacaaagtttttcaacagatatgggtctatattgctataaggtcatgcaatttgttctcaaaaatgctagagcaacataccaaagattggtaaataagatgtttaaagaccagatcgaacgaaacatggaagtgtgcgtggatgacatgctcgtcaaatccaggaaggcacgaatgcttcaaagtcctcaggatgtataacatgaaacttaatcccttaaagtgctcctttggactcagctcgggtaagtttctaggctttatcatcaacgcataggaattaaagccaatccaaagaagattcaagccctcctagatatgaaattgccaacaaaaaccaaggaagttcaaagtttgactggttggattgccacactcagcagatttattcaaaatcaacagacaagtgtgttccattcttgaacatcctgcgaggaaataaacaatttgagtggacagaggaatgtgaaaaagcttttcaagagctaaaaatgcaactcgcaaaacctcctgtactctcaaaacctctagatggagaagaacttgggatatacctcgctgtcacggagcatgctgtgagtgtcatattgatcagagaggaaaacaacattcaacacccaatctattacatcagtaaaagactcattgaggctgaaagccgatacccattgatagagaaactaacttactgcctaattctagcaacaagaaagctaaggccctactttcaagctcaccctgttcagttatacacccaccaaccgttacgctaaatattgcaaaaactggatgcccttggacgattactcaagtgggcggtagaattgggtcaatatgaaatacctttcaagcccgaacaacgatgaaaggtcaggtcttagcggactttgtagttgaatgcacgtgcaaggaaggaagcgtatcaaaaaataaccctgagccaatacaaatacctcaaccgagtaacagtgaagacaagtcgacttgtgttgtgaaaattatattgctttataattgcgcaagtgtacacaatcacaaacaagtaatacaatgat

SEQ ID NO: 109332 - DNA, 530 bp, Cannabis sativa
  modified_base (139)..(155): a, c, t, g, unknown or other
  modified_base (331)..(336): a, c, t, g, unknown or other
tttattggaaattttaatttcaagcagcttcaatttgaataattctcaagatatattttattttattttattaataattttttttatatttcgaaattgtatttcataaatgcaaaaaaatttcgaattttatttgaannnnnnnnnnnnnnnnnaaattatttattttaattttggatcaacttaaatctataattttttcatttaatgattaattaaaataaatgaattaaaatatattttaattagaaaatgaattaattagtcaatgaagttctagatagatattatgtgttttgcttgaagtatttttctagtgatatttaattannnnnnaaattaatatttaagttgattttcgtcatgatacttaaatatttgaaatttttcttaatatttaatttaaaaggaaaattatatttatgttgaaaattaatttttattaattaatttggaccaacataaaattagaataatttttcaggtttattttatttgattttagggcatcttcgaaaattgtattctta

SEQ ID NO: 109333 - DNA, 522 bp, Cannabis sativa
  modified_base (131)..(133): a, c, t, g, unknown or other
tatggttaaaacaattcatatggagtgattaaaagttttctattacaaggacaagaaatgaaattttgaacataagtctattcaatggacttaacaaaacaacttaatcctagtattaaaggtttgagttnnnctaaacctatggcttatggtatgcctggtgatttacatactctagtgcaaacaacttactttagtaagttgctagtgcatttttctaatggcaatatatagaagcttctcgacttctagacatagattttatttatctaaggagaagtttcatctattccagaaaaagataaaagccaaagaaagaattccttaggatcaacattgagaggtctcagatattctttcttatgcattagaccagacacctgctattgaggaaaggaacattggaacataagcaagtaaatcctcagatcaagaagatgaactatatgttagtcgataagggtggtatattaatactcttagactacaccaaatcaagtttctagacttgccttagtgcta

SEQ ID NO: 109334 - DNA, 2032 bp, Cannabis sativa
ttttttttttatagtaaagtaatccgagctcagtgggatgttacaaatttattttaaaaaaaatgcactcaactacttattttgtttttaatatgaatgatcattcgttattttttttttttgcatatttattgtaaaattcactgtgtattttcaaatagctttgaatctttttaattaatgcatcaaaattagtatttcgtaaaataaggtaaaatattaaggcgttacagtacaactcccaaaaaaatacctttcaaagaaagttcagagtataagaatctctaaaagattatttttgagaaaaaccagactattccactagaaatttggccaaaaatagaagatgatcatcatgagaaatgtttacctcagattattcacgacgcttaacaaagtccctaaaaaaaattctaaatctatgaaaatagtcacaattaggaccaagcctctgaaacaaagaagaaaaattcattaccattcaaggaaacagacattgtaggggtcctactccgtaagataagcacttttgaagattcataagacccatacatagaccaagatccttatctttctcggtacactggattagaatgagagattatttattttgattatgatgaatgtccgctagcgaaaaacgatgaagatgatgaactatttttttttgtgtcgtgtctaaatacatatttttttttttttgtgacagattgtgttcatgtccaaggtcgtcccaagttttttaggggcctggtgcaaaaatttaaaaaagaaaatgccttctgttaaatttgcttgtcgtgaaagcatctcataaaaaaaagtacttggaaagtacacgattaaaaaatatttttatggcgaaagtatccaagtaatacataaatttttatggcaaaagtatacataaacttaatggtagaacaaacacatgcaccaataaaaaatatttccttgctaaaaggattacttgataataattttagtacttttgccagagttatttcttttacatggtgttcaataattacatttaacataaacagtctcatcaattaaacatgtttgaactcctcttagtcttacaaaaacaaacaaaacaaactctattattttaggaactaacatgtgagttaggtattgttgaagtgtcaatttgcacatttaggcattaggtatttgtatttactagtaggtaatatatacgtttaactactgatggtatgccaacaaaaaagaaaaaactaaacatgttatgtatcatgttgtgcatgtgccttagagttttttcctttttttttattttttttttttgttttgacaagctttaagttttttatttggaatgtttttcaccgaatttctgtacttgttataatttgatacatagaattactaaatattaattatttcttagtgttgctagtgcggctctagggtatagtcatcaatattatatatgagtatgtccccctctttttttttggcctataaataagttaccttggtgcacatagcgggcataattcaaagggagagtctttggcttttatcaagtaacctaacatttattttaatgtgcagaaagggattttgaatctttattccatttggcatttcagcaattatacttacatagatactcatattcatgtttttttttttaatttattttacatagtacgaataattaataattcattcatgctactagtctagtactatgtataattatattctccattcaatgaattatgaatataggatggtccacaaaatttcattgctttttgtctattttcagtgggtggactgcattggatgattcctccctatatttatatatttcatgatatgaatggattaatgataaaataaattcaattagtgtttgaagtttttattgtgtgcggtctccccaagattactaatatatgatacacatacacccttttcgagggtaatgtgaagatgcataaaatatataaaatatatgcaccaaaacattagtgttttttcttttttttttttt

SEQ ID NO: 109335 - DNA, 519 bp, Cannabis sativa
aaagtacttttttttgtatgtttattcattagaattaagtttatttttcagtatattttgtatagagtttgttttgtgtaataattcttgaatctttgtttttctttttttatttatgtgtttgtttgtttagaaagtggttgacttaagaaatttgagtttatgtaagagaaactttgtttagtgaaaaataattgtaaattattattgaatttttttttagtgttaaatttttattattggtttataatgtctttttaaaaatataataaaactttcatgaggtttaaaatttttgaacacgcatgataaactaaaatatcgggaactatgatattgatattgtaaattatttagatttttttaaaaatttacaaacttgatttgtaaatataacaatcattgccatgaactattgttaaaactctttttgagcttttatcactaaatttattttcatataacatgaagatgctgacaaagctggcatattggttcatcaactgacggttgaatgaa

SEQ ID NO: 109336 - DNA, 678 bp, Cannabis sativa
aatgtgacaatgtacttaagcaaataaatcttaaatcttatgtttattctagtcctcttatgataattttcattgaataattttagttgtacaaacaaaaattgcatatggggtaattaattcccacatttactttatgatccttgaatttgtgttgcagcatgcctttagtcaggaatatgcgatcacccaattctatttgcgtgattaatgaccacttatcacgcctctttatgactaaatatttaatgccgatatactagcttcgagcaatactcttatagtttttagccataaatattgtagatgaatttgtcgcaaatttttctttaatggcttgaaatataattctgaactctaggccttatatgaaattctataatacatcatacgagatgtatcctcaaaataataaatgattctgtcttctataatagaactaaaaattaaggctctccacgatacaacttactggtaatctaaggacgtaatcaaatattgatttatgtgaatcaatataaccagtgaagtcataacttaagtggttaaatttctaaagaatcagtccatcccaacaaaatatgtatgaatataatttttagtatcttaaagatacctcatcactttgtatgaaaaataaagtggtcttaactttagttattctgatactacttaacg

SEQ ID NO: 109337 - DNA, 3748 bp, Cannabis sativa
ttacaccccccacaatgcacaacttaatttaaaagagcaaaactttaaactggacagaaaatactaaataaaaagagtaattcaaaacgtgcaaacaaagttctactaaaatccccttctcctccttaattaaatttaggggctaaagtttatgctgatttgtttgcaattaaaaataccaaaatctttctataaatacatctacacgtatgtgcgtgtatatatataagttaagaacactaaaacccctctccctccagaaaatcgccaaactttccacacttaaaagaatagagggtttggtcactcacagttgttaccaaaaaaaaccaacaattccaaattccactaattcgagataaaaaaaatccaataaattaataaacacaaaatacccaagaatattttcacaaattcgaacccgtaaattcgaggaggacatattagcttagatcgttaaatacaaaaaaaaatgcaaatttattctattaaaggatataagggcatcgatttgtgacctggagattgttgtgggaggagggaggaggcgatccatgacgatgaggcgtgggttggtgctgagtcgagtcgacccgagccgctgaaatgagaagaagaagaagaagaagaagaagaagtagctgaaggaagaagttaatgtggatgactacgtacaccctctgctgctatgtgtatgtggttggtggggccacgtggcttccaaaatttgcacgtggacagtggatgggaatggcatgcattcttcttttttcttttttaataataaactagtttgggctttttctttaaaaaaattttacaaaaatactaaaaattaaggaaaaattacaaaaatattgggacacaaatatttttatatttttatgtattaaaaatattttattaaaattttaaaattataaaatacgtagtactgtgttttagtaaaataaaaaaataattcaaaaataactctagaacaacttaataaataaaatgaaaacaacaaaaaataattataaattaacaaaaaataataataaaatattgacataattgcaataagcaaaacaatatcagctcatcaatatgtttttgtattacgatttttttcatttagttttgataacttgatttatctatttatactattatattattattttttttcatgaaatttgttgttacaacgttattctttcaactttttttatttttattttttctttttcgttttgagttagtgatagtaaaatgataatttatttttaagattctaaagtcggtggctgcaaaaagtgaggttgttaagttagttaggcaataaccaacttaactaactctcttttgagtgagatctccacgtcagcataagtatgaatgcttctgggagcatatatgagggcttctagaattacgaaccaatgcattcgttgaaggaacttttcgaataggaaagagccagttgaagttgactatttgaaaatcctttctaggaggaacaactagccatccaaaactcctttctagaggaagattagctttcccaaggacccttcctagaaggacaagaaagccttccaggacctgcttccgtgagtcaacaacgttccaaaaatgatgataacttttggaaaccttttctattggaggaactataccacaaattccacctagttacttcaaattaaaatattgacagtgatgaagaaagaatacaaccatcatggttggtgttctagaaatctcagtttactaacttttgagattgatcatgtttaagcaatacttgaacttatttactgttaagaccttagtcccaacatcagcaggattatcttctgttctgaccttttctaaatcaaccaacccttcttttatcttctctttaatctggtagagtcttatatctatatgtttgctcttttcatgataagtcgagttcttacaaagatggatggatgactagctatccgaatatacaatcattcccctttgatttgtttcaattcataaagaactcccttaagccataatgcttccttgaatgcttctgtaattgtcatgaattctgcttttatggctatagagttagacttctatagtgtcaagaggggtaactagtttggtcattcatttatctagttaattcttactactatgaagatgagtcttttggctaaaaatggagacaccaaggatgatttgaagctccggcctattgatgactctctgctcaaataggtaagactaatgattttaagaagttatcatctttgtgatttgtaatgatattagtaattaaaaaagttagctcatgtgcttcttaagtgaactttaattagtgtctcacatataaaaaataacaatcaaagagagggggggagagtaccgtagaaaaaaaaatacaacaacatattctgaaaatgcaacattaaaaattagagaaaagaaaaggaaataacaaaaaatctgagagagtgagttaattagctagaatatgaaatgtaaaatataataacaaataaaaaatatcatagacagtcatatatactcaaacaaacaaaaataaacaatttttagtcaaaaagatataaaaataaaaatacatatagcaaatgtacatataaataccgagattgagcatgatagaagacaagcttcaaggttctattcctctcctttgtctcggatctaaagaaataaaataaaaaaaaacaaaacatatccattaaaaaacacagagatagataacttaatagcaaaaatgaagttttggagaagattctgaaggttttagaggatagatagatggagagagagagaggaaaaaataggttgagatttgagttttggagagatagaggggaggagggtttcataaatggggatttttttgattcagagaaaaatgaaggagacgaacaaggttactgaatataacactacctgtaatgaggacaatgtcctcgttagaacccatgtcctcgttagaagaacttaaaacccctaaaatatgcgcgaaatcttgccgccaatgtgaaatttcctctatcgatgacatttttcaatgtcctcggtaaaagtgttcacgatacagccaaacttttttgtagtgtgatgtgatctatgactctactccagttctggaacaccactaaatcatctttattgattgagcaagaatatgtataatacagttgagatcgattctttgatgagttttctcaaagtgtttcaactctcacactcttacccaagaatcttcttcatctacaaaagattcttcatacaaaatccaaacccaatctctctattttctctgtacctttctctctctacctctcaatcttttctctctctacctcgaaattaaatctagtcgttgtatctgaaatgataagtgttggtggtatttatatgcttaggatcaagatcctaaagtcggcggctgcaagcgagattgttaagttatagttaggtaataaccaacttaaccaactcttctttgagcgagatctccatgtcaacacaagtatgactgcttctgggagcgtatatatgagggcttctggaatcacgaaccaagacactcactgaagaaactttccggataggaaagagcaacctggagtcaactatctgaaactcttttctaggagttctaggaggaacaactagcactactacaatattagcctttagaggcagttttttacaccccatttataaaaagggaagctaaagg

SEQ ID NO: 109338 - DNA, 508 bp, Cannabis sativa
  modified_base (476)..(483): a, c, t, g, unknown or other
gagctaccatcccatattttttctaatctcgttaatatgtctcacctagtcatggaatataactttcttttttcttaacaagaaataaaaaatcattttacatattatatatttgtgaagagaaacatacatatagaaagtacacttgttatctatattgaaatttaagaaaaaaatttactcaaattttttcttctcatagcgtccgttttaattatttaagaaaatttataaatttttaaaaaaatttataatagtttataattttaaaaataagatttaaatagttacttaccatacatttaatttttttttaaaaaaaattaaagattgttctaaatatctcgaatgttattacgaaaaatttcacttttagtcacaataaaatttgtgactaattataattaatagttcttatgttatgactaaaaaatatgtggctgaatatattagtcataaaaattacaatttgttgnnnnnnnntgtatttttagtcacaatacttatt

SEQ ID NO: 109339 - DNA, 969 bp, Cannabis sativa
agtggaaagaaatatgatgggcctgatatggtacaaccagtggatgaagaaattaaagatcaaccagcaccaacatcaacagagaagaagactactgatagtctgacacctaaacaagagtctccaccaatcagtatagatcatcatgtgaagataccgtatccgcagagacttcgaaagaccaatctagacaagcagttctcaaaatttctagaggtctttaaaagattacacctcaacattccttttgctgaagccttggaacaaatgcccagttatgtgaagttcatgaaggagatattgtcaaagaagaggaaaatggaggactatgaaacagtggcattaaccgaggagtgtagcgccattctgcagaagaaactccctcctaaactcaaagatcctgggagtttcactattccttgcaccattggaagaatagaaggaataaatgcactgtgtgacttgggagctagcattaacttgatgcctctgtcagttttcagaagattacctgggtgaggcaaagccaactacagtaactttacaattggttgatcgatcactagctcgtcctaggggagtcattgaggatgtgttagtcaaagttgaaaagttcatcttcccaactgattttattgttctggacatggaagacgataaaaatgtcccaattattcttgggagaccattcttggcaactacccaagctttgattgatgttcagaagggtgaattgaagctgcgagtacaaggagaagaagtggttttcaatgtgttaaatgcgatgactttcccaaaggcaagtgataacagtttctttgttgatctgattgatactattatggatgagaaaaaattaataaaaaatcctctagaattgagcataattgaagatgacttgattgagcaagaagggaaggaggcaatggagtatgccaaatggcttgattcctatgggccattgaatag

SEQ ID NO: 109340 - DNA, 654 bp, Cannabis sativa
  modified_base (157)..(157): a, c, t, g, unknown or other
tatatcagatttttacatatatttgagggataaattgaaaaataccacttttattaatcaattgatcaaatttacctctaattttatatttaattgaaacatatcttttttttatatgtattgtactcaaaataccctgacataagagagtcacatngagagtatcttgaagtgacaaggaaaaaattggtacaatattataaaaaagaggtaaaaatgatagactttaaaaaagatgataaaaataaaagaagacaatataaaaagggtatagagtgtaatttcctctatatttaaatgtatcaacctactactaaattgcattaatattttacttgatacctaataatattaagaatattgctgttgggttcttaactaaattctaattaataatataattggttgaatgtattttcctcaccttaattatattattcatatataataatgttgttatttttgtacttactatgtagtttgagatgcaaagtgggtgattagaaaatagtgtctaggtgttataacgttattagtatatttaaatattaaatctcatataatttatttaatatatattataaaatattactaaccaattaattaaagtagcaccgtctgaccgtctgaatgtttttgtgtacatctcaatgt

SEQ ID NO: 109341 - DNA, 722 bp, Cannabis sativa
  modified_base (376)..(389): a, c, t, g, unknown or other
  modified_base (475)..(476): a, c, t, g, unknown or other
aaaggaaagcatccactacaaccggtggctcaggtcagaacaagaggttccgggggaactagggtcgagggagtcgccggggtagttctaagacccgatacacttacccagaatgccccagttataaaaggcaccatctgggggagtgtagaggacaagggtactttcagtgtggcatgctagggcattacaagagggattaccctcaactcagaaccgaggcaccgaaggctccagtgaaacccactccaaaaagggtgttcgccattactcaggctgttgcaaaagccagtccttcagtggtaacaggtcagctctcggtcaataactctttttactctgtactgtttgactctagggccactcattcttatgnnnnnnnnnnnnnntttagtaaattggatagaccgcacgatagttatgaatcaggatttggaaccctattacctggcggagagttagttatctccaaaanntggattaggtctatgccaatcaggattgatgatagggagttaagtgctgacttaatagaaatgagcttaccagattttgatattatactgggaatggatttcttgtccaagtattcaaccagtattgattgtaagaggaagatggtaatcttccagccagaaggtgaagaaccgtctatttttgtcggttcggttcagggatctcggatcccggtgatttcggccttatcagctaaagaattgttg

SEQ ID NO: 109342 - DNA, 678 bp, Cannabis sativa
attccccagcagtttaggaggtggatttcacagtgtttatccaccaccaccctcaatatctgtctgaatggaggtaaagttggggcgattaagccgacctgtgggctacgccagggtgaccctctatccccctatctcttcatttgggcagcagaggttctctctaggctgctactgaatgctctagatatcggtgagattcgtggaataagacttagcagagggggaccagtcctctcccacattttctttgcggatgacctaatcctggtaggtagagccaatgtgagggaagctaaaggcttctggcaatgccttgaacaattttgtgcttggtcagggcaacaagttaataggcttaaaacaacagttttcttcagtaaaaatacttcaccggatatgaaaagggagatcaaggaaactctgggtatcagatcttcgacaggctttattaaatatttgggtctcccgttattccggtctaggcaaaaggatgctgactttaacttcattattgagaacctcacttctaagttacaagggtggaaggtgaaaactctttctaaagctgggtgtgctaccctgatcaaatcagtgggcctttcaatgccgatgtacgcaatgcaaaccaccaaactttccaacaggctggtcagcaaaattgatgggatggtgaga

SEQ ID NO: 109343 - DNA, 1342 bp, Cannabis sativa
gtattaaaattaatgtagcccatgtgagagaatattagatttttatttgggcttacattaacttttatttcttttattaatacttgggttgattgaatagtttttgctgtgttagcatatattgttggtgatcaatagttaatgagcttagcattcgtatgtgtaaagtctaggtgaagcagaagtgtgagctttttctaataactgaagcctttgataagcaggcccagtccaactagggttgtgtagctaagtcccctttctaactctataaatacatattgtctcatcataattgtatacttttgataatcagataaaataaaaactacttctcatttagagacctaggtaagaagacttagttgatagtattacactatcaaattgaggtaattgctatggatcaatcgggtacgcatacctaattattatatatcattattgtaatcaatattatatacaaattgatcttgggtttattattaatttatctaacatatttatcctttgtaatttttatttcaatctagttatgaacttctaaccttttttcaagattattaagataatgatgatgcaaaatgtaactagataggattaatttttgtatatatgttgatttcctatttgtgctacattgtccatggatttttctatcaaaaatatatctttttcatcttcaatattatgaatttttaattgttaaagcatatttctcgtagttcttcattatgcaaaaatataatactctttgattaaatatttttcattaaattatatctaattcttagaatataagtgttatatttttttctacacgtagtttctttgattttgtgtagtttcattaaagtgaaacacatttaatgcttagaaattatacattttataagtgaagaaaaatcttacatttttgaaagaaacttgtgcttaaatagaaaatatattttgtaaaatatagtgtactttatatgaacttgagaattaatatacttataaatactattaaatttgcattttgtggattctaatatcttaataatcttactttacacattttatttgaaaaccattatcatattcatttcatttaaaaaaaatttattatgtctcaacaaatatttagaactaggttagaatattcatgttttgtttaaaatagtttcttttaatgttagtcaactcccatgggttcgatctcgtacttatatgaatattatattccgaaacaattcatacacttgcgagtataaatattaaaacactcacttttaggtacaacactacctgaccagttcattttctccagttaaagagagaagcagctcgaggagagaaa

SEQ ID NO: 109344 - DNA, 534 bp, Cannabis sativa
  modified_base (345)..(349): a, c, t, g, unknown or other
ttgaatcaaaagttatgaagaaaataaaataggtgcacaagggtatgcattgcatacccctgagtgcgcggaagcaagggtgtggccgagagaataggatgcaaggagcctcatttgactgagtatgctcggcgcagaagccgttcagatagacatcatgtccgagtgtgaatggccgagcgtgtccgagcgtccctaaggaccgtgcgcgagcgtgtgacattcaaatccccatattttcgttcaaattcaaaaaaaaatcataactaattcataaaaaatccaaattgggttctgtaaaagcttaaatttattaatttttgtctactttccagaaaaaataannnnngatcgaaataaaaaatatttcagtaacatatattgcgatatctaaactatcatcaaataagcacataaactacatgaaaccatccaaatcaatgcaaaacatcgttttaattcatatttcatgaaagtaaatcattagcatggctctgaggatagttgtttgatatattttaccaggatctagat

SEQ ID NO: 109345 - DNA, 903 bp, Cannabis sativa
agtcgacagactcagtaagaaaagcataatcataacatagatctaaacaagattatgattgggcacccatacccccaaccataacccttcctcgcatccaacacgacactgagtccagaacattcaaacgaagtactatcgacaataatattagcctatactcggtactctagtcatactctagtcgtaccaatgtgatactgtcagatagtacttgagccaaacatacatttatcggtatccaatacaactctacgtatattaatactgctatcaatgtaatctaacaagcttcacaaacatgcatgctaaacatgtaaacacatatgcatatcattatactaagtgttgcccttaattttgcccaagatacatggaccaatatgacgacgacacgtggatctaagaggcatgattcttagatcaatcgactaagtctcctggcttcaggagtgtcaacaagaagatacctcccggaggagatgtgaaggctccacatactcccggaggtcagagccatgataaaacacctccgggagatactggaatctatttgaacggtcacctcgcatttaatgccgcatgggagaaaacgtattggaactgccataagtaatatgtctgacggcgtaaccccccttttgcagctattacgctatgagtaataaggctagtgacagcataaggctagtgacagctactttactagtgacagctactttatgaggtgacagctactttatgagggatcacatcaatcaagaagggataaaagactatatccacctaacacctaatatacctaaggtataggtcatgtatttcctattttgtatctgctgggaatatgtgcccctactgaaactacacagaaagacaagtgattcagttctagggatcccc

SEQ ID NO: 109346 - DNA, 748 bp, Cannabis sativa
  modified_base (232)..(241): a, c, t, g, unknown or other
  modified_base (445)..(446): a, c, t, g, unknown or other
atttatttaaataaaattaaatatccaataaaacaaaatgataaataaatatcaattatctaattttataatttaatttaaataaaaataacaaaatttgaaagttagcaaaatatcttgttacaatttaaaattttttgattaaaataatcttattttatatttcaaataaggtcattttataaaattaattaaataatttaaaatataaaatatctaaccttaaatttannnnnnnnnnaaaataatcaaattttaaaaaatatgatatccaactaagcaaaaagatagatttttacctattttcaaggttcaaaaactactaacatcttaaattaattttaaaaaataattaatttaattctgataattagatttgaaatttaaaaaataaaaatcagaatacaaaactacacaaaaaattcaaaattaattccatgaaaanncatgaaaaaataaaaaaaaaatgaaaaaaaatgcatttggctcggatgatggtatgcatgcatacaatccgagcggattggggctgaaatgccacacaagcatgctgctagcagcatatgcgcccgcaaaatgggggaattaagacactcaatttctgaacacgcatctgaccgagtgaaactcagtgtccgggtgcgtgtgtggtgcacccgatttataatttttttaaaattttcaaaagatcataactaattcaaataaaatcaaaatagagttctgtaaaaaaagtgaatttcttaat

SEQ ID NO: 109347 - DNA, 881 bp, Cannabis sativa
  modified_base (283)..(286): a, c, t, g, unknown or other
ttattttaaaatagatcattttatgaaaagtaaccaattggtatgttatcgaaataataatcaattggtccagaaaaatgtgtcttgtttgtaatgttttaaaatttatttgtgacttcattctttatttaattaatcaaaatgcatatataatttacatttaaaaaatatgggtggcttaaacatatatgatattttttttaaatacaatttactaaaatagtagtttactccatgacaacttattatattttcgaaaataaacttgaaggttactcaaatnnnntaatataacctaaataattaattgattattaaggtgtatacatataagttttagagctagccaaaatgtatctcaaattgtataatataaaaataataaatttttatgaaaattaacttattggtttcttatcaacatcataagtaaccaaaatgttacttttgaaatgcaggaaagcaaaaaaaataaaatttcgggattagtttcatttcaggtatattagtttaaaagtaaggtaagtaattgagatttgttaagttattatttttgtaattagattatattttacgtatatttttttaaaaaatccctttcttttttcatttagttaatcaaaaagtaactagatttttaaaactatttttctgaccatatcgttactcacttaaattaaaaaaaatgttatcgtgatctactctttaatgtgattattttaagatataagaacatataattttttattatttcaaaaaaaaaaaactattgaggtgcccatgataccaatcatatactgattggttactattaaattatattatatattaaagaaaatttaatttgtaattagtttctactctttctacaataaaataaa

SEQ ID NO: 109348 - DNA, 593 bp, Cannabis sativa
  modified_base (135)..(142): a, c, t, g, unknown or other
cacatgtagcttccaggtcggtttttcttcaatattacttggctgtggtattggctcgggattgctttctaggacgcttcctttttatcctgtgcattctacaacaaagttggccaaggcttggcctttgatagnnnnnnnnggttggaagttgatttcgtactgtcccaattccaccgcccacttgagtaaccgtcgagaggcatctggcttttgcaatatttgtcgtagtggttggtgggtatacacccgaacaggatgagcttgaaagtaacctcagctttcttgttgctagaatgaggcagtaagcgagcttttctatcgacggatatcggccttcagcttcaataagtcttttactaatgtaatagactgagtgatgcacgctgttctcttttctaatcagcacggcacttacggcatgctccgtaattgctaggtatatccccagctcctcaccgtctacaggtttagaaagtacgggaggttttgcgagttgtgcctttaaatcttaaaaagctcttgcacattcttctgtccactcgaactttttgtttcctcgcaggatgttgaagaatggaacacatttttcc

SEQ ID NO: 109349 - DNA, 779 bp, Cannabis sativa
cctcacccagtgggtaatgccccaattaggtcaattccccacatagcaaatgggtagggtgaggtcatcattcttaattagttctgtaggcagcacgtgaggtatatgtgaaaacctctaacacttatcacatttcctgataaactcatgggtgtccttattgattgttggccagtattatccttgtctaatgatctttttagataggctttgccaacctgcatgatccccataaaaaccttcatgaacttctctgatgatttcgttcgcttctgtagggagaacacaccgaagtagaggcatcaaataacctcttttatatagtttgccttcaattattgtgcagcgaggcattgaatacaagagttttcacgcctcgtttttgtccgttagaagttgtccgtcaagtagatagttgattataggagtcatccatgtaggagagcaatctatatatcatctctacatcttctgttttacatatacttggctcgcttagcatctccactggaactaagttcaattcatccaagtcgttctgcgaggccagttttgccaaggcatcagcgtttgagttttgttctcttggaatttgctcgattttaaagtaatcgaatctttccaagttcttctgaaccttctctaaatactttgccattctcaagcctttggcctggtattccccgagaacctggttcacaatcatctgtgaatcactatggcgaataagattttcgaccttcaatgcttcaactatctttaagccagcaatcaaggct

SEQ ID NO: 109350 - DNA, 616 bp, Cannabis sativa
ctcaaatctcaattcaacccataattccagttcaaactaacttaaccaatattaaacaatctccagattaccaaatcaaacccccttagaacatacatcaacttaaacaccaaaattcatgctatatacaacctaaacttagctaaaactcaaataaaatacctaggggttcataccttgattggagtatcaaattcttgctagaactttgagaattacagcaatgaaatccctctttccttgcgaagcttggtggttcgaaagagaaggagagaaagactttggaaatgtctaggtttttctcaattttttatttaagtaattaggttccttctttctttttttcttttttaaaaaatattaaacctatagtcagcatatatcaccataaaagacaaaacaagacttaactcaaaaagaccactatacccttctggctatttactaattagctactaacccataagggtatttaagtcattttcaaacccctggtaactccaacgcttcaaatatctaacaatgataccccgaataaactctaaatcatataaaatacgactctctataggcctaacgtcactttccacagtttccgaacacaatcacagaaatt

SEQ ID NO: 109351 - DNA, 1033 bp, Cannabis sativa
atgataaagatatatgaagtcagagaagtcaaattcatgcctttgcattttgcatttctcatttctatctcactcgaaaatttaaaattttgagtctctcatttctgcaaaatagcaacatctctgagaattggtgactaggttcgccagaacacataaatagactaagtaatgtcaaaatatcacttaggcatcttaaagtacgtcccttagatgattttacacttacccaacatccaagtagacgtcatatgtcaacctaggcgctggatgtcaaccttggcactgaatgtcaacttggacactgggtcatgaattgccttcagtaaaatagtcattactacctcaattttaatctgattgaaatcatccaacttgcattctaaagctaattcattgatttatcaagtcacgtctcacactccagatgtaattctaaagatatcattgtcaaaatttaccctcaagggagttacaaaaataagctccgagttacttgcagtaggactcactgggctcccaaaaatggtcatcaccaccaagagctaattttcaccattagatcatcatcaacagtgaaaacaatcttatttgtatttttctcctatttttgtgggtctccttcacctataaaagaagagttcccttagctcattttacacattcagaaaactacccataaggtcagagtttctctctgtagaatttggagcttctaacacttagcttattattgtaattactatctcgttagaaataaaaaattaaagtaaacgtagctttattactatcgcgatatagggagtgaactgctaaaaattcactgtgtctctcttataattacttaactacttattcattctcgttaatctagtgagcgagtgtggtttagaagtctagtctaattttttgagtcaataaaaattataccttctccatttgaataaggaatttttcacatatttaataattatactattataactaattttttttatttatcttatagatgtatttcatatattctctaata

SEQ ID NO: 109352 - DNA, 632 bp, Cannabis sativa
tttaggaatatgtttagatctgtgatttatatatttcttaagtgttttataaattctaacagtgggactatgaatgtctgctgattctagttggtattgaaaaagattggtggctgtaaaaaataaaatcaagctcaaattgagtcttgataactttgtctctcaaaattacagcatccaacttgggcatatataaactactatgtgaacaggggataaagtcacttagactaaatgtgtttgagagataatgatcacctcaaaatataagtttattatgtggcttataatgtgaggcttcgaacaaaagataagcttgaaaggataataatgaataaggatatgacatgtttgttatgtgggaatgttaatgagagtattgagcatttgttttttgagttgattatagcaggaaatgtttggagaagataaaacattgcttgaattgggatgtaaaaagcatacaacttcacccattgttgcgatgtatttctcgagctaaaaacttcaacaacaatcttcaaagcatgctatttggtgtgatagcagtcgtggtgtaccatatatggcatgttcaaaataacctcttttggaatcatatactgtgaatgattgaccaaactacttttaag

SEQ ID NO: 109353 - DNA, 3208 bp, Cannabis sativa
  modified_base (3156)..(3166): a, c, t, g, unknown or other
ttctttgtcttcaatataaacactttcatccttcggtaaactaaatttcaataatttgcaagcatctaacatttttggtcataatgcagccttaaaatattataattggcatatcttatatcagcaaagtttgaagtttccattcatcaagatacacatttcaatgcatatattatgccacaaaccattgagtcaacaaaattctacttgcttaaagaaaagtcacaagagagtttcagttacttaatcccaaaaccaataaatttgctttcataagctattattccagctaactgaatgaacatatgttcataaagaaagaaatcatgtcatgatattaacaataacaagatatctcactactttgttgcctcactactaggcattagaaaaggtctgaatactaaaaactaataccaatgatcattgaaattttaaatcaaatacttaaacagaaatcttaataattcaaatgtctaaaaatttacttgagaaactgcttcgatttgttgcataaattctcatgtagtcaggttcatcatcagggacggacgcagtaaaaaaagtgtgggggctatagcccccaccaaaaaaaaaattagtgttaaaaaaaaaattaaatatattctatttaattaaataattatacaacaaaatagtaaaaagcccccataaaataattataattttaatgtaaagtaaataataaatatttttataataattaagcccccactgatcaaaaattttaggtccgtcactgttatcattagtacaaagctactgataaaataaacacgatcccataagggactacataccattttctaatctaaaactaataaaaaaagtcattcttgaacttataatcagcagttactttgttttaaagcaactaaaatatatgttttttattaatagacaatgtttctaaagaaggtgcaatccacatcaacgagtccttcaaatccgatatttttccaggattactacattcggtaataactttgagatgtttccaattaagcaatggagaacgacatacccttttcaacttttatggccaaatgagagcctccatggaaacatataaacacatatcactttagagtgaatagaataacaatacgacattgaaacaaggctacaatatcaaataaaaataaaaacataatacaagtacctcatattcctcaacatgtaggctaatagtattccaagagcaattgagattcaaaagaaaattcaacatatcagtaaaccaggccgcatcatagtgatcatccacatactcagcctccccctcaagtatcacaatttttccactcaaggaaatagatggctctatggaaagaaagaccattccaatgtaacatgagaaaaaaaattaatgatttttttatcaattttttttatgcaatttaaattttattccattccattcctattcctattgccattcccattccaatattttcattcctcccaatcaaacgccacctcaatttcaataatttgcaagcttctaacatttttggtcataatgcagccttgaaataatataattggcataccttatatcagcaaagtttgaagtttccattcatcaagatgcacatttcaatgtatatattatgccacaaaccttttgagtcaacaaaattctacttgcttacagaaaagtcacaagagagtttcaattacttaatcccaaaatcaataaatttgctgtcataagctattattacagctgattgaatgaacatatgtttacaaagaaagaaactttgtcatgatattaacaataacaagatatctcactacacaagggctaagcagaggaggaaggatctcagcacaattcataatcataagaagtaccttacagaagcaagaatttgtagactcccatcttatttaactcctttgttgagggaggagtaaagggaatgtgttgtgatgtcaagtttgtagacttgaaagaatttgcaacagttaaaaaaaaacatccacaatggtattaataagcagaacgatttcaactagttcacaacaaaaggtagaaatatctcattcttattatacaaagtagtcaagttcatcatcagtacaaagcttaaaaaaaaaacacaatctcataaaggactacactaccattttctaaaactaataaaacacagtcattcttaaacttataataatcagcagttacaataaattaaggcaactaaaatatctgctttttgttaatagacaatgtctctaaagaagatgaaatccacatcaacgagtcctttaaatctgattttctttcaggattactacatttagtaataactttgagatgcttccaattgagcaatggagaacgacatacccttttcaacttttctggccaaatgagagccttcatgcaaacatataaacacattacttcaaagacagtaaatagatcaataatacaacattgataaaaggccacaaaatcaaataaaaaacaaatagaagtacttcagatgttcgaacatgcaagtttacgatattcaaagagcaattgagattcaaaagaaaattcaacatatcagtaaaccagactgcatcatagccatcatagtggtcatccatgaccttcctctcaagtatcacaattttttcactcaagaaaatagatggctctattgatatgtttacatccatattaccatcgtaacaaaagtatgctaatttcggggctgattctatcgtaatattgccaccattggccatgctaaaactactgaagatcatatagaggctatattcaatggactaccacctgaatatgatgtcttcgtcacatcgatcaccacaagaaaagaaacctacacagttgcagaggtggaagctctattaatggcacagttggttcgaatagagaaaaatgccaaaagtctcgacatttcaaaagcttatgcaaatttgtcccaaaccagatatcctggacccaacaactacggtcgtacaccttaccatgccccaactgcaccaccaggttttaataatggtccaagacgtggctcaggtagtccccccttcaataacaataatggatcgtactacaatcctacagcaagaggtggactgcccaacagtcgtggtgttgggttttatgccctnnnnnnnnnnnatttcaatataatcaaatttatttattaatatagatcagaaa

SEQ ID NO: 109354 - DNA, 987 bp, Cannabis sativa
ggtaaataacacgccaaaacctatccggatacgtaaactcaccacaataagtttcactatcgataactaacttggccataacctaattattgagtaaacaacaaactaagggtctgaaaaaaataacacgaattgataaatggagtttttgggaatcctgcccctgatccgactaaccagtttgcaccaagtaatccaaataagtccaaaacttgcccaattcgcgtccaaatcaaatcaaaccttccagatcacatttaccaacctcaaactacattttcctagcaataacaacaagaaaaatacacagaatccaaaaatggcattaatgacccaactttgagtttttcaaactcaaacttgctcattcaccactcaaatcaccaaaacaagctacaattaatacattttaactaaaaatgaacccaaaaacaaaaccaccatcaattctaacactaatagcccctatctcacaaaattgcatgctagaactaaacctaaagcttgaattactaaggattagagtactagggcttacctccccttggaaataccttagttccttgctaaaaaccagaaaacttgaaggttggttgggttgattcttttggtttgtgtgggagtcaagtaagaaagacagagaaagagaaggaggttctaaagttttcttgattttgatttttcttccaaattgattaacttctaaaatcatgattctaaaataaacatgtggcaaactgttgaacttagagcatgccacctaatcctcaagtgtaaaataccgaaaatgccctttaacttgcaacttaagcaattataagcttatgggtaaaatagtctaaaatcataaccttgcttaaactcggtattctaaatatctcaaatatttgtcacactaaaaaattggttctagacatacccatgtgactctaacgaccatccatcgtattttttatcgtcgctgagcaaaaatcataaaaattacat

SEQ ID NO: 109355 - DNA, 676 bp, Cannabis sativa
gggatccgagatccccgaactgaaccgacaaaaacaaatggttcttcactttccggttgcaagattaccatcttcctcttcgagtcaatactggctgagtacttagataggaaatccattcctagaataatatcaaaatctactaagctcatttctattaggtaagtacttaactctctaccgtctattctgatcagcatagacctaatccaccttttggagataactaactctccgccaggtaatagggttcctaaccctgattcatatcatgcggtctatcaaatttactaacgattttggctgccacataagaatgtgcagccacagaatcaaacaatatggagtaaaaagagttgttaactgagagctaacatgtcaccactgaagggctggcttctgcatcagcctgagtaatggcgaacaccctggctggagtgggtctcgctggagcccttggtgcttctattctgagttgagggcaatccctcttatagtgtctgagcatgccgcactggaagcacccctgccctctacattcacccagatggtgccttttacaactggggcactctgggtacgaaaaaacgggtatttgaaccaccctgatgactgcctcggttctggttccctcggttgtagtggatgctttccttttctggtccatggccgaacc

SEQ ID NO: 109356 - DNA, 974 bp, Cannabis sativa
  modified_base (680)..(681): a, c, t, g, unknown or other
aaaagcatgtaagaaaataggaaggaaaggcacttactgtttgaaattactttttgggacgacaaacggctctgtaatctgtgaatcaacgaacgacgtgaagatccctccgaatgcttgaagtgaaaaattaaatcccaatcacaactgtgtgattttcaaataattaccgcatttattttacgtggaacgtaatcaaatcccacaatttcaagggattattgttgtaggatatcagttttatttgtaattaactgccctcctatgtaactataaataggagcaggatacactgataaagggagggattttccttaatagaaaaagccctagtattgtatcaaaaatatctagtaatatagacttgtggactatgcagaattttaattgcaaaatcaagtaaaaaatctttgtgttctttctatttcctttactgctattatttctatgccaattcatcacaaaataggctttaacttagttaacaaaaatctgcgttaacactaattaaactagtttaacctaattaaaattaaattagcgacataattaatttgtaaataaatgaaattaattttttattagattatttaaaaattaatctaaaaaacacacttagtttaaagaaaatattctagatagtagttttggtaaataatttatattttctaatatttaannaagtagaaaaatatatttaaatttttaattaattttagaccaacttaaattatgatattttttttagaattaaaaaaattaataataaaatttattttattcaagatacttaattatttatttctattttaagaaatttaatcaaacaaagaaaatatatttaagttgaacattaattagttaattaattttagaccaaaatttcagactcttttaaagacagttcagattcacaacatttattttttttcatccagatcattaatgttgttacacaagtctttattatcttt

SEQ ID NO: 109357 - DNA, 673 bp, Cannabis sativa
ggcgaagggagccaaggtgggtccgacaaagcagttgaaccagtccgtcagcggatccatgtttaggtcccacagattttggaaggcatcctcgttaagagtattctgctgctcctcccgcaaaatgctcttcaaggcctccacctcagcatgcccccgactgtactcgtcaagggcgtagttgtgtttggccactcggagattctacctctcctcatctgcaggaaccgggttcaacaccatgccatgtggcacagtgtattcctccgcctcggaaggaatcccggagttgttgcttggcgccggagtgtcccccctctgggtccacttagaaggttccgcctccaccattttgcccttttgcttatgctcaagggcggccgcgtccgccacttcaccttcttcaacttcctcctccttgtccaccaagacgatcgtgcctaaaggggcgttggaggaggacctcccgggactaaccaactgggaggcagccggaggcggagaagcatcggggctgtaagcttgagcaagagtagccaagagatcgtccatgggcctggctgctgcaacaaagaaataagttaagcattaggacattcatgagagcagcatacacttagcaaaaaagcaataaaactagtcctaccctgactctctaattcggtcctagcaa

SEQ ID NO: 109358 - DNA, 514 bp, Cannabis sativa
gtacggcagagggggaccaaagtgccaagagagaaggacacaagcttttgtgttttaccttcccttattatttttctttcttgtttcttttacttagatattaaaaactttgtgaactataaccaaagggcagcaaccatggagaaatactttttactttagattttattttcttgtttaaatataagctagactttttgagaattgaatggctataaacttctatattgggtatgattaatttttaagcttattttagcatctttgtctttgttcattcaagtgagcttgtcatttttatttggttgttatttcttagccatgagtaacaatttgttaagctaaatcttgttccgaaagggctaaatctagtagttaaacttggatggagcaagagaaatcttagattttaatttttcattgtaagtggaataagattatttcatttaccttacataacttaagaattgatatttaaatagtgttccacttactggtttgatatatgaatata

SEQ ID NO: 109359 - DNA, 1037 bp, Cannabis sativa
tataaatattaaaaaaaaaatcaccacttatatttttatatatatataataattagttggcctagatgggaagctctagatggtatacacacgttcctatacatattaatagcatttatatttgtatatttgtgtttatttaattataaatgtgtaaatcatgataattaagaatttcgagtataataacagttctgattgggactacttcactttcccccatggaaatctgaccagtaaatcacaattatatatagatagttgatcttaatcataagtgcttacgtatatgtacataaatctcataatttaactctctgatgatcaacaaaactctatatatatttgaataaagaatatatatatatattataattatacagttaatatgattacgatagtcttgaattaatataaatccaacgtgtttttcatgcatgcatatattagtgttacatgaagctagatatatatttaacacgtatactatagataattataccacctaaattataagtaaataataatattaatattaaaaaaaaaaaacacaaataaatcgcttgactttcaaatggctgactttttagtaaagtggctctaaaaatgacatcttttgtaatatattatttctcatatatataagatataaaagtcttatatatgtgtactttttttttttcctaaaaggtgttctggtcatgatcactatttttttttctttacgtaaattatgttatcctttgatcttgtcatggcttatatacattttatgtatatcgataacttaatcaatgtgtagatgtttctcaaagataagggagaaaaaaaaacccataactaccatagtttattaacttgataaaaagtacagaataaattaaaattaatgtatatagtacatacttgaaaaatataaattagctaataatcgatacacatgagtgtgtgtgataagttataatatatataacataataataatatgtatatatctttatatattaaaagtgcctatctaacgacatttcttggtt

SEQ ID NO: 109360 - DNA, 949 bp, Cannabis sativa
gttggggttgactaggaatgggtgttgaagttaggatgtggttggggtgaggatgagatagtcaccggggatgtagaagaagaaagaaaaaaaaatatgattttgaaataaggaaaagaaaaataatataaataaaataaaattttgattttaaaatatatttttatatttttaattttttttaattaaaattattttttggaccaataaaaaattgacatgtggcatttaatttgggtttaacggatcagttaacttggggatcaacggacttacagaaaatgtgaccttggggactattaccgccaatttttgaggttggggattaatctgcatcaaccttaagtttttggggaattttgccgcaattatcccttttataaaattatacatatatacatacaacatatataacagagtattattatttactaattataatagtaattcttttatatgtatattttttagtgagtacatgaaatagcggttatatttgcaagcacaattctagaatattagaataaaaaaactactaaataaaaactaaaacaacacaaaataaatgtaaaacaataaagtgaatataacaacttaaaaaaacataagagaagcacacacctcaaaatccttttgtctgtgagttcatcaaatgtatttataggagaaccaaaataaaaaatcacacaaatagccaaagagaataaagaagaaatgtatttatagcctccatcttccacacccacgaacaaaaccactacagcaacacgagaacacccaaaaaataaccattaattctggcaagatgggacaggaacagtgaaatcgacgtcaaataaataaatcatggcaaacaacgctaacataaataaaaaaaaaaaacaaaagaaaaaatgattaaaaaaaaaaactaatcatcttctacacaacctcaacactagatgcaata

SEQ ID NO: 109361 - DNA, 523 bp, Cannabis sativa
caatgcataacgaattcacacttttattaaactgtaattggaataagaataatcaatgggagaaatgtatcggtttaaaatagaaaataatcggaaacaatatattattatgatgtttactaaactgtctggaaagaaaaccagaatcatattattttgtttacataactaggaaaggtaattggaatgctttaatttgacaaaattgtcattattagaacatgtaattattttctgtttatagatttttaaggggtatatttgtctttttcatttttaattaaaaaaattaaaattaaaataaattaagtaaggaaaggaaaggcattccctataaaaacgggggagaacctttccctttgttttctctctaatttgtgtgggtgcactagttttttctttttaaaaatttagtaaacaattgtatgggaatcaataccataccattcattttcattcccttttaagtaaacatgctattatatttattaatatcagtaaagcaaaccggttgtattttatt

SEQ ID NO: 109362 - DNA, 682 bp, Cannabis sativa
taatcaaacatgttgacccaaccactagcatactggatttgtatggaagcaaagttcacttatctgccgcgatgttcggagatgttatgagggtggacgacggacgggatcctgtagtcaccgggggtgatagtgacactcgatatctggaggagttattgaacgttgtcgactacaccgtgtcattgacagggttggagaaatctttattggagtgcgttgaggcagacagtctatttctgattaaattttctttggtggtgataaggacattccttgcgccaaaaacgggttgcgatatcacttcggggtacttgcactctcttagggttaccagggacattcgccacaagaactgggcaactgccgggttcaggtatctgatgaagtcaatttttagattccgaaattagcatacgaagaatgtgtctggctgcaccttattcttccaggtacattgattttgttctctttcatttatgtgaatgtgtttattaagtttataatataatattctcatttattagttgaatgtattactaatacattgtttgtttgtcacagttggtgtagtaaacaatgtatatccgcttacaaatttggatatgttgaccgaacagtgctccccgttgatttttggggtagtaaacaatgtaaatctgcttacaaatttgtgaaagac

SEQ ID NO: 109363 - DNA, 557 bp, Cannabis sativa
aaccttcaagactgacaaagttgtctaggagtgcacctccaaattagagacaagctatccggaagagacattccatacacggtacaagctattctagaagaaccttccaggttctacaagaccttctgcacagggctttccaaatccacactaagctttcggtatttgctctccgaattcacagcttccaatcccggacgataaaacttgtaaccataaccaacatatatattgtaaaattttaatttgataaggattttttcattatctttagtttcaaaatatatatcatctaataaattaatgtaaaatttatgtgattaaaatatattttctaaaacaatatatgtttgtataaaattcattaattatagtgaaaataaatagaattgtatttctaagcaaatttaattttatttggtacgttatagatattttttagttaaattatttaatttttatttttttttataatcatttaatctaatgatataaatgttaataaacctagacatgagaagtctatagtcgtaatattatgtaagagagtttgcaaa

SEQ ID NO: 109364 - DNA, 1920 bp, Cannabis sativa
aaataatttccaacagtatattcattagttatccaaatggaatgaaagcctacacacttctcgaccttgccacaaagaaaattttccattctcgatatgttttttatgagcaaatttttccactcaaaggatctctcaaccacaacaatcggatgctttacttcctatcaaaccatccaattctccaacaatgacccctgttgacaaatataaaccagcaattgtgggttttgatactcaaaaaccaaccaaaactcctactgatattcaaaaaccagcagctgtccctgttgttattcaaaaaccagcaacagcccctgctgatattctcacaccagcaatggctcctgatgatattactcacacatcaacaccagcccacactataataaaacctcctaaggtcagtttgccaattcatactacaaaagcaggtcgccaaacatccactccttgtcatcttaaggactatatttgtcaaacttctactgcccatcatttggttaagtatctcaattatgacaaactaagcattccctttcgaaatgccatcctacatgcttatattgaaatcgaaccaaccactttcaaataggcatcaaaatttgttcaatggttaaaagccatggacacagaattctttgcactcaagaaaaacaatacttggactgttgtatcattaccacctggttatcaaccaatggcaacaaatgggtctataaaattaagtacaattctcaaggtgaagttaagaggtacaaggcatgccttgttgccaaaggttactcacaaactcatggcatagattatgctgaaacttttgctccagttgctaaattcaatacgctaaaactcttcttagcactggctgcactcaacaattggcccttacaccaaatggacattgataatgcctttttggatggtgatcttgatgaacaagtctacatgacactccctaaaggctatgtccatgaagggggagctcccccccaaccctgtgtgcctattacataagagcctttatggccttaaaaaagcctctcgtcaatggtttgctaaactatgcacaactttaattaaccatggcttcaaacaatctgcctttgatcactatttattcatcaaaaaatcctcaacaagcttccttgccttacttgtatatgttgatgacatagttattgcaagtactaatgactctgatgttgctgcctttaaaatctttctcaattccacgttcaaatgaaaatacctttgtcctctaagattttttctaggcctcgagatagcacgatcaaaagctggtatctttgtctcacaaagacccttgaccatacaactgcttacttaaaacaggtcttcttggatccaaggccgtgtccacacctatgatgcaaatacatctctcagcaaagatgttggccctctagtgaatggtgctacttcttatcgcagcctcattggaaagcttctttttctcacaatcactcgaccagacatcgcttatactgttaatcgactagtcagtatgttagtgctcctcgacaacttcatctcaaagctgcacatcgtattgtacaatacctcaaaggcacccctggccaaggactcattttccactccaacaactcttcatcacttccagcagatcgactattccaactccaagcttttgctgatgctgactggggttcctgccttggcacgagacattccataacaggcttttgcatcttcttaggccagtcactcatctcttggaaatcaaagaaacagtccaccgtttcaaagtcctctgcagaggctaccagtccattgccaacaccacatgtgaaatactttggctccacaacatcttatctgattttggcatctcccaaactcaaccaacagttttttattgtgacaatcaagctccat

SEQ ID NO: 109365 - DNA, 924 bp, Cannabis sativa
attatgttctttacaacaaagtcgtaaacttttttggatgtaatggttgctagcggctcagcttctgtccacttggtgaagtaatcaactacaactactgcatactacacgcctcctttgcccttgggcaattgtccaatcaagtcaattccctaaatggcgaaaggccaaggactttgcatctgagttaactcgttgggcggtgctcgaggtatcttcaaaaatctctggcatttgccttagaattttcttagataaactctacccggcaacatggtttccacaaaatccatcatgcacctcggacaaaagtcatgcagcttcttcttgggtaacacatcttagtaatggcatggagaatcctcgtctatacataattctctctactatgatatatcgtgcaaccttccttctcattttttgagcctcattttgattatctggtagttccccagtgttgaggtaggttgctattgtcgtcatccagtttggggaagtatcaatcatttcaatctcttccgtgccaatgatgctaggttctttgagaaaccgaataggaaccggatttgctctatcacttacgctactactcgcaagccgagctaatgcatcagcagtcatgttttcttctcttggagtatgcctgagtgcatagcttttgaactgtgcgagcaggtcgtgtatttttctcagatatgctatcatactttctccctgagctttgtattctccagatacatgatttaccaccaactatgaatcactgcagatctcaatatgttcggccttcatttcccgggctagttttagatcggcagtcagatcttcatattcggcctcattattggatgctttaaatccaaacttgactgcagcgtgcaggtgttgcccccaggtgtaacaagggcaattcctgcaacagat

SEQ ID NO: 109366 - DNA, 944 bp, Cannabis sativa
  modified_base (37)..(45): a, c, t, g, unknown or other
  modified_base (887)..(908): a, c, t, g, unknown or other
tccaacgaacagggtttgggtgcaggggtaatattannnnnnnnngaaggctttaagtttcactatgctgtgaggttccaattcgacacatccaataacgacgctgagtatgaagcctgatcgctagctaaaagataacagaggcattgaaagtcaaaaatctatctcatctgtcatagtgattcgcaactgattgtgaacaaggtcctcggggaataccacgccaaaggcttaaaaatggcgaggtatttagagaaagttcggaagaacttggaaagattcaattactttaaaattgaacaaattccgagagaacaaaactccaatgccgacgccttagcaaaactggcctcatagaatgacctggatgaattgaacttagttccggtagagatgctgagcgagccaagaatgtgtgaaactgaagacgtcgagatgatagatagctctcctacgtggatgactcctattatcaattatttactcgacggacaacttctgaatgacaaaaacgaggcacgaaaaactattgtattcagtacctcgctacacaattatcgaaggcaaactatatagaagggggtattcaatgcccctacttcaatgtgttctccctgtagaagaaaatgaaatcagcagagaaattcatgaaggcttgtgtggggaagattagacaaggatattactggccaatgatcaataaggacacacatgagtttgtcaagaaatgtgataactgtcaaaggttttcacatatacctcgcgtactgccaacagaacttagaatgatgacctcgccctatccattttctatatggggtacaaacttaattggggcattacccactgggcgaggaggagctaagtattgttggaaattattttannnnnnnnnnnnnnnnnnnnnnaagtatgttgattaacaccctaagatcggaagagcg

SEQ ID NO: 109367 - DNA, 543 bp, Cannabis sativa
tttatcttttctggaatagttgagacttttccttagataaataaattctatatctagtattcaagaagcttctatagatttatccactagacctgaggtatgggtagcacattaatatatgctgagaatggagatctgtttgcatctcaaagtactttatgtgtgctaagggatcttccttttcgttgtacatcttccaaattagtatcttgaactgaggtatgggtagcacattaatatatgctgagaatggagacccccttgacctgtctagttcaagatctgacagctttgggttggacatgccttttatcatgtctctaatttgatccaaatgtgcttgcacagatggatctgctttagtggatacttttccaattgtctttcttagccagacgagtggccttggctaggtaatttgtttttgccgaccagcccaaggctaggtagctggctttgaccggccagccttaggttgttctcccttggccgatcagactagccatactcctttggtcagccaggtcggtctgtgggttaatg

SEQ ID NO: 109368 - DNA, 536 bp, Cannabis sativa
aaaattcattactcttaatgacattccttacaaaattggtgggggaagttctccttttcttttctcccttatttaatcaattaattctccatttcctaattttaataatgtaagtaaataaatgtaagagaatgattactttaccattaatttctattacttattagtaaacatgtcattaaaaatcaaaatatttgttcctgtaagtgacaactaacagttattattatttatttatttttaagacgttagaatcttttataaattggttatattgttctatgtattaggatcaattttttaaaaagaaagtagtcatgttatttaataatttttttaaaaaaatggagttatgattctataatattacttccctattatctttgttattggttcttaaggattagttattgatactgattattggatattacatctatctttttggaggtttaggctaattattatttttactcctgaactttaacatgtactaaattatgttccttgaatttttaaggtcattaaaaatgtcc

SEQ ID NO: 109369 - DNA, 2517 bp, Cannabis sativa
  modified_base (2441)..(2448): a, c, t, g, unknown or other
tttataatatgcatatcgtggagatttatttaagtttgatataattaattatgctattttgtatgaattccccgataagtattttagcgtgtctctcattgagttttgaacgtaatggtttagggcttgtaaaacgtcaagttgtgtttccactcaggctgaccggcacacttgagcacggaacgaggtaagatagcataataatgtatatatgaatgtatgcttgtattaaatgtttacactactaacactaattgtttatgtgattttaagggtgttagtatagtgtaggttttttagatttgttacagtgttaccaacacgaataccaaggggtatgtcgtgcatgtggtacaacacttagtaacttctgggggtacaataatggctctaccaacacgagtacagggttggtactttagtgaatttggtacagtggtcgtacttcccttaagaacgttcttaaccatttggtgggctcggttgatgagctcaggacggcttaagcataaagccggtataacattgcttatatatatgttatgcatatcttactgagtctattgactcatcattttgctaccttgtgtaggtagagaaaaagttaagttggaggaacagtgagatggagctcggcagtgattgtacatatcgcggtagtgcaacctggagggtttcggtctttcaatattttgagttgtattttgtgttgcctgtcatttgtttaaaagaaaaatgttcaaggggatttgtattaacaaatataatttttaatgtgttttataactcggaatcccgacctttatagttaattaattataatatattaaaattagctttcaagtttagtaaatttcaaatacgagcgttacaatcaaggttgttgggtcaacgggaccagctcgcaacatagagaatcgatccttatgtttttgcatgcggatcgtggggatactcgcatatatcatgagatatgtgagtttaaaggtgttccttggtcctacataatgcgagtcatacgaatgcgattagactgtcatattcgcatcatctcgctgagcttggttcaggcgaggttcgtactcgaggggtctctcatcgacatctcagctctcctcgaggaaagtgaacacacgtgtcttttttaataggagtttgatctcgagtttctaggtgagaaaaatctcactataacattttccctattaaaacggtttgcttttaattaggggtgggtaacatctaatttaatttaattgaatcgaatcgatctaattgaatctaattacaaaaaattggatatccaattacaattagattggatgttaaaagttcgattctaattggatttgatagattattgaatgccaatctcgaaatctaattaaaaactgatccagtctaactacatttatatatattaaaaaattatttatatttatttatataataaaaaatattaaaaaatcatatatatgtattaattatatttttagtagatttttttttattcaatttgtaatattttgtttttttgtgtatttatttttatgatattttgtcctattttattatttaataatattattattttagttatttgaaagtttagattgtatttttataaagtattaaatttaaatataatatgatatttaaattttagatatttttaagtaaatattaaaagctaattattataaaaaatggtatgcctattaccatgaagttttcaaaagaaaaacgcgtaattatgtaacacaaggttagacaagtcaacacacaaaagaactctggcagtaccctttgatgtgatatatatttgtttctttgatgtgatatatatttgtggttttcttatcaataaatattttatatttggggttatttaattttttcaacaaattattaagaatattaagtaagaacaagaatatgtttcaataaatccattaagacatcacttacaactttataagagacaaaagattgcaatgcaagacttggtcaaataaacctcttatcaaataagtttacttcttaaaacgaagaaaaaattgtgtaatgggtctaaacttaataacatatgttcgtttaattaattttaatgggtcggtttttttttttttttattttctgaatatcttaactaagcattatttgaatagctagataaaatcttatattaattactactgggacttagcacgtgcacgtgggaggcacatggtgatgtaatatttagtttctgcaattgtctttagttgctgttgttggaaagtagtatattctgtggatcaaaaaagaagtaaatagtatataaataagtgtattgttcttggagaagtattctctggggccgtcatctccttaagcagggtcttgtctggaggattggctctggccgtaccattcctttatttgtgttatagtgagatttnnnnnnnntagaaactcgagaccagacccctatttagaggacacgtatactcagatttcccaaagaaagctgagatg

SEQ ID NO: 109370 - DNA, 640 bp, Cannabis sativa
  modified_base (400)..(407): a, c, t, g, unknown or other
  modified_base (520)..(520): a, c, t, g, unknown or other
gctaatccaactacaagtccttcaattcctttcaattttgatcctgatttagcaaggatcaaattggctcaaatgatcgttaagcatgagtatccattgtccatggttgagcatagcgggtttatcgaatattcaagtactttgtgtcctacatttcaaatggtatcatcttcttcgacacggcgaatggatgccctttctaactttgacaaatatgttagagcttcctatcgagtagaaaatatgaagtctgaactagatttatatttggaagagaacttggtacctaggactgaagagtcattcgatatatgcaattattggaaggtgacgggcctcaaataccctttgttgagtatgattgctaaggatgtatttgctgtgcctgttagcactgttnnnnnnnnatctacattcaacactggtggtagacacgtgagtcctcatcgatcgagacttcatccttctacattagaagtattagtatgcacataaaattggttgatgactgacaaaaaangtaaatatcattaaataaatatttatatatatttgtgtatatgttgatgactgaaagcattagtattgattttgttttttttttttacagtaacaataaatgatgaagatgttgatgttg

SEQ ID NO: 109371 - DNA, 599 bp, Cannabis sativa
gtattagacttttaccaacatgggaaatttcaagtttattgccattaccaatagtcaatgtctcctcaccattgtaatctgtcttgtgagtgagattgtttggatcggctgtgacatgattgctggctcctgagtcgacataccaggcagtgtcctccaccatttcaggagtagctataaatgcagaagcaccattgctattgttactggtttgtcctcctttgtttccactgctggatctgtttgggtctgaacccatataagactcatcgtagcgattataacagtgagcagcactatggccatatctcccacatacttgacatgtgggttttgtattgccttgattcccgacctctgaatctacccgagcctctgcctcctcgagtttgattcgagttgccacgatttccttgtccatactgcccagagttgttagatctgttgcctgcaaaactaggatttcttgtagcagcaacattagcagaaggggaacctgagataggttgtttggaagatccagacaatgttgttaacctatctagcttgctgtcaaaattcaggagtatatcctaaagttcttgccaggaagtggataa

SEQ ID NO: 109372 - DNA, 601 bp, Cannabis sativa
tttactatatttcaatcgtattaaactacttgttgcttacaaaattagactcactgtcgttggctaaaagagaggtcaacattttggtgctttcattggaagtagaatcaacgatcgctctttattccaaattcaatcacaattacgatggtggtacagactcgtagaggcgtggttgatcaggcgaatccacaggcggtggatcctgcattgttgaacccaggaaacacaagggttccgccagccgtaaatcccagacagccatcaactgtgggtcacggtgtgacgactcgtgtggatgaaatcgcgcctgatgtgcaagagacagggaataccagttcagcagccgaccaaggcattcaaaacatagtcattctgcctgctaccaatgttcaaacaaccattggagatgacaccgagatccagaacctctatgctgctcttgggctcatgcagggtcataccaacaccgtacatcatgattaggaggaactccttgctagggtaaatctcgcgttcgaagagcagagatgcatgtttaccgaacggagagacaaggagatggaaacgttaagggctcagcagcagtcattgatgatcg

SEQ ID NO: 109373 - DNA, 545 bp, Cannabis sativa
cgactagtgttgtggtttgacactaatgttgttttagtttgttttcaggccataatgaaactaagctcagctcgtgatggctcttggggatctttagatgcttttcaagagcgcgtaaagatcttggaggcttctctcatggtaaaggaaaaagtcaattcttacttggaagccctcttggcaaagaggcaaaggatggtttctggcttggagaccatgcttggcgctaggaatgtagagaacaccgcccaggctgccctcatctttgtgtttcaatctgaccttgatgatcatgagaataagttgcagcaggctcttgatgtccagcaaaccattagggaagagtatgtcgacctgtcctctgaacttgcctatgagttccacttgtacaacactcgagttgtactgtcatacatggacagtaaggcttttatggagagaatgttagcccgtggaaaggcactgttcaagagccgaatggagatagaccaagttggtgcctatcgagaggggtcatcattggggacacatgatgaggagttggc

SEQ ID NO: 109374 - DNA, 561 bp, Cannabis sativa
attcttccattaagcaacaggctatagttagctccttgaagacagcttaaaatccagctaataaactttgatggaaagcggagagcttttaagatatcagccacaaagcaccaatcaaccgtatcataggccttgctcaagtcaattttcatgatgcagcgagaagaaatgttcttcctagtataacctttaagaagatcctgcaaaatcaaaacattatgagctaaaagtctcttcttaacaaaggcaccttggtttccatgaataagcccaggcagaacttccgagagtctagtacaaatcatctttgaaatacatttgtaagttgtggtgcagcaggctattggtctgtagtcagaagctccttgaggattatcaatcttgggaattagagatatggatgtagcactcacttcctgaggaagttttccagattgaaagaaacccaacacagcacaagagaaatcgtccccaatatcattccaaagctctttgaaaaaacacgctccaaaaccatcagggcccggacttttggacgagtgaatgctaaataaagcttct

SEQ ID NO: 109375 - DNA, 610 bp, Cannabis sativa
gccccgccaaccactggagtcctagcagactcaattatgcactcaactgcgccctcagctcgcagtgccttttccaccatctcagcataggtagttttgtggtcggtagtaatcattaggtcatgtctaatcttcacattcaatccatccagatacttttcctttttactgaaatcagttggcacaattctcgaggccaaccttgccaaccgatcaaactgcgttgtgtactcagtaacactcatattttctttctgggtcaagtgagtgaagtctttcctcttggcacttcagacggcctcattgtagtacttggcattgaaaatttcttggaacttttcccaggtcatcgttgtgacatcgtgtatcatagagatcatgtcccaccatactaatgcgtcttcttgaaattgaaaagtggcaccgaccactctatcattcctggtgacgcccatgaaattcaatatcttagtgatcacagttagccactgctccggacctccccgaaaaatcggaggtgcttgcttacggaacctttcatacagaggttccatccgattaagcgctatcactggttcggcctggacaacaggggcaggggccactagaa

SEQ ID NO: 109376 - DNA, 2451 bp, Cannabis sativa
agaaatatggaggacagagaagaagaaatggtaccaattgatttaattagaaaacaataaacataaaatgtaaaatattagtactctgaaaatcacatcaatgatgagagttgttgctaattaaaaaagccaaccaccaaaaaatttgcacatttatttcgttattattgaattatattttaattaacttaaaatacctacctaccgagcatgtcttatacgcccatacacttttgacttttgcagcagatatgtcatttatatttctaataaattttgtcttcgagcaatggctgtggcgatctacaagatcacgtgatctttcagtgttggattctttgttttgtattgacctgatcgagaaagagtagttgatgattagaataccggttttatctaaagatataccactatcatgactcatcgtaattctttatatattctcaactactttcttggttgatccggcctgcatgagttacacgtttcataagttctgattattgatttcgttttgttgatgattaattgccatacctatccaataatatcagcattataaatatgtcactactaaaatattaaaatagtcagaacacgtacctaaaaccttacacgtactatactatattactttataaatactaccctttacttcaccttaatcacacagtcacagggtaataatattctcccaaataattctagctatagttatcccttctgtaactaagaaattagtcatgtcttcaatatcatcttactcaatcatacatgacctagaagatcaattaccacccaattatgaaaaggaaagagaagagcttccactaaaagagatccctggaggttatggcttgccgttttttggggccattaaagaccgatgggatttctactacaaccaaggtcgggacggattcttccaagcccgaatgacccaatacaaatctacagtcttcagagccaacgggccaccaggccccttcatggcaaaaaatcctaaagtcattgtcctcctagacgctgcaagttttcctatcctctttgacatgaccaaagtcgagaagaagaacgtctttgatggaacttatatgccttctactggctttacaggtggttacagagtactttccttcctcgacccatctgagccaaaacacaaatccctcaaaggctacttcttctctgtccttgcttccaaacacgaaaacttcatccctgtgttgcgaaagtccctaaccgagcttttcaacactctagagtcacaactgtcatctaagaaagaagctaacttcaaccccataagcgatacctactcattcgagtatgttttcaacctcttttgtggtaaaagtcctaaagacactgtcttagggtcccaaggcaacaccactgttgacacgtggcttgtcccgcaagtggctccactcataaccctaggcgtaccgaagttcctacagctagtggaagatctactcatccacacattcccgataccaagtttccttgtgaaatcaaagtacaataaaatataccaagctttctcctcctcagccaccgaagtgctagacaaagcaaaggatttcgggctcgagaaagaagaggcttgccataatctgattttcctcacgtgctttaatacctacggaggcatgaaagtcctcttcccaagcttgttcaagtggatcggtcaagccgggcctactttgcatgcccaactagttcacgagatcagaagcatggttaagcaagaaggaggggtgacttttgctgccatagaaaagatggcgttgaccaagtcagtggtgtacgaggtgttgaggatcgagcctccggttccattccaatacggtcacgctaaggaagatctggttatccagagccacgatgcgtcgtttaaggtaaagaagggggagatgatgtttgggtatcagccatttgcgacgaaagacccaaaagtttttgacaagcccgagaagtttgtggcatataggtttatggggaaaggtgaagagaacctaaagtacgtgttttggtctaatggaagagagactgaggatccttcagtggataataagcaatgtgcgggtagtagagatttggtggtgttgatggccaggagggtattgttggtggagttctttcttaggtatgacacatttacctgcgtcgctgagcagttcttggtgggtacaagggttattttcaagtcgttgactaaggcctccaaattccatcagcttaagtcatttgagtgaattacaaccatcgttatttcatcaactgaattgataatagttggatgaagatataagacgtaatatatgtactactctttatattacaagtactcttagttttcgtaaaaaaaaaaaaaacgaagacgtaatatatctgctttgtattttgtgcatgttggtttcttttttaatggactgaataaataaa

SEQ ID NO: 109377 - DNA, 594 bp, Cannabis sativa
taaaatattaaataaacccaaattaaaccaataaatatatataagaaatacatccaacggatagaaccgatccaatccaacatccaatagatgttggatgaattggatgactagatcggatcggatggtaaaatctaatatccaatatataattagatcggattatgataggcttaaaaataatagatgtggtccaatgaacagccgctataatttattatcgatccatatgggtcaatataaagtaatttaaagagaacattgttattaagcactttaaggtgtccaacattatatatggatatagcgtgttgtgggtacatttacagtactctaaaagaatacaagaaaacagcaaaaaaaaaaagcacatgaaagtaacaagaaaataacatcaaaacaacataatagaataatatacaaataacaaaaaattaacaataaaatattaagagtacatcataaaaatactgtattttatataaataaaagggtaaatagcggtacaaatacccaaagttttatatttgtaagcggcactaacccaatgtttatttttagcggcataactacccaatgtttgtaaaactataa

SEQ ID NO: 109378 - DNA, 507 bp, Cannabis sativa
atagaaaaataatgaaatttgtatgcaagctattttcttcagtatcctatgctccaatatatgttcagttttcctccgttgttccactgttattttttagttgttttgattctttttatttttgatgccttctcttgcatgttctcttattgtgtctcagctccccacatttgttgtatttgttatgttgtttctttttccagccagctttgagcctcttttttttgtttgtttggtcttcggccagattttaatcattcaaggggaggtaagactattacatctttcacattttgtgctacatcctactcattttagtgtccgtacactgttccttaataagttgctagccaatttttcttggtgtagtaatctgaacagagcttgtgtagtaacaggttgcacgtgtgtgttctctctttgaggtctactgtccaagattatttcattttaattaccttaaacaaatattcagtggttggcttaacctgtgtaatttaaaaccaa

SEQ ID NO: 109379 - DNA, 640 bp, Cannabis sativa
  modified_base (571)..(579): a, c, t, g, unknown or other
tgtcgggcagcaacccccgaatgtcatcctcttgggtgagacagacgaagatccagcgatgaatacttcccagactataaatggccaactgccaaatccctggtcacaagttccgcttgtgggcctagcggtaggtgggtagaccttgtctagtaattcatcaggagaagtcatacctgatagttccaaccaggctaacggtgccattccacctatcaatcaagcaaatcaatcactgagacagccaggcgtttctgtattcgataggttgggaacgactcgtgacctaagaagcgacctgaacagaaggagaggagtagacgatcagattggcatgacgatcgtacagcctggaacccgtgttcaaattcctgcttagaaagatactgatgtgattcaaatcgaccagaatgtcgagcaggttagtccagctatgcaggcacagctggacgaactaaagagtatgttccaaggcatggccagacagagaaacaatgatctcgagctggaccgaacacgtggaacccttctctctctcaagatcaatctcctggcgttgccccacaagttnnnnnnnnnaacctggaaaatgtacactggaagagaagatcctctttcccacctaaagtatttcgagatg

SEQ ID NO: 109380 - DNA, 794 bp, Cannabis sativa
tctcactccaagtttgtcgatcaggtactgaaatcttgagtgtgatagtcccttagttaggcagtcggctacttgatctgatgaaggaatgtagcaaatctctaactctttcttcagcactttgtcacgaacgaaatgtatgtcaatctctatgtgttttgttcttgcatgatatactgggtttgaggctaaggcacttgcactttggttatcacaccatgtgataggagtactgggaagcttgaagttgagttctttgagaagggattcgacccatgtaatctcggatgcaacatgagcaagagctctatattcggattcagtgcttgatctagacacaactgcttgtttctttgaagaccaagcaactagagtttctccaagatagacacagtatcctgcaattgatcttctgtcatcaggacaacatgcccagtctgcatctgagtagccaactaagtttaagtgatgactgaagccaatgtgaagaccgtggtgcatggttcccttgagatatcttaacactctcttgactgcattccaatggcttgtggttggtgcttgtaagaattgactcaacttgtttactgcgaaggcaatatccggccttgtatggcacagatattgaagagctcctattgcacttctgtagatcgtaggattagggagagcttctccatcgagctttgacataggttttccagcaacaataggtgtgggacacggttttatgttgagcatttcatacttgtgcagcaaatcagatatgtactttgattgtgtcagatacagcc

SEQ ID NO: 109381 - DNA, 523 bp, Cannabis sativa
cagtcatcttcttcttcgttttgtatggtcactgggtattacttaataaaaaatcaaatgaaaaaaaaattaaagatatctatttaagattttaaaataaattttaaaaaatacttttaatattattttctcttaattttaatatttatttttatattttttttaaataaagttttatataattttttattttagttttttgttataatatttaaaatgtaatttatttttatttgatatgtatatttaaaaaaatatatgaaaacttcaatataattaaaaatatttttttttatgtaaaataaaaaattattaaaattatgtacattttttatttagattttaccacaacattgttaaaaaaaaggttagaattgagtgtggatgttgaagaaggcaggagcttgatccatcatcctcaacaaactttcattgttaatcttgtttcttttgacttaattttcttgagtggattatgaatcaaattgcaaaaagaactaatggaagaatatatatataatat

SEQ ID NO: 109382 - DNA, 663 bp, Cannabis sativa
cttaagttgtgtgatttggtggctgccttaggtgttgacacctagcctctttattttcagcaaaggattaattagaaaatcctttttcattttgaggaaaaaatcatgaaaagactagaattgaagaaaactctttctttcccttcactctcttcgagccagtcataaaccagaggaaaattagttgatttcctgctatgttctagagtttcaaccaaggatcaagtgttcttgaagctaaggtgaccctagaacaatagtttgtattttttgaagctttgaactttggtttgtgtatgtggtttgtgtatggttcctatttagttcgaattttaaggttaatttgtgtaggaattagcttcttgcagctggttttgatgtgttatgatagaattgagaaagtttgagttttgaaactcaaacttaggtctctaatggaacattttaatccagtgtgtttttctgagttttattggttggaatatgttgtatatgccctctttaggtactctagaaggtttggtagcaattggctcagtgtcgagcaagtttgggattttttggggaaagctagtacaaaccggttaaccagtttgccagtacctataaaaccagttaactggttttggtaggttccctaaataacccattttctcaattcag

SEQ ID NO: 109383 - DNA, 801 bp, Cannabis sativa
ataaaactatatttacgatatgagtaatgatattattaggtaggttatttgattttacaaggatgaagactagtatatgttaactacttttgttgactcatttagaggtttagttttttcataaataaaaaattagttgacatgtcaaattttgattagtttaacacaatatgggacaccactttttaaccgaagatcttgattcataatctcatacattattaattaatattattcattttacttttattggaaaaaaaatatgacatcaatatcaaattttagcatcaatactattttctaagagtatcttcaatgtggtcacatatacaatgtggtcatcatttttaatataattttatcagtaccattatctatatttgacaacactctcatgtgacattatcgttttctttttctttcttttttttttcaaaaaaaaattactatatgtattattttatagtattaaataaaatttaattatttacttagcagcacgtgggatcatgatgggtaacttttggagttgtcaattattagattaatttttatatgaaaagttgtcaaatcttagagcatctccaatggtaaacctttagaggatgtttggtgaggtggacatattatgtggcaaaatattgagatgttataccattggagagaagaaaatgccattttagaaatttgcaaagatgctatgttgtagcattgatactattcattattttttaataaaaaattgaaactaaaaagttattgtagctaaaaattaggatatatatcaaataataatgtgtg

SEQ ID NO: 109384 - DNA, 598 bp, Cannabis sativa
taaaaattaaataaatgtgaaaaatagagataacaaagaattaggaaaaaacttcatataagatgccacttagaatgctttgtacattcctttatattaatatatagattatattattttataacaactctatgaataaaaattttcttataaattcttttttgaatataatctgttcgatagtagtcttattctagtaaatctagataatttagtattatgttcctgtttgatgtgatggcatggttttctagtatttttttttttttttggtaaatgctaattctattgatatttaacatgttcctatgtgtcatattgttattgctcaaattaatataatttaatataatagttttttaagaatatcattaactattctattcgtagtgcatcacctctaaaattattggacaattcttttatatatattaaaaactttagatttattgaaaaatctttgattatttagcaaaaaaaaaatgaataatttaatattaataataactaataagatttttctcattttaacattatttaactttatttattcttatgggttcaaaagaataaagttattcattgttaaaaaaaaaaa

SEQ ID NO: 109385 - DNA, 612 bp, Cannabis sativa
ataggagtctcctgatcaatgttagttcgaatgatgatctctttatctcggtcattgaatatatctgaaacacagtaagaccttgattaagctagctagtatcaataggagtctccttatgaagatattttttaaaataaagtcatatataaatatttatttctatacaatcagtggtcagatccgacaaaacacagtaagaccttgattaagctagctagtatcagttagcaagttgcacaaatgcaaatcttgatcagtttttcatgaatagtttaatcaaattacagactaattaagcataaggctatagcctataggggtatatattaaatatattaatttgttctttgttcttggcagcctggaatttcattgatcattgcatgtgggttatacacttatcaaccgatatattatcaaacagtacatgttaaccacaaaataccaacaaataataataataatatacatctacaacactacaatacattattgttttgttgaaagtgctccatatggtaggtcctatcatcatcatatacattgatcaaatataattattctggttttgtactatttattccctaaattattttctcggtcccattc

SEQ ID NO: 109386 - DNA, 668 bp, Cannabis sativa
  modified_base (135)..(140): a, c, t, g, unknown or other
cctcaagagccaaacatgccaaagtaccatgaggctttctacttagtgcatcagctactacattagctttttcggggtggtactgcaaggtgaaatcatacccatatactcaacccatcttctttgcctcaagtnnnnnnccctttgagtaaaaagatacttcaagctcttatgatttgagtataactcaaactttacgccatataaataacatctccaaatttttaagacaaagattattgtagaaagttctaggtcttgcgtagggtaattcttctcatgtgcttttaattgtcgagaagcataggcaaccacctttccattttgcatgaggacacctcctagtccagtacctgaagcatcaatgaataccagatatggttcctcactattaagaatagtgagagcaggtgccaaaattaatctttccttcaattctctgaaagtttcttcacaactttgtcaactttgtcaaaggcatagcaattcgagagaaattctctacaaagaggcgatagtagcctgctaacccaaaaaaccttcaaacttgagtgacattcattggtctttcccgctgtagaatagagtctatcttcgcatgatcagtagtgataccatcttgagaaattacgtggcccaagaatttgacttcagtcatccagaagtca

SEQ ID NO: 109387 - DNA, 648 bp, Cannabis sativa
ttctctttctttagatgataatattgataaatttaatgaaataattgttggtttagctaacattgatcataaggtagacgaagaaagtcaagcaatcatattgcttagatcattagcaatggcatatcaagaagttaaagcaacaatcaaatacggaagggatgtgatctcgttggagggtgttcatgcgacattaaaatcaaaggactttgaattgcaactcgagaaggagactaggaaagacgaaacctatcttgtaagaggaagaagtccaaagaaaggatcgtcaaggaacagccagtcaccatcaagatcgaagtcgaagattaaagacaatcgacaatgttatcaatgtggaaagattggccacatcaaaagattctgttgtcaattaaagacgcaatctggtttcagattcaattatgatgacaaaagatgcaacagtaaccagaaccagtactcaaaatctaatgatcatggaaatcaaagaaaagactctgcggccgtggctgagagcaatggaaatggaagttcggatggggaattattttctatttcagaaaataataacagtaaagagtggatccttgattcaggatgcacttatcatatgtgtcccaacttagaaaccaataatggtggtagagt

SEQ ID NO: 109388 - DNA, 876 bp, Cannabis sativa
agaacccatactgggaattggacccagatcgggacctatgacttgggacctaaacaaagactgggacctggacccagaccgggacccggaccgaaacccaaaccctgacccaaaactaggcctggccccacgacataagaaccagactcagacctgggacccgaaactcaggcccacactgggacatggacctgaactcagacctaagcccaaattggaaccaggacttagactaggactcgagacgcgaacccgaacaggaaagcaaattttgaccgagacagggacctaagacctgaacatagatgggggacccagacccgggaattgggcccccaaactgggagcaaaacttgggcctcaaaacttaaatcgggaatcgagactagaccccagacaaaaacctggacctaggacccacctcaggacctgggatccgagagtcgatgcttagacctgacccgtagtcggtgtcaggatttgggacatagactagaacccgaacccaaactcgaaatcaaaaccaaaacttgaattggaaccagactaggatcttggaatgggactgggaccttgacccggacccgaacctggaaacagaccaaacctcggaccctcaccgagaccgaaacccacctccctcgaaacaaaaatcaagacctgaacccaaactcagactgaaactcgacccgaacccgtaccctgtgacttgaaactagaatcgaaaccagaagcggatcgggactcaggagtaggaccaggacaaggaccaggaactggacccagacccaaaattgtaaccggactagtacccggactcagacacagacccacccacggattgggtcccaaaattgaataaaaacctgaactagg

SEQ ID NO: 109389 - DNA, 512 bp, Cannabis sativa
aatactttcaattatttctgtataaaaccaagtacgggtcgaacccacgaggactatgtttattaaattattcaaaaattaatgataagagttagaaaagggggttttgagactaagattaaaatagcagaaataaaaataaaacaaacaaattaatattgagattatgatatgagaaactagttaaaggttattcgtcacactcaaaatcattcctaattcctattaattaatataatttcagtttcaaaacaaactattaatttcgcagataacagtgaagcagccaattatcccaatctccctattatatgtaatcaaagtgaagcgctgaataattaactcttttacctaagaagtaaatccacgaagcatgcaatttatttaacttagataaacctttgagttttatggagagggaataatctaggcaacaaatcaatgaagcatataattcatttaacctaggttccattcttcatcacaaataaaaattacaatttatcacaaac

SEQ ID NO: 109390 - DNA, 544 bp, Cannabis sativa
ctcagcatactggtcaatggagaaatttgtccgaacaggtagaaagtacgctgacttgtaaacctgtccactatgacccaaataaagtcaaactgtctcgtggttttaggcaaacctaccacgaagtccaaggaaatatcttcccatttccactctggtatgttcaatggctgcagcaaccctgcatgcctctaatattcagccttaacctattgacaggtaagacatttagcaacatatccagtaatgtcattcttcatgcctgcccaccagaacatggctttcaggtcttgatacatctttgttgaccctggatgagctgagtaaggagtcgtatgagactcatccatgagctctcttttcatactctcatccatatgcacacaaacacgatttccgaatcacaacattcccgtttcatccattaaaaaatcactagctttcccaaccgaaaccctaactcgggtttttatcaactctgaatcttgcttttgtgcttctttaattctctctaaaagagtggattgcagggtaatattaacca

SEQ ID NO: 109391 - DNA, 503 bp, Cannabis sativa
gacaactcttgctcaattggtctttagtgatgagaggatcaataaacattttgagctgaagatgtgggtttgtgtttctgaagactttgatgtgcgtagattgatcaaagccattatagaatctggaactggacatgtttgtgaggcaatggagatggatcctttgcagaaacgacttcgagacatgcttcaaggaaagaggttcttgattgttttggatgatgtgtggaatcaaaaacatgaagaatgggaaaagttgaaatacgtattggaatgtggatcaaaaggagcttcggtcgttgtcactactcgtttgaaaaaggttgcatccatcatgggaacaacactgatgctggagctgagtagtttatcagatgatgattgttggttattattctgataggaatttcctatcattttggtacaaacagaagcaaaataaaagaaaatagagccaaacagtagcaacaataggaaatagctagtatattgatattagagtg

SEQ ID NO: 109392 - DNA, 2772 bp, Cannabis sativa
  modified_base (2711)..(2718): a, c, t, g, unknown or other
tgatagtttaaccagatgagcatttttattaattccgaagataaacttaagataaataataattttttttttaactactattaaaaagtataataataatttttatttttatttaagtcactattatgcttttaaatttcaataattattactacattaaatattattaattttaaaattatgatattaaaaaaactacaaactaaaataaaattaccatatataggtaacatctacatagtatatatataggttattaatatttcacattattaattttggaaatttcacaaatgcatatgttagaagaaaatcttcatgtatgaacatttttgtctttgaatggtagcgtggaattaactctactagtcagcaacagtaacgaatataacttatatgtaaaacccacagaaaaaagagtaaacctccaaaaccaatcttcttcttatcttccattgaaggattctccgaatcctcattcagattaggtaataataacactatgatcatatcaaactcaattgaagacgatgagaagtggctcgccgaaggcatcgccggcattcaacaccatgctttttacttacatcgcgctttggtaacttcctccttcccttttcactccaattttcctgttcaattcttttcactcgaaaccctaattcttcatactcgtatgtatttcaattttctttaggatgacaataatcttagggaagcactcaagtactcggctcagatgctttcggagctgcgaacttccaagctttcgcctcaccagtactacgaactctgtaaagttttccctaaaaatcttggattgtcaattgccctgactttggcaatcaatcaattcatttgcttacattgttttttgttttcgtatttttttataaaaataaaaaatcagatatgcgagcatttgacgaattgaaatcgctggagttgtttttcaaggatgaaagccggcatggtgtctccattgttgatctttatgaactggttcagcacgcgggaaacacattaccgagattgtaagttctcgttgcagttatatagtttctaattgcttattaacttactcagataattgttttcaatttcattatgatgcccctgcttctttctttggttaccaggtatcttctatgtacggtggggtctgtgtgcatcaaatctaaggaagtgcccgctaaggacgtgctcaaagatcttgtggaaatgtgccgtggtgttcaacacccaatacgcgggctctttctgagaagctatctttctcaagtcagtagagataagttgcctgatattggttccgagtacgaagggtatggtgtttactgggcttttagagttgattttaatgtttactttgctattcctgtggtgttgtgctaataattacaatactaaaatgttaatgtttaagaaaaccaggaaaaaataatatatttggttgaagatatggtagactattttttcaactgattttcaaatcgtctctacttttctctctgcagtggtgctgatactgtcatggatgctgtggattttgtgttacagaatttcacagagatgaacaagctttgggttcgaatgcagcatcaggtttgttaacatctgttagaataactgtgtcgtgtttttaaatgcatggcaccagagtacttgcatgccatgggaataaaaatgaaccacaagggcatgatttttggccatgcaggtgttatggtgcttgtgaatcattcatactctttggcgatcctgagttgaggccttggactttctggtctgcagggacctcaaaaagagaagctggaaaaggaaagacgggagcttcgtgaccttgtaagttgtggtgttgtaaatctgaatcattggctgatgaaaaagtccagcaccttttgacagaaaactacgccattctgaattgtcttaataggtggggaaaaatctccacgttcttagtcagatagagggtgtcgaccttgaaatgtacaaggagactgtccttcccagggtcttggagcaggtattgtgaattagctcattttgaagacttacaatttgtatctatctaattaactcgtctatttttttatgagcttttgcatattcattccaattgtattacacaggttgtcaattgtaaagatgatctggctcaatattacttgatggaatgcataattcaggtgtttcctgatgactaccacttgcagactctggacacactgtttagtgcttgtccccagcttcaggtaattacatcatttatgctgagtatcatttcatctttaatgatcttctctcagaaagatttcctaatcatagtgagattctaaatgtttctattttggaagcaagatatgcgtgttgtgttcatatttatggaattttttgcgctatctgagtaagttgataattatgatatctcttacgaagaattttattgtttgttttttgtattgaaataatatcattttttgtgaagatttcctcattagtttgaccatctctttctcaacaataaatttattggtgtggttaagccgacagtctttaacctcatgattgtctttgaatctgtagccaacagttgataccaagacaattttatctcagttaatggggagattatcaaattacgctgcatcaaatgtagatgtaagttatataatttttctttttcttcttttttttatatatatatnnnnnnnnaacacttcttaatgggtattgcccataaatggttactaaacaaatttaactata

SEQ ID NO: 109393 - DNA, 520 bp, Cannabis sativa
tacatgacctatgctgtaggtatcatagggattaggtgagagtaatcttcctccttccttgattgatgtgattcttcataatggagccgtcactagcccctttaattatcgtttaattatcgtaaatgaggcttacactgtctgacatgtcctcttatgggcgttccaagacgttttccccatgctgcattaaatgtgaggtgacaattcgaacaggttctccttctctcggagatgctttgttgtatttctagctcctagagaggaaggacatgctttatgtacttctccaggggctcactcactgaagtacacttatccgtgtatgtatgactcaaccagttcttgggtgaggtgtccttttgatctacgtgtcatacgcagccgcaaccacgtattttgggaaaaatctaaggcaacatttacccccaagtctcatttagtaataggtaaatgagacttgtatgcggcctccgatctctaataaatgtagtggcacgtgtctgttggaaattatttt

SEQ ID NO: 109394 - DNA, 515 bp, Cannabis sativa
aggtagaattgagagtcttgtgtctgatgacatttagaatctcttgacttcacagattttaatgcctatgtagattgcatcaagggaaaatagaacaaaactaagagattagatgccaatagagcttcagaagtcttagaatttattcatacagatatttgtgggccatttcctacgacatcttagaatggtcaataatattctatatcattcatagacgattactcacgttatgggtacctatatcttattcatgaaaaatctcaatctatggacatgttcaaagcttacaaagctgaagttaagaatcaactcaacaaaaggattaagaatgtcaaatctgatcgtggtggtgagtactatcgtagatatgatggctcaggtgaacaatgtccaagactatttactgaattcctagaagaatgtggtattgttacaaagtacaccatgccaagatcacctagcatgaatggtgttgctgaaagatgaaataggtgttgggattttatgcccta

SEQ ID NO: 109395 - DNA, 1440 bp, Cannabis sativa
ttgaaaaactttttctttaaaaaggaaaaatcaaaaatagcagttgtaagtgagatctactcataaaacaacataaagctatatgcgagatgaatatttaacggctcgcattgttctgacatgtattataaacgaggtataagaatgccttgaaaaataatacttaagctaaaagatgaatagaagatcaaactattcatatgagcaatcaaaagatattcaaaatagttcctaaggtgaattatttaaaatattttaagtttgctctaaagaaatatatttatatataatagattaatactgctcgcgtaacagggcagattaaaactgctcgcgtataacagggcagattaaaactgctcgcgtataacagggcagattaaaactactcgcatataacaagacagactaataactgctcgcaaaagacatggtaggttaataactacttgtatatctcaaagaaaatgagattagagttgcattcaactcaaagtatcttaagctagatcgagaaagaaatgtttaaattgtgaaataagatgcaatagacaaacattttaaaacttgaaaagcaagatatgaggcataaagagtaaataaataaatgaactatgttggtcgtccaacatagcaaaagtatcttacaaataccacaagggccaaatattgtctcggccaaagggccaattttctaaatttgaaaaaatatatatgataaaataaaaaccaagtctacgtggctggatcttcttcttcttctttggaatccactacttcgtctttttaggtctgcttgcaataagccaacatctccgcagcaccatcattcaggaagcttaagtccatattaggattggctagccaggctctgtagataaagcattttgcaacgttgttgcacctctccttggcatcagcctcaggaccctcaagctttttattggcttcattgagctcttcctaaattttttggcggggcttgcgatgatctttggcttccttttgagcactttcaacctcagccttgtggttcctctttagctcctcggcatccttggtcaagtgagtgttctcttttttggcattagtccactgcttcgcaacaaccacacattgttcgatggatttgcgaagctcagattctaactattggatttgctgaaggccccattgttgtgccacgtgagacagtaaagatgcatgtaataaaagtaaatttagaagaagtataagaaagaacattttataaaataagaaaatgaagaaaggaactaaccaagagactaaagttcaggctcctctcaaacaactcctcaaagttgtcgctgttcatcaagtcccaatcaccagactgaaaagattgaaaatgatgccaacttgaggtagcatactgtgagcagatctacgaaccagtaattcctacttctctaggcaagg

SEQ ID NO: 109396 - DNA, 685 bp, Cannabis sativa
  modified_base (60)..(68): a, c, t, g, unknown or other
tctgggtcaccaactggtcgaccggttgccacaggtcccccagaaccgaaattccggttnnnnnnnnngaacccgaaaaattctccccttgatctcaaaaccaacccaaacacgaacaaactctccagggtacctaatatgggtattcccaatacattccagccagtatttcacagaacaaatcattaaaactcaagttgccattaaagctcaaagctttgaaatctaagctcaaagttgcataaaaccaacaacacccattaaaaccagctattaggagttaaaatcaacccaaaagaaccctaaaattcgaaccctaaacctatcttaacctaacagccaccataattcagaatcatgcttgaaaccaaagtaaactcaactaaaaacttataactcaaaatgtaaaggtttctagggtttacctcacttgctacaaccttgaatccttgttaaattctagagaaatggaagagaaaaactgaaccttgcccttgcttagtcccagacgaaagaaagagagagaaagttcaaaagataagtcttttttccttattttccttcttttcttgatttttcttcaaatggaaaaaggatttttcaactaattcatgctgaatattcaatttctaggggtcacatacttagggcagccacctaacactcaactaaaccaaaagacaaa

SEQ ID NO: 109397 - DNA, 532 bp, Cannabis sativa
gtttttggctcaaccacactcttttttatattaaaatgtcagaattttcaggcgaagttcaccaaatctaaaagaaaaattttagttttaaatacatggcataaattaaaaagacgagaatcatagaaaatatcatatattgcccataattgaggttcaactcccctgcattccaagatcaagaatggaagcttgggcttcaatgctttcaaatcctggtagtttttctctataaatgctctgccaaataaaacagcacaaatcatttctctaagtcattaacaaaagtctttattttgagttaattgtgtgttattattttgttaatcttattttttcaatataaatataaccggtttcattattttatatttttgagttctttgtctgttattatttgtttttatttatttattatggaaccggttctattaatatttatgcctctgtatttttagaattgatctccaccttttcataagaaaaacattataaacagttttatgaggtattatgtgttattcatttttac

SEQ ID NO: 109398 - DNA, 882 bp, Cannabis sativa
  modified_base (326)..(333): a, c, t, g, unknown or other
agttaaaattctgcatactccacgagtcaatcatattcagatttctgagtatttttttagggcctctttgttttttcgtcccttttttgagattttttgctactatttatagttgcagagtggcagttaattacaaagctgaccaaaatatgattacagtcattatccctaaaatcgtgggatctgaatacatatcacaaaatgtaaatgcggtgtatgattttgaaaatcatatagctgtgattttccgcttttactgggtcaagaatatcgtgtattaaacacgtctttaattgttaacctggagatgtctcgacagaaacttnnnnnnnntgatcccaatggcgagctggaactattcttctttccgaggtcgacaagatatgtcttacgtcgatcgcgggtatacagaaattttctgacttgccagggttatgagcctcgctcttgttagctacgaggaaaccataggaagttttctcatagcgagatggtcatcttgcattcttgttcttcgagccaatccaatttttacacttagtttgcttattataagctaaggtatgtgtttcttttctttggtgcctcgttattctcctttggcgacatatggtttctcgttaatactctaagtacaagttcgtacattgatttctcgcctaagactttacagtcagcaagttacaaatatactctgatacttacgcaattaatgagttaaccgaattttgagtataacattatgacttatgtattcttaatatatatatatatatatgagttaatattgtgttaaatttttttaaatattcacaaaattattatatatcacactaatgaaatgttgttataagttattcatatatgtggcattgtcacact

SEQ ID NO: 109399 - DNA, 2114 bp, Cannabis sativa
  modified_base (27)..(62): a, c, t, g, unknown or other
tcgtttttagaaagttcatatttaggnnnnnnnnnnnnnnnnnnnnnnnnnnnnnnnnnnnnctggtaaaataaatcccaacacaaatgtcaactagcaacccattgaatgtttgaaagccttcattcaaagaatgatggaggcagcaactaaaataaggtcagcgatgacttgaagctaatggctctccaatcaggatgggctataggttccttgctatagggggagatgcaaaggaataaggctgaaacattgagcgagtttatgttcaaagctcaaagcataactaacctggaagatgattatattcaagcattcagagttcctccagcaccgacacctacaacagccactctaagttttgcctctcagactccttccctagccttatcgcttccccaatctcagttctctccaaatgtctatggacctaccgcatctagccttgtccctacgcagacccatttctctaggtacggggcagcacatactggatgcagtgtagttcccagacaatctaaatctaaagtctcgaattcaagtgttgggcattcacaaggaaaagggggaggagagagccacaatcaaaatgattcattgaagaaacccaggaaagactatgatccaaaatataccgaatatacaagctttatagacactcaggagaaggtctacaaagagacatgcaatatggtccattatcgaaagcccctacgcatgtcaaatggcagaaggaataggcgagaccaaagcaaccaatttaagtatcacaacgaaaagggtcacactacgaatgcgtgtgagtacctaaaagatgagattgagctgttggtacaatctgcacacttggagtaatgggtccgcattccaattatttatctcagacagggggtagtcaaaagacacatgatgcttcccaaatagcagggcaccataactccttcgcagggggttctgtgccctcaagctcagggaacatctttacctactcttcctacctactccaccaacttcgattggagtaacaatgttggctcctagaccaggaaccccatatccttgtgagatagctccaccacctatggatgggcacgttgcaactatatttggtggaccccatctcgttcgaagtacccgtaatgcaccaaagatatacttaaaggaagtggagaaggggaagtgtgtgtgttggtgtagtctcccgcgaagcgtctgaggatgatgaatcttccgataacattcagcaaagatgatggtaaaaatgtttgtttccctcgtaacaatccattggagatcgatgcacaaattgccaacaaagagagtttgcatgatcctggttgacaatggaagttctgttaatatcttgtttaagttttcattccaagcaattagactcactaaggcagacttaacaccatgccatatgcaattacacggctttaatggcaatgccttgatgcccctgggaaaaataaaaatgttaatcaccctcaagggagacaacgaggatagtgcatttaagcactcacccttggtgatagttgactgtcccacaacttacaatgccatattgggccgactaactttggtggactttcgtgccgtgacctccatctaacacctatgtttgaagttaccatgtgataatagatgcttcgacaccattaaggggaatcaacaaagcgcaagaaattattataatgttttgacccaatcggtgtacatggcagttagcatctgataccatctttttttctttaaacatccatgaggatgcaactccggtccgtcaaaaagaaggcctccagatcttgttagagctgatgcagtcaaaatggaagctgataagctaattgccaatgatctgaaaaataaaaaaaaatatttttcatccttagtattaagtttccaataaatattatgaaaattacttaatttaatttggtccaaaattaattaaacaattaattttcaactcaaatttaattttctataaatatatacgaccgaattcaaaatctaatgtattaaaaaaataacgcatttcaaaattcttcattaaaataaaataaaataaaacaggaaaaataattttaatttatgttagtctaaaa

SEQ ID NO: 109400 - DNA, 502 bp, Cannabis sativa
  modified_base (243)..(252): a, c, t, g, unknown or other
  modified_base (309)..(313): a, c, t, g, unknown or other
atttacgaattcagtctatatatagacacattcaaatttagttatgtgagtttttgataagaatatagtaaattacaatatatacattatcatatacgttacctcattaatttttttttaaaaaaatatgtatatatataatcacatttaaatgacacactaatgtagcaatagctatttttttttaaagattaaaatctcaaacttcatttcaaaaaaaaaaaaaaaaaatacattacctannnnnnnnnnaattaaacatacatgtattgcatttaacatcacttaattgaacctaattaaaaaaannnnnaaaactaattatacgtgcattacacgtaacatcaacttagtatatataaatatatatatatacatacagttaagcctctgcccaccttccctcggcgatacaataaataaaaataaatatttttttacatatatatttttgggaaaaaaacaaaaaaatacaaaaaaggaaaaaaaattacaaaaatac

SEQ ID NO: 109401 - DNA, 544 bp, Cannabis sativa
  modified_base (72)..(86): a, c, t, g, unknown or other
tactcgcacttgttctttacgtaaatttcttcttgttattcataatatcatataatttggtgttgcgaaatnnnnnnnnnnnnnnntggcgccgtctgtgggaattctgagaattaacatcctattcacttcaagaaaaataccatcatggctggaaatcaaacaaacggaggtgctaacaacgggtccatcaacatcggaatgatgaacgtaccgttatccggagctggaacaccgcctgtggacgtcgttaatggcggagtagggaggagcaacatgagacctctcaacctgttcccagaaacaactgaccctcaagtcggggacgcgtccacaccaccagcaaccatgcattttccccttgtcactccggcaatggtatctgagggaatcacccagcttactactgatcaatatactgcgattcaggaccaactgtgtgcattacaggccgaagtggatggacagaaccgggcccgacgcccccctcgagtccctactactcgcacggacaaccctcaggtaacaaattctagacgtcgta

SEQ ID NO: 109402 - DNA, 622 bp, Cannabis sativa
ttttttttttttttttttctcatgagtcaattatatatacattcatgcatatgcatgcaccccttgatgcacatgattctttttcacttgaaaaaaatataataataacaaaaaataaagggtaacatgatgtggggaatctgggaatagtgttgggttcatcatcatctgcatatataattgccacgttgttcaacccttaaaccccagcatttgctgtgcttctccttcaggttcaggatcaggacccctttttgggtacgtaaaggattgggatataaatcggtcattgtaaaaaaagattgccttcgagtttgtgcaccactcaaataaaaggcagaaaaaaaaataatatttattgtcaatataggcaaatgattttattaatttaacttttttttttgtgcattgtaaattgtaatatatgatagttaattaacttgctcataataagtgctggcttggcttacttgtattgtatgtctatgtgtaggtgcataatgcatggcaccatcggcccaaatcaattggaatcttgggctaaaaactttcattgagctttgtgtaagaaaaaagtgaaaattacatctatgggtttttaaaaatattttattaaatatga

SEQ ID NO: 109403 - DNA, 587 bp, Cannabis sativa
tttcgggttcgagtattcgggtttcgagtcttggaaatgtaccaccgaacccggtgtttgggtgtacgggtgtagtcaagttcgggtcagttattttcgggtcgggtgtaatcgggttcgggccctattgggctgagcccgaatgtttaatttatgggctgaaataaaatttaatttttaaaaataccatttttacatagtgagtgagaagcatttttacgggtgtagtcgggttcgggtcggttattttcgggttgggtgtaattgggttcgggccctattgggctgagcccaaatgtttaatttatgggctgaaataaaatttaatttttaaaattaccattttttacatagtgagtgagaagcattttattttttacatttgtataatatatatacaaccacacacagttacacagtacatatacacaactacacacaaagacatttacgtggtatgggatgcgacagagtcgactggcgaggcgatgccactgctatgggatgggactccgccggcgaagagaaccaatcaccgactcgccgtcgccggtcttggagaagaagaagctgttgggttttatgcc

SEQ ID NO: 109404 - DNA, 570 bp, Cannabis sativa
tatgttaagaagagtgaggatgttgccggtctgtacaatgaagctcgagacaagtttatagcagcgcaagaagccttggccatcaaccctctgtgtcctacagcttttactactgaaaaggtgaatcatgctcactacattgctgcccgaaaacagtatttcagttatttgcatcagcactcgaaagcttgttggttaaagcttggagatgaaaacaccagttacttccatgctatcatgaaaaagaggagagttgagaataaagtgtgctcgtttactgtcaatggagttgttgttgatgagtatgacaaagtggttgagcatttcttaaaccactttcgcaacttcatggggaggcaaagctcggcttctagacgaatggatgaggaatgcctcgagtttgggcaaaagcttactctcgaacatcaagtgagtctaattcgtcctttcagcaaaaaggatgtgaaagaagctttgtttgggattcactcgaccaaaagtccggggccagatgggtttggttcgggttttttcagagagctttggaatgatattggggatgacttctct

SEQ ID NO: 109405 - DNA, 1165 bp, Cannabis sativa
attcctcccaaccaaacaccacttaagaatttcggttatgggtatggtcgtatcgtatatggggtatgaattgattatgaacttttcatcctactctaccaaacaactacttgctaaataatttctaattactcgtacataggaccactttatttaactcctctcctttattaaagccttgctctctattcatatatgtagttttatatttatattctcattttaggaatcgtatttacaagtttacaatttttgagaaaaccatttaagaattgtctgagttcataacttaaaaatcgtttttagtttttaaaaataaaaaataatttttaaaaactaataggggtcgtttagctaaattttttaaaaattgagttttaaaaaattagaaaatagaaaacatcaaatttagttttcaaatttcaatttttttttctaacatattatattttacattttttctcacatacctagaccctagactcgaaccatggaacccggaccttagatcctgaaccctagatcttggactcgaatcccttgaacctggacttggaccttgaaccctagacatggaccccggacccagacctagacccagacccagacctggaccctggacatcagacatcgaccatgcaccccaactagaatcggactaggacacggaccccgaaccctgaccccgaaactggactcggaccctggcccaggttcgggtctaggtttgggtttggggtctggggtttggatacggattcgattttgggtcgggtccagatctgtgttcgggtttgggtaaagagttcggttcggggttagatgggtttatatcatggtatggtgtaaaatattaattttttttagtaaataaaaatcaaaaaatagttttaaaacacttgtcaaacaccattaaatttttaaaatactaaaaaattattttatgttctcaattttaaaaacataattgttatacttaaaatgttttaattatctaaaaattaccacgaaacataagatttcatttttggtgtgaaatttatcatgtacccctttcatctttttattggaagctcaaaaggaagcatgagagtatgctatgtgttacgtgcgtgctatgatggcacgttacaagctaagtgatgcccacaagttggccaagtgg

SEQ ID NO: 109406 - DNA, 510 bp, Cannabis sativa
  modified_base (288)..(293): a, c, t, g, unknown or other
cttcttcttgttcattgattctagtttgcatttctgcaaacctattttcccaattctaggaatcctgagcagcttgggcagcctgggcaacctgtgtcgggttagcatcattccgaccacgtgccatggccctgggatctcgacctcagccctgaatatttgggggaatttgagcaccttgaccttcatttgatccaaccgagttgccctggctcctggtgtttcgcctggcgtccatactaatctaaatagcctgtgtaaccaagagctagtctggtcagatcatgnnnnnngagaacttactaatgccgcttatttggaaactaaaaacatgcgcctattctactatcaggctaataacatgcttcctaacaggcttttcttagatcatattataaaagaaaactactaaagcaataaaagcttactaaactgtggaacgagctgactgctgataatgattgtacacgtcgtgacgatctgcggaagacaacatggcggctctaatac

SEQ ID NO: 109407 - DNA, 638 bp, Cannabis sativa
ttaatttttagtgatacgatatatcaaatactattgtatatatttaatgatctaatatatttattcatttttgttacaatataatactatgtcatactaaaaaatatatataacctaatttaattattatatatttttttaaaaaaattatatgtagtaaatgtatttttataatttttattagtaaatttattatatttggccttttattcaattttttttttctttaaaaatgacatttactagtttagtttttacatttagagctattttgcatctcaccctttttacttatgggttgttgaatatcttatttcaaccaataaaaaaaaaattaatttttttcattcttttacgtcaattccctatataacactaagtcgaaagactacttttataatttttattatgaaaagtaactaaacggttcgagcttgggttatcaaaaaaattgagcaaattagactctatatatttttttcatattattcttttttatttttaccctctttttctaaagactatacatatttttcctctgtcacttcaagatactatccatgcgactcccttatgtcaaggtattttgggtacaatatatataaaaaagaggtatatatgtttcaattaaacataaa

SEQ ID NO: 109408 - DNA, 570 bp, Cannabis sativa
  modified_base (411)..(414): a, c, t, g, unknown or other
tttttataagtatggattatcatttatgacatactctataattagaagttaaataatagaattttttttttgaatggaaaccgatacaggttaaaataacaaaggtaacaaagttacgcaaccagaggaggattttcttctatctataatagttcattgtctatcctaagggcatgcagagatactccaggagaacaagacaataaaatcataatatcagaaaaaaaaacctcaaaactgagagttgtcacttccgatccactagtagaacacctacaaaataaacagaaacaaaattaatgcataataaatatttaataaaatataaaatttcccataaaaataaaataaaataaaatacgaaattttatataaatagttgcatagaattctctgatgtaaatactagannnnatctattctcatctctattgttgacggtgactatactacatttgatgtgttattattagaccaagctggccttacaatatttaaattagccatataataactttacaaaaccaaagctagccaggttagccatacaaaactaaaactagtcatact

SEQ ID NO: 109409 - DNA, 3144 bp, Cannabis sativa
aaaaaaaaacttagaagttggaatccttcaaggaaactaccaaaacaagcagaattctattgagatagtattaactcaaacagttgctattattaggtagaagcttctattattaattagaggttgttagcttgtatttttcataacaacaataaaaactataaaaaaagaaaaaaaaaatcaagggagatctctttgagaaaataaaaaaataaagagaaaaaaatgattgaacgagctcgttggttacatggtcatgctatcatcgttacaactaacacaaaactatattattaattaaaataatgatgagagaaaaatggtggcttcattgtaatgaacgacacctttaaatagtaaaatgtatcaaattaaaacccttactatatattaatcctactttgtggtattgaagtggtcaacttctacggtagagggtagtctaattcgatggaataagttccatgccactatccgactacatcattcctccaaatcccatgcttattatatttttggtgtcgatgaagtcatttattgcatttatagtaccgaatgcattgatacgtatttcatcacgctcctggccaaaatatgagtatttattaagtaatattctaatctcattacatcacattaaacgtttctatacatatgagcatatgagttgagcccctttcaaaactttttttatatataaaatatcacacacaactcacaaaacaaaagtgagtaactaatgtggtatgaatttgtattaattattgttatgatttttagatgggtgacatgtacaattttaaagcccagtatcagctgagagaggccaaaacctcgacacaataattaagttgaatcaaagctccagtccaaaaatgagctacaatctgctaagaccgtcaatgtcagattgtcatgattcacaaggagatgtttgggtcaaaaacaaagagtctctcaagacgcatctagagccttcgaggaagtaatccgcaagcgagtaaccgaagagtcacactaatggattccgaaccttaccaactcggaacccaggagacacgggccccactatgttggagtttgtcccctgttttagcccagcggactgcgtgctctactaaaagaaggtcacatttttgtccaacaccgtatgctctgacattctcggtatagacacaacatcacatgacacctggaaccttcaaatggtccttgcttgtactgacaatcttcaccttttgaattgggcctcactcaattggcccaaaagtcaataaataatggattttaccctatcagagggtctagttgatacccttaaatcctaccgagtccgggtatggccatactcggttcatccctattggttactgatattttttggaaaccaataatttaaatatatgagccaaagaaatataattaaaaggaaaataaaataagaacactcaaggtttttacgtggttggggcattaacaagtcttagtccacaaatcaatattattatcatagtataggaaagcctaagggactacaataaagtatgagcactctatctttgcatgagaaaatgggccaccaattttcaaccctttgcatatagggtttgttgaatatttatagtgtttagaggtcatattagttaccattttctctctaatggggagtttacaaataatacattgattttgggcttatttggtgaagcctgactcatgaggcactggcgtggagaccacatcacaatgctagatgtcaaaacagtgtcctatcttcgtgggtaattaatgacataataattacttgatttctaattactctatttccttatttagtaagatattatcctttgttcgagattttggggagacaatccctgatcttatgtgatttagtagaaaataggaatctatactggactttcatgtacacactgagagcttcttccggttatgtggttgtatgccttccagatattaaccatgctggatggaaccacgcttggacgagttatttgttatttacctagaaggaggtttggtttatgggtttggccaaatgatgtcaattggtcctaaagtatttgaactgtatttattactttgactccacgagtcccttgctagaaacacagataacatttttcctcaagcctctaaaacgttgtgagttgcgaaggcttacttcaatctgcatggatggacatgtggaggctaaaggtgaaatctttacaattttaaataatttttgtgtatggaatacaactttccattttttgagttaaagcgatacgtggcatcacttcattggtttgtggagcaaatgttttccaaggaggtacttggagcaaaatcattaatctggcagctatttacttaggtgtgaatctctaggggaatataatcatgctgatttcctcaattccaaatatggcatttaatgcttgactggtgtggcattttagatcattagatatgtattgtttttccttggataaagatctaaacccttgatctggatatcacgtggattgcttctttaacgtataaatatctcaaaagaccaccatttaccacttctattaaaatttccaaaattttcaagttaaaccagagttttagagaacaaaaccaagtgaagatttcttgagtgaatgaatgaactctttgacgaattcatccgactcatttttcaaattagaacgagataataccaagacactccacctcttgcgatcacttgtgtatccctgaggcagctgctaacactagatttaaattctaaaaccaattctttgattgaccacgcctatgctattcaagaaaggcttgatcattttgattgtccatctttgtcggttagtttgacatcgtcattcagcattagtgtttgctctctgaggtcacacttctttgcaagtccagaatcttcacccagttcttcaacaattaatttttctctctctaacttcttaagttttgatcaatatttgaaattagtatcttattttgaatctgtatatgctttatttgtcatttgatgagtagtaattaggtttgtgactaggttctggtagaggtagcatattcttggtactctattaaataggttttgcatctagtgaatgttggaaattattttac

SEQ ID NO: 109410 - DNA, 555 bp, Cannabis sativa
  modified_base (421)..(441): a, c, t, g, unknown or other
ttgattggattcttcacagtcttacatactatgattgaggactcacttgatatgtgtgggcatgcactcaatcactaatggttgaatttgttttgtgaagaataggccatggtaatttttgaattcaagagaagaaaggaagaggtctcatcaacctagaaagaaaactaggtttttagcttttgaggcattagttggataatgagaccatagctatccttttatactaatttccatagggttagggttgaattattttggaataaaaatttgataaaaatagagtaaaataggcacatatggccggccacttaatgggccccacacaagtttggtttttgccatttttctcaactactttatctatttttcacaaataccactttttgcaacttcaaccatataaatgccaaaactattnnnnnnnnnnnnnnnnnnnnnatcaaataaaattatcatttataatattattaattagactccacaaagtcttttaattaataaattaaccctaaaacaccatttattcacaatcaagccataacatagtgaaaa

SEQ ID NO: 109411 - DNA, 1413 bp, Cannabis sativa
atttagaagtaactgatactatatgtttctgtctagacccaatgatcaagaatctagaccttatatgtggcctgtttaagaaaataacaggctttgtaagggcgaaattagagaaaaattacatttttacaaacattgggtacttatgccgctaaaaataaatattgggattattatgccacttacaaacttaaaattttgggtacttatgtcgctattttagaacatcgtctttggctaccaaaaaatgccattgtgtgtggctatggtaggatctttgaccatttttaaatggtattatgttatatatcgttggactctatttgaactacaagaaatataagttttagctactaaaaaattggtagcaaataatctatatttggtagctaatactttttttgctaccaaattttttggtagtaaattagtaattgtatcatagtcgctgaaagtttttgctaccaaatatttggtaattgatgctattttcttagctactagctttttggtagcaaatcatctttattctattagcaatattattagcttttaatatccaataaaattattttgctaccaaaaattagtagcaaaactaataaattataatgttgaataaaactcttgtgacaacagttgcatctttttccatagctacactcttcagagcttttctcaaagaaggtacagtattttgttcctgtaatatattcgaaaattaattaattaatcatagaacaaacaaagtggaaactcgagaaaaaaattaagaacccctagcaattattttaaatatttactaatcatataaagattatatcctacttaagaaagtaaaatacttcacacacaaataccccatgaaataattttttttttttctgtattgtttacaagttacaactgagtttatgaattatgcatctcatttggagactactcattcaggcaacaacccagaatattagaaagagacaacaaactctaactaattcctgatgatctatacaataattgtaaattcacaacaatgtaaatctaaaaggctatagaaaaaatctaagaaagcagagaaagcagacacataataattattgtagaatcaataaaagcttaagactttctaataatctaaataagcaatcttgcatacctttaccaagtcaacatcattagccatggaagctgtatgcagtgcagttcgcctatgcttggtatattttattttttttgaaactatagtgtttctaaatacatgaaaaagaaacaattgacgagtgttaatttccatcgacacaatgaagagagacgaaccaaaaagctaattcctcaaccacaaagttgcgtccaagatctggtgatgaagatgatactgaaatcccttcagtctgaactcaacatcttcaagct

SEQ ID NO: 109412 - DNA, 500 bp, Cannabis sativa
  modified_base (460)..(475): a, c, t, g, unknown or other
tgaggggaggacggtgatatgtcagaatctgctgaaaccgagtccgagtgatgtttggggcccaattttggtgattgctttgtggtccctcctattcaaccacttgaagcctggctgagagaagtaaaaataccccgacttgccttgcttggggtagacttcaggtcgaagaaccaagcgacctcgcggggagaaggagcatcccatccttgggaagcgtagaggacaaagagaccggacaaatacttaattcccttgggagtaatctgagccgggcagaggccgaagaagtccaccacatcccggaagtacttgtgcaagggcatcagcgccccttgctggccgtgagcccccgaccaggcacacatccccttgtcagggtttgtggcacgattgtcgtgggcgggaatgtagtagtccatctcgcctagttatccgtcctggtcgagagtgcggaggnnnnnnnnnnnnnnnntggacggaggactcacccacctggc

SEQ ID NO: 109413 - DNA, 583 bp, Cannabis sativa
ggtatttttgacaagtgttgctcaagctttgttatatttgtgataatttaattatttggtgatagttcaaaccgtaaaagtgcaccgcactgcaatatttttttgcagtgcggtttttgcgattttttagtttcgcggtgcgggtgcagtttgggaatttggaaaaactgcatgtgcgggttggtttgaaaaaatagttaaaaactacaccactcacaccgtaaacacccctactaaaaagcatataatcataaaataataattaaatcctcaattatctactaagtgctatgtttaaaatgttgtcattaaatttttattgcagttgttactatcaattccgttaagggttgatttggttaaagaaaataccacatgtcaatatattagtagtccaactcattttttattttttaaaaatcatttaataatcttaaaataaataacaatagaaattgaaatatcaagaaaaaaaaaatagtagtaatatactttaggagaattacttcatatactgtttttttaacttttttttttctttttcaaatttacggtttgggtttctaaagtggttgtagcgcta

SEQ ID NO: 109414 - DNA, 622 bp, Cannabis sativa
tcaaatggcaaagtttttgggtattgtgaagagagattagtaagatttggaaaaaaggaccaagaagagagagtaggattatgatggggtattttagagtttagatagaaatataattattagagagagtgttaaaatgttaagtcctattttaattttgttattaatttatgcattaataataggttaatgaggattttttttctcttgaattttgacatataccaaattatctttgaatttaacagttttaaaagttcaggggacatgctttagtacatgtcgaagtttgagggatatgatttggtagatatcaaattctgaaaagtatgatttaaatataaacaatcatcgaattagtaaaattaaataaaaaattttaaatctaataatcttaatagtttcaagaaaagttttaattaacagccatttttttttcaataagataatttaagacatgtcaaaatcttaattaatatggaattttcatattaaaaaaaaaaaaaaaaagaggttgtgctgtggtactttcctcagtagaatagaatgattataatgttagactttttatttggggttacattaacttttattggttttattaaaacttgggttgattgga

SEQ ID NO: 109415 - DNA, 694 bp, Cannabis sativa
cttttattggaatatttgataaaatagacaaaaataatacttgtggtattttcaaaattgtgtctaattgtttattcattaaattcaaaaatatagtttcttttttttgtgtgaaaagccttttcaaaattagatcctattcctttttgacttattgtgaataaatatgagtgttccttttatagaatatatgatttcatcctttactttttaaggaaattcttattcatattttatttattttgttctgatttcttgaccaagaaaccgtgtacatctgtggatattaatgttatgaaagctgccctatttgtttatggaaactttgctgaaaaactgtccaggttcactgtatctgtttgaacagattgactgtctgtttaaatagatttttactttcctcttcgggaagatttttatttattgacctagtggcttcttggtttcttgaccacgacctagagggtttctaaattacttttcaaagttagagagtgttttctttgttgtgtgaagaacttgagtccaacaagttcttaatattttattattgtgttactctgtattgttccttgttgaaattgtacagtttgaacactttggatattgttaatcaagcttcgggagaagtcttgttcatgattcaccttttgggaggaaaaatgcatgtgagtcactattcgggaggaagatt

SEQ ID NO: 109416 - DNA, 920 bp, Cannabis sativa
gcttcaaccatgataattcttttttgaaagccatggcttcagcaatctctaaaagaacttgtccaatccgtagtccagtaatcccatccactacccgacccttgtgatcccaaacaaccccaccaaaaccatgccttccctcctcgtcaaacaatgcagcatcaatattcaccttgagtttgtcataacctcgtttagaccatagcccagccccatccgaaagataccaagtatcaaacgcaggaaataaacttttttcttgagcttttctcactgatcaagagtgatacgagccaaattgacaacgaactctgttggaacttattttactaggatctaaatttactaacatgtatgtttgattataatttataatctaacatcctaaatatgaatttcctaaaataataaaataaacacataagagattaagaaatacttacattaatggtagcagaatataatgactcattctattcagatctctagcccttgattcatgtctatagtagagcattatcaagatccgaacctgatattcttctccttcaatttggttagacacaatttttctcactatattaggtattgctttgacatgagtgggcatactctcaattcaccataggcttcgaaatattttgaggaagaagaagagaaatttcaaaaaatagaggctctctttattttctaattgtttgacaaaaggagactagaatcatctaaaaataagagctatactattctatttatagggtgatactagggccaggtttagaatttaaatgaaattaaaaaaaaaaaaagataaaaataatggttttattgaccttaagtggccgaccatattgtgggcctcacaagttttaattttgccatttatttaactcatctttcttttcacaaatgccatattttaa

SEQ ID NO: 109417 - DNA, 508 bp, Cannabis sativa
tgatgtaaggtatgattgatataagtcatcaatggaggttacaagatatttaaaaaacaactgaaaagaaatgaaaaatcaaaggaaaaaatgaaaataacagagggaagtgattgatggttggttgaagagggatgggggagatgcacgtgtcatatgcatgggggagtgtgcatgtggtatatatgtaataaaataaagagaaaatgtaaaaatattgaggtaaccgtgtgtaagtatttatgtaataaaaattccattttgtatttttggtgtaaaaatttcttatatattttctaagccccttattaaaaaagtatatatctttataagaataattttatcttaataaaatatatgtactttataaatttatttatgtaaaattaataattttattataaattgtgatacatgtatatatggggctttttcatttttacacttcaaaacaattttttttttgcatttttacagaattctacgtagaaacccctattgcaactag

SEQ ID NO: 109418 - DNA, 650 bp, Cannabis sativa
tccccctaacctccttactccaatgcatttttggttgcggagggactaaaagtttatatccaagagaaagttgatacctggactgtgtgaactgttgaacattcaccaatgttttaatctgattcttggcctctaccacttttttccagtaccaactcccttgactgggggcattgtagccccaccaatcgtctccccgaatgtatacactatgtatccattgaacccacatgttatcttccttgttagcaatcgcccacacatatttaaacattgctgctctgttccattctgctacctttttgaaccagattcctccttcggacttagcttggcaaacaaactcccaagctattaaacccgaaccagccattgaatgttggcccttccatagaaacgctctacaaatagcttctatctcattcactatcttcttaggtaagatcattatctggctccaatatgagtgaatggtcatgagaattgaattcactaaaacttcccttcctgcaaaggagagattcctggtactacaagttttaattcgggatttcattttctcagcaagctctttgcaatctttgcttgaaattattttggcacacatcgacactcccaggtatctaaatggggcattgtgtctacagaaa

SEQ ID NO: 109419 - DNA, 668 bp, Cannabis sativa
acccccacattttctcacatttcactatcaagataatatcttgattttaaaatatagaagaccactttgtctttatagtttctctttaatttccttccatgatattatttttactaaattttgatatcaaaatatgtcaaaattttcgtatatgcacatagctaaaattgatttagaatttgaattctaaatcaaataaactaatcaacgatgtctcatcacattttgattaagtttgtggctcacccatacaattctatcataaagtgtatataaaatatcttttttgtgtatttttcttttgaaatgactttttaaggtcactttgaaaaaaaaaatactatttgacatttttagttttctcaacaaaacttaaatatcaaagttacattatcacttacaaataatgtgattatttttatccataattttaaggttatcccctcattgagattaaccaaaattataccgaagttaaccaaattcttatcaattttgctcactactttaataatattcaaaattgcttctctaatttgatcttttcataattttttaatccacatttatttactttatttgagtctaaaattgctcttctaatttatgactcattttacaagtttagatccactatgatcttaattgttcttgcttatgacaatgca

SEQ ID NO: 109420 - DNA, 854 bp, Cannabis sativa
  modified_base (816)..(819): a, c, t, g, unknown or other
tttgtcattgagaatctctctaacacttgatcaatgtatgttgtttgagagagcaagggatctgttcttcgggtttctgatgatctctggatgaataatttcgattttagattttattttttgatttgaacatgagctagacttcttgaggcttgaatggctatgaacccctatgtttggtatgcttaattttaagcatattttagcaactttgcctttgttcattcaagtaagcttgttgtttattaattgttattttttggccatgagtaacaatttactaagctagatctggttctagaaaggcttgatctagtagttacaacttggatgaagcaaattaattcctagtattaggtttttcttagtaaatggaataggaatattttatttgccttgcataacttgaaaattgatgtttaaatgttgttcttcaatctggttgatataggaatatattgatttaagtagtagaacttaattggtgagttttggaaaattttcaaaaacatagaagaatttatgttatctctgtgcaaaattgctaaagtaatgctatagcaagcctgtagcaattgggaaaaacttgactagtggggattagttattcaagccactttttaatatattacatttcttgtaagcaattttctagtaatagtagtgttattttaggcaggtttaattacaattattttaaaattgaatatttttccttttacaataagttgtaattagttggttttacatcatattttgtttacaatccctgtaaagatgatcttatttaccgctctacccttcaatgtattttannnntaaaacacttagttacctataaataatatttcagt

SEQ ID NO: 109421 - DNA, 2020 bp, Cannabis sativa
gtgtaagtataccttatcgctgattatcatgtgagtctatatccagtgatctgaaaaatcatgagaattaaacttttgaacatatagttatgattatattccactgtgctgacgacactataatcatgaacaaatatatatatacatatatttacatatgttctggacttaatagaatttatgcattaaacataatcatgaaataaatcatgtgaactatgtaacatagaatgcgatttctgatattttattaattagtaaatctaattattttaaaatgggttttatttagggtacaaaacccaacatcatcttcctcaataaatgaccaatgatcatgaatgggatccaaataccgatttcaagaaggaagacacttgtacttttccaatttgggtttagttgaatgacttagagctaaaatactggggtcaaaagtctttatttaagattattggtcaggttggagagccactaatggtagatgatggaactaagggaagaggtaaactcaggtttctgagagttcttattgaagtgtcaattcaataagaatttcctaacatcattcactttgaagacgagtttggctctaatgtttctatagctataacttacaaatggaaacccattatttgtagtcatttcaaaggaatgggacattttgctagtgactgtcgaaagaaagaaagaaagcagcaagaatgggtaatcaaaaaagacaataggaagacagaggagactgagacagggaaacaagttgttgatgagtttcagttagttacgaaagggtggaaggttaagaataaagctaaactgaatggtacggctatatctaattcttatcaagttttagatgattctaatacttcaacaagtggtattacatgagagatttagaatgaaggaaaccagaaccagctggtggccatgttggataatacaggagggggggagagcctcctctcttgaatggataaaatactaagctagaacgtctaagggatcaagagccataaaaaacaagctataatgagaaattttatagcaaaacagaatgttagcttagttggtcttctcaagacgagggttaaggctccgaagcttggagccttatatgtacatatgttttctaggtggtgtttcacttcaaatattgcgtggcataaaggaggaaggattatagtggcatggaatcctttaagattcaatttaagtattttcagttgttccagccaatatatacacttgttggttactactgttaataataagtataatttcttggctactttcgtttatgattttaatgatgaagagtgttggaaaagtttgtggaaagacctataggggattgctaaaggtgatccctagattgttcttggggacttcaatgatgttctgagtagggatgaaagaataggagttagagcaaggcatacttcctcttgtgcttttttgaattgtgtcaataatttccaacttgaagatgttaaatacagtgggaattactttacttggagcaacaagcatcaagcctctgataaaattatctctaaactcgatagggtactggccaatcctgcttggatagataattttcaaactgttgaagccttgtttcttaatgagggcatatttgataacacactggtagtcctcacagctcatccagattatccaagttgtaggaagccattcaaatatttcaagatgtgggctacacatcctctataccatcagcaagttagcaaggtatggcaaggtgaagttaaaggaacaaagatgtttcaaattatggctaagcttaaggctctcaaacctgtgttcaaggagcttaatcagcttcgtttttctgagattcatattatagaaactcaagctcaagagaagctcaatgaatgttagtctaaattgcaaaatgagccattgaatagagagctccagtagcaagaaattgaggccatgaatgtttatgctgatgtggacaagaactgctgctcctttttttttttttttt

SEQ ID NO: 109422 - DNA, 863 bp, Cannabis sativa
tattatgcataacttatcaagacagcaaaatttattaaggtttacattgcaaaaagtgaacaagagagtcaaaaccaactataaactcatcagtactaatgaaactaaagtaggacactaaggcaatgatgtctaattgagtaaatagaatttggtagctactgcagtataaaataagttgctgattcttttggggggtgttatgtagttacataccctgtatttttctctctcattattaggagctgagagtcttttcattataagttgtaaatcttgaggagagaaaatttcaagtttctcatctttaacacttaatgaaggaaaccacttctgagtgttccaccagtaggttagccatggtagatagtgagcaactcggagtgcccattgatcctctggtagttgtaggtaataggcctcagtggaaatgtttgtaggaaaagaaggccaccagtagttgaccacaggagcaatgagtcctgctcctgcaagcctgtcatcatcccaaacatctaactttaaacaatttaagaaagctgaattgaatttatgtatatatagattatcaccaatataaaacaggataacaattcattttttccaatattttcttaattgcaacagtgtatgcagtataacacccaaatcaaacttcagatatacttttccttctcttgactaagtcatgatagtcatatagtttccaatttccataatggatattaactaaagagcataactggcactgccatacctattgggaatatacttgaggcaaccccatatggcctgaccacccatggaaaatcccatcacataaaatttggatccaagtcccaactgatcagcaagattttcta

SEQ ID NO: 109423 - DNA, 558 bp, Cannabis sativa
ccggctaagcggtctttaaacatggaatatatcttttatttttcgaacaactggctgaccgagtagcttttaatctcgggtttaaatgctttgttatccttaatgaatttcattctttgttatgatcattgtgcaactgtgtttgttttgtttttttttttgtgcttgttatttgttttttaccaaatgctttgtacaagtataggtgccccccaagtgaccgagcagacttttgactattggtcagttgtttttcacaagttttctttttgtctgttcgggtctatggatacagcagaccttttgtatgcatttaatggtaaatttttaacttgctaataaacttgactcaatttgaatttgaataaacatctttattcatttcttggtcgggaatacactcgttaccgtagtaacttacctataagctattatttggatctggtccgatctttagcttaatataaacaaaaaaattgcataaaataaaaaatttactctcattaggggtcacccgacctgagtactttgtcatttcatttgaacctttgggcgtgg

SEQ ID NO: 109424 - DNA, 636 bp, Cannabis sativa
tggttttttaacttttttttctaatgtaactctatttagttataacctcccaattagaatataatttacttggtccctcttgaatagcggttctactgtataatagtttttaggaaacatcaatagtcaatcgcaacgcgacatgtcgagaatggtgcctaataacaaagctcttttttagataatgttaaaaatttatacattatctaaaagtataatattttattttatttcttttacacattatttttggcacttttacttctagaaacactccattgtatagtactctttaaaaatattataattatgatctcacacattattattttatatatatcttaatttttaactacaataaatttttagcttcaattttttattaaaaaaaaatgaatagcatcaatgtcacaacatagtattcatgcaaatttttagaaaaatattcttttctctccaatgatatatcatctcaatattttaccacataatatgtctacctcaccaagcattctttaaaattttactattcgaaatgctcttaaatgatgttatggcctttaatttggtcaccaaaccacttgagctagcctcaagtggccataaccacttggggctagctcaagtggccatagg

SEQ ID NO: 109425 - DNA, 2038 bp, Cannabis sativa
  modified_base (1984)..(1987): a, c, t, g, unknown or other
ttttaagagtgattattataaaaaattataagttgaatatgttatagttttttataagtataattattattttaaaaataaatttaattaaaatatttttttatgtaaatttgaaataaaaaatgtatataattaaagctaaattttaaatagaattaaaataaaaagataaaaaaaattaggtttggagtttgttagttgaacctacaattaataatattcaagattaattataaataaaaaaaatatattaattatagtgtagttttgaagagttaatttgagtcattggattaaattaagcgctataaattactatccctattgataggtaaaatactcaatccctactataatagcctccatatttaatcaatcttttttattgtccttatgttatttttacaatttaattgtatatatcttggtttatcttccattgtaataatatctctaacaccaacaacccacaacaactcataaaagattaaaaaaaattgacataactttaaaataaaaaaaaaaattaacaaaattaatatagatataccataatctttaagtaatttgcttctaattctaaaaaaaaaaattattaattttttttatgtgataaaagacaatataaataataaatagtgtaaaaaatatcatttctcaattttgaaataaaaatatttaatttaagaccatttgctataatttatcttcaaataaccacacttactctcattgcctcactcgatttgtctctctcctactccactaatatttgggatcctaactatctcgcatacgttgttgaccaccacaaagcctcctctttgtaaatgtcgttgtcaaccaccacacaaccatatcttcctccaaaaaaaaaaaatctattttttgagttcaaatgtaatgaatctatgacaacgaacactttagaataatgatttgaatttatttttgatatttaggttccaataaaattgattacattttgaagtcaataatggataagaaaaattgcaaatttgatttaatgatgtacttgtgatatttaacgatatatttgcaatgatgtcgtgaacaaattttgagcaaaaaagagtatttgcaatgcttaatgcatttgcgatagtatcatatattttgtttttgacgccataacaatgtcaaagaagatgcctaaaattgcacttacgatggttcgcgataatttgtgatgattttgattaaaattttggtgatatatatttcacttggatattagtttgacatgatttttgtctttctaaattgatatttaatgttcatgtttagaatgtgtagaatatcaaaattgatgagatgttcgctataaaaataatgtgtaattatgtaatatatatttaggctaattaaaatttttatctctgaactttaatatgtatcaaattatgcttttaaaaattttaaggtcgttaaaaatacctttaaattattgatattgttaaattaaagaatttttctccaattttagtaatgaaagttcaggggacttaatttggtacatgtcaaaaatgagcatgatttggtagatatcaaaatctatagagcatgatttagtatatggacaatcacagaattagtaaaattgaatgaaactggacaaatatccttaaatctaacaatctcaataatttaaaagaaatttttaatggctaaaaatattcagaggcataatttctaattagccatgtatttatattttatatatgtatataaaaaaaaaaaaaacaagcacaaatgtaatcgacagcttgagatttgtatttgagcatcataaataaatctattttttaaaaggagccttcacatataaatacatatatgtggaaaaaatctatatatgttagtaaaaaattaatatctccaaatcctaaaaattattattatagaatctagttattagattaaataaatgggaattatcccatatactatttttttaattttnnnnttcaaatttatggtttgggtttctaaagtggttgcagcgttagttgcaata

SEQ ID NO: 109426 - DNA, 523 bp, Cannabis sativa
aagatcacgaatttagacttcaaaataaagtttatttgatttgttctaataaaggcgaaaccaaaatcatcaattataaaaaagagaaagtcaagtttcccaaagttagataactttccataagagaatcccttgtcttacaagaagtttcctaaccaaaaagagaccagctgagaaagaatctttttttagaagataagagtaattagaggcacaaaataaatgtaataaaaataatttgaatgctcaataaaaatgcaaatttattaaaaaatattttaacaactaaattgccaaaaaaagacctaacaatttagagtaatttgtgttataaatacctaagtttactctgagtagcagataagtacttaagtcgtatttttggcagtaaaaatatatttcgtcactagtgtggaacttctataggtacctctctgttttcttccatataatgtaccaagtagaataccaaatggaagagacgatctgtactaatgggtatgactgttgggttttatgccct

SEQ ID NO: 109427 - DNA, 601 bp, Cannabis sativa
ttttttttttttgaaacggaatgttagaatagtttatatataaattatagggtgattctacaatgcacacttttaaaagagatgtattgatccaccctctacttgtttcggcatccagaaaaaaaaatttggtctaatttttttttttcatattcatgtacgttatatctatttaagatatcctacaaaattttgagaaattcgtaataatttacaaaatagaaaataatgttcaaacaatctattttacatgcgtataaaataaaatagtcacgcgtgcatgcaatttttggcgtgttaaactttttcgaatttcttaaaattttgcaagatgtcttaaatgactataatttacatgaccatgaaaaaaaatttgactaaaaattatttcagatactaaaatagataaagatgtatcgatatattcccttttaaagaggtgtattatagaatttccctaaattatatatacataaaaaaaaaatacatctaaaattaaattcatgtacctatatatattcatcaattttaaaaacaacttattcaaaatactaaatttaataagttgatcagtttctattaattaatacaattaataaaa

SEQ ID NO: 109428 - DNA, 594 bp, Cannabis sativa
cccacacctcttttaatcaatccattttttgccatttccaatagatgggattttattcgcttttcttctaccacgctagattgggacatttggaggaaaaaccttcggaagtaattcaacttcatcgatatcccaatcttttcgttgagacactagataaattgtatcaacataagccaacgcccaagtttccaacttataataattggagcacaaatcatatatttctattccagcttgttcatatgttgctaatgcatgcacgcaaggaagtttatcaatgtcaaaaacacgacaagagcattgtctttgacccaaatcaactatggcatcattgcctttaccaataacctcgtactcaaatcgattaagctgcttgacattcatttccaatgctttcttgaatcttttccgaatgatattatctgccagtagagttaaaggtgtacatgatgtattgatagatgccacaacattacgaccgttgttgaaccattcagagacttttgcttgcatagcctccaacaatgcaattatagaatactctcttggttctttcattactgcattaataaattcagcaccgttcgtagt

SEQ ID NO: 109429 - DNA, 708 bp, Cannabis sativa
aagtagcagtatacccccttatcggtcctgaagctagtgcattcttgatctgcaacgtgcatcttaatctggttatagccagagtaggcatccatgaaggccaataacttgaacccggaggtggcgtctacaatctggtcaatccggggtaaggggaagcaatcttttgggcaggccttgttgagatcggtgaagtctatacataccctccatgtcccatttggctttggcaccagtaccagattggccagccattcagggtaatacacctcttggattgagttgttggctagcagcttatccacttctttttctagggcatccgcttttattgggtcaaggggacaccgcttctgttgtactggtggcatatatggattgacgttcaagacgtgggtaatcacatgcagacttatgccgatcatgtctccttggcaccacccaaaaacatctatggccgcccttaatgcttcaatgattttctctctctccttcggctctaggctctttcctaggcggaggatcttggtaggatcgaggttgcatacttgcacttcctcgacgtcctccataggttctactattttttctgatcccacacgaggatcctgttgggttttatgccctaaataaaaccccatttcaatgtaatccaaattattcaatatcaataaagtaacagaagtatttttcattcatctgtgtatg

SEQ ID NO: 109430 - DNA, 751 bp, Cannabis sativa
  modified_base (691)..(725): a, c, t, g, unknown or other
cattaatattaaaatagtagtggatggattttagaatacgtaccaagggagttgcatccactttcagttcagtcagaaaaacaaaatccggagagcgcgatctgatcagggacttcagctcgctaactgtagaggtctgccccaaccctctacagttccaagcaatacctctcatggctcctgtggaggagataagacattctcctccacaggggtattagagtgaatagacaaacttgattcagagtcttcaattacaaatgaaccgaccagcgggttcttcataatgccattagtatagctcggtgaactagagctttcctcagatgggtcatcctcaaccaccttggattcaacatccggccgaatagggtcccaaggaaaatctcggactacatccgggtatttcctatccactttatgaggtctagagcacaatgatgcagaaccttcaaacttccttttcttagaaaaattagttctctcattagtttctgaagaaggcaagacaccaatgtcacctcccaatttttttatttcaaaaaatccatctttccaaagtgctttagatcataaagaaattgttcttgggcatcgaaaaacataatcaaggccctctcttcttcaacacaaggctcggcctcacctcctcccacaaggcccaatgaacttgttggaatttattttaccnnnnnnnnnnnnnnnnnnnnnnnnnnnnnnnnnnncaacctaaatatgaacttctaaaatg

SEQ ID NO: 109431 - DNA, 5206 bp, Cannabis sativa
  modified_base (5148)..(5150): a, c, t, g, unknown or other
aatatgaaaggaattttaatattttttatggtaatttaattaagtttttattttttatgaattttaaattcagatttttttttaatgttttatatggtgttttttaggaaaaaaaccatacttttagtttgattggttagataatgccatatttaatggcatttacttttatgtcatatttattaatcttaataatttttcccatatttttaaaaataaccctatccaaagcttagctgatctgtcagtgggccataagatacgtgggctgggcccacacggttgattgtaatttgtgggaccaataagctgtgtactactttctcttaactactcccgagaccaccggattttatcgtcggcctttcttaattaaatgatggcatttgtggtaataatagaccataatctagggctattatagtcaattcaatacacgctttataattttatataaactgtaaagtggccaatcgatctagctgtaacttcaatttggcaaatgggtggttttgaattgactataatacccttaaaaacttgattttctttcctttccttctttgttagaggattataccgaaatctttgctactttggggtaccaaaagtgtaaataaatttaattataaatgtgaaagttaattaaattattttaaaattgggaaaataacggaaaaaaaggttagacaaaacaaaagtgactgtacaatggaagcatgttaagtttgggccttgaagaaatgatgggcctcactttacatttctttacctttcactatcttttaaaaatatatttatacatattaatgtatctaatttagtttaatctaatctaatatagcttgatgtatactctttgtatcaatcccttctaagatactctttcactttctctcttaaaaaaaattaaaaaaaaaaaatccagtactgaaaggagtatgtgcttcatgaatgaactctcttttcttttaacaacttacttggtttgcactctttgtatctctcccttgtaattgacttttttccacgtttcaaaaaagtaaaattgggcaaaattccatacaccatttagggacttcatgtttggtcccattacaccaaaagagtttttttttttgggacactattaataatattagtttgttaactcataaatgaaaaatgggttcaatgtaaaattggtacaacatttatgtattgatatatgctccatatatattaaagcttgataaagaaaattacaaagaaaaataaaagaaagcagaggtctttatagttcaatgtgttaaatagacatctaatctaatattcatcatctttaattacacaaagttttattttttcatttatgaaaaatgcccaccaactttttattaatgctgtacatttccaaggataagattagtatgagaaatatcaataataaaaatatcattgatacaatgtttcttcccttcaaagataagggaatttaaaaaataaataaaggaattcttcatgtatacatattaaacctttaaaaacctaaaacaattttacacaatacacattgtcacacttaataagtacacgatttaaatctaaatctagtgtattttctgttaattaacaataaatttttttaaaagaaaaaaaaattaaagaaaaatccaaatttaatttaaccaaatctatatttaaagaaaagggcctgagttgaaggtggcaccgacgattttttcctaaatataaatgggcaccgacgaatattattgaactaaaactaagttataacatgcatgccacacatgatctaaaattgtcaaaatccacagtatactttttaagcatttactattggcacgttcttgccccatgtatttaattttatataatatagaaaaaaataacttaaaattatatattctaataaataaagtttctcaaaattatacatatataaattgtaaagggaaacatctttgaaatcaacattattctttaaacgaacaatcccaactctccattcccttactcatcttgttctccacgctgttttttaatcaaattttatatcacttcattttttaaaatatatattaataaattaataatatgtattaattaaaataaactctagttgcctccacaatcgtgaccctctctagctatgtgaaagaaaacatggtacactaagaaagcacatgggtttgcacccttatatgttgggcaagaataatgtattttttttttaataatagataaaaatgtatattttttatttcaaacaatgacatgccttctaatagaaatatatatggaagcacatgatgtctcccatttttttttttctttcaaaatgttatattataataccatatattataatctcattagtcaaagactaaaatttgactattaatgatcatagatgagcttggttagggaagcttaatcattttttgtttgtgtgcacgagtaattgggatattttctatttatggtggtagaggtatagttctatatcaatatacttatagaatacaagtatttttgtagttgttaaacttaataaatacaactatagcaaccttcatcaactgtatatgattttttgttattattattataaaagctcaaaatataataagttgtattccaaactggtattgaatatctatctattcacatacattactaatgccttttcgttttcttagaagatttattaattattagttgagatcgtcattgtcctctaactaaaatgttattatgcgcgttaaatacacataacctacgtgtgagtatttttttattatttaaatacgaagagtagacaattttgtattgagagttgtatttgctactttactttgtataaaatatataatttatactagtttttttcacaaacatttcttcaatttcacattagaataaatatatatataagaaaatcaaatgtatctttaaataaatataaaaaaaatatttgaaatgaaactaaattgaaaaacaaaataataaatattatggaaactaacacaaaatatgaatatatatttaaatattattatactaatagcaaatttaaaaacaaatttaagttgaatatgagtaaatataaatgggtttatgagataattagataaggtaatattttttgtaaaaaaaattatatttttaggtttaaagaatttttttgatatttttactataaataacttcacgaaaacaacaagaaacttatataaaagtaacaagaaaatatcaaaacaataataaaaaataacataaaaataacaaaaaatcaacaacaaattaacaagaatttaacataaaatagccatattttcagtaaataaaattaaaaaaatcgtgaaaatttttaaaattctattaaaccatatttttattatttttatgtatttgtgaaacaattctttttatattatttactggactggataaaattaaccttctgtttaagtcgttaatgccgtaatggaagagggatatttttgtacaaagaagagaagtatatgtatgtatgtatgtatatatgtatgtatgtatattatattgtatgtactaatactaagtagagaagaagttaagaacgtgaggtgagtggttgcaaagcttcaatttcagtgcgagtgaaactgaaagcagtgtaaatacgaagacattctacgtataaataaattaaaggaagagatagaaaggcttagattgggcttgggccccgcaccatgttactgtagggcccacgaaacacgttacgttagctttgtaggtccacgcgtctgttgacatgggctgaagctgaacgaaagattgactgattaatctctaactcttaagtctcaccacaatgtggagcccacgccagtagagagaagagcacgcaattgcgggccacagcctcacgtgacactgcctcgggatttgctttgcctctgtttacgcttcgtacttgccaaactcctcatatacactaataatattttgccacctgtcaataataaggtctacttttttctttggtgacgaaaatgttagtattttttttctaaacaaataaaatggaaaaattataagcacctgaccacttatgttatctgagagaatcttttaatttaatatattttataaaattaaaaaatatttaatagaataaaaaaaatcaaataatttattttatacgcgtataaaataaaaaattaaattaaaaaaaattatatatctaccagcatttttaattgaatttaaaaatattaaatatagtgtagtttcacattatatttagttcaataagacactaaaattataggtataaatagttttgtttaaatttagtgaggtattataaatcacattattttttttttttaagtttttaataattaaataatatttttaagagaagaaaactaaataattatatatatttaatattaaaatattttattatattaataaaataataaaataataaataatataaattttatataatttttagtattataatagaatttaaaaaagaaaatagtattaaaataataatttttttaatgttaatttaatactaaatttaaatttaactattagaaatggcctaggagtaggagtaggatgagaaggggaaggaaggaaagataaagtggaagtagttgttgtttgtgttgtgaggagtgaatctgatgacttaggatgattatgatgatgatgatcatgtgggcagtgggacaagtgccgtacagtgttatttgttggcgacaaatatgtgattccagtcttatcactcagaaatgttaaatgtcttttttttgctctataaaaactcagacattgttttttatttattattattaacaaaaattgaagagattgttaaggtgggccttagcgcgtatgaactgtacagcagttctacaatttctactatgtgtatgtatctggtatttggttgaaaccaactatgtgtatttggtagctactaacacttttattcaggaaaaaaaatatttattgttattatttattaaataaaaatatgtaagatttgatattaaattataagctaattagaaatttttctctccgaactttgacattaactaaattatgcctttgccgttaaaaattctccctgannnattgagattgttaaatttaaagatttttgtctaattttagtaaaataattctaaca

SEQ ID NO: 109432 - DNA, 534 bp, Cannabis sativa
tgcagcatcagctggtgaaataatactaaggagaatgtcaggggtaagacattccaaaagttgccgaaacggctttccttcgtcgtgttattcaaatggaactcctcaaaccgagccttgattttcgcaaaagtcccggtgcctctgtaagtaacgcggctagtaaaatgcttggatgctggaattatgagtctgggagccatctgaaaaaataaaaacaaaaagaatattactgtcaaaaaatttaagaaaggtcgacataacatcgacatcatgtcgatattcagtcgacatcatccaaaagtaaacaacaacacaacttgttcgacaacatatcgacatactatcgacatgtaatcgatattccaataaaatcaacgcaacacatcatcacacaatattatcgacattgtgtcgacatcatgtcgacatggggtcgatacatcacacagaacataacagtataacgtgtcgacaacatatcgacataccatcgatatgctgtcaacattctaataaaatcaacacaacaca

SEQ ID NO: 109433 - DNA, 546 bp, Cannabis sativa
tcatcgtcagagacaagatcggctcatggtgtagtaagtattgagagtaaatactttactatttgtgtgatcatcggtttaccacttaccatttcaggcagtatgcaagcttctagattgtttatgggttatgtgatgccatgctttaaatgctatttgtttaaatggatatttatatgaggtaaatagatgagttagggtttaaggcaataagtgcataagtgtgctattagtgcttaactcgctggggttgttgattacaggggtactagtaatggaccctccacaatcatctagaccacagggcgagcaagtagagcctggggctgcccaaactgatccaccgacaccgcctccacttcagaagaatctgggggataatgcgtgggttggtaatgctagtcctcctactgattggcagcagatgtttcaagaaattcgaagtgtcatacttcatcaagaagaagaattgcgacgattaaggtaaccggcaccggttgcccctgtagatcaagtgttaccaccagcacttgtgccagtggtggg

SEQ ID NO: 109434 - DNA, 865 bp, Cannabis sativa
  modified_base (562)..(575): a, c, t, g, unknown or other
taggcaccgacaaatgctctgttccaggccccgttacccgaatccttagtcaagatctggatcactgtcacgggtgtcggtttggttatagtttaggtctcaggtcccatttatgagtttgggttcaggatcgagactggggtgtggttctaggtcccgaccttggttgtgtgtccctagtctggttccatgtttgggtctaagttcatgttcgagtttgggtcccgagtccaggtttgggtggggattcgggtccggctcctaaattggggtctaggtctcatttggagtccgggtccttgtccgattaccgttctggatctaggtccaatttcagatatgattccaagtcgaagtcatagttccagtcccgatcaacttccattttttgttccaatttttggtcacagggtacgggttcgggtccacttttgggtatgggactaggttcaggtccgggtgagggttcaatttttgggagggttcaggtccagggctgggtcccaaaccaagacacggactacaggttttttccaagccttgggtccagatccggatcccnnnnnnnnnnnnnngtctggttccatttctagtgctggtaacgagctgggtgctaagtttaagtttgggtctaagtcgggtactatgtcctggtcctagttttgtttcccaggtccctatccttattctggatccaggtcccggttattgcgtgggttttggtcctggtatatgttcgggttagattcctagtttgagtttgggtcagagttcgagtccttgacttattttgggttcaagtccgaatttcagtctaggtccagatcaggctgcgggtgtgggttcgcgtcctgggtcttggtct

SEQ ID NO: 109435 - DNA, 713 bp, Cannabis sativa
cccaaactgaagagagagatacaactttttttttcttctttacatgaatttttttttgatttagagagagaaacatatagccaagccaacacaacagcgaagagagatagaactacggagatattttctgggataattaaagaaagtcctggaaagagacatagaaatatggctacgccgttaactgggctgcaacacagggatggaggaggaggtgttgcggtgctttcaaattcactaagcaaagttgaatcttccattaattcttgtttaaagaactcagaggaacacaagtctcccctcttgattttcttgctgtttcacaaagcaattcgtaaagagctcgatgggcttcaccgattggccatggcttttgctaccggaacgcgcactgatattggtcccttgctcgagcgctaccatttccttaggtcgatttacaagcaccactccaatgctgaagatgaggtctcattatatttatatatccttacacatatttttgaatattttctcaaactttggttagtttccatattgtggggcgtttcgttttcttgagaatttggcgaaaggaattttaattagccttttgaactttttatttttggttaatgcaacaaagaattggaagtttgtgcctgtgcgcgttcgttgcataagattatactctcattttagtctcttgagagattttatggaaattttatttc

SEQ ID NO: 109436 - DNA, 636 bp, Cannabis sativa
tgtaaagggttttatttagggcacaaaacccaacaggtggtccgacgtatgcgacggagaggagagggagaacgacggaggtggggtaggtagagatcgatcgacgagagagacgagaagaaatagagatcgagagagggaagaagacggcgagagaggagggtgatggtgcggatgtgtgggtggggttttggagagttaagatttttgttttatggtgtgggaaatggagaagaaataggtgggaagaagtaggtgggcatgtgggaaatagaaaagaagtaggtgggcacgtgagaaatgtggcgagaagtaggcaatgattttttattgggctcttgtacccgattgttgaaaaccgttgcctatgagggccgaataaattttacgaattccaattaaaattgtcccatattcttgtaattactgttataaactatcaggaatagtaattttctcgatggttttaaatagttacttaatttttttagcgacagtctccaaaaaaatagcttttagaaccgtcgcgaattctgacttttgtagtagtgcagttaccctttataatatgaaatatcctttactatatgctttactcatcaagggatactgaaatccttactgttttaaagtaca

SEQ ID NO: 109437 - DNA, 1366 bp, Cannabis sativa
  modified_base (824)..(830): a, c, t, g, unknown or other
ccacaaaaaacactataaataccccccaaactcattaaagaggggtcgatgattctgggtttcataagaactagaagaggaaaaatccaccaagaacattctctgggtttccactcctgggaaaaagaaaaaggtgcaggatccgcgaaaggtctgctcggatttcctgaaagggaaaggtccgcagaggggcaaactccaaatagggagtcttggccctcaggatcgagaggaccgaaagagcgtttccgtgcaccaagagcccggagggagaggaagaaggggccagaaatgtcctcccattgatctgagaaatcagattaacgggaaccaaggtgatctccgggatcacctagaccaaaagaaatatggaccacggtctccacgggaacgttaaacgaaggaatcatggcagaacttgccatactctgaaaagacatcgcccgagtctcccggagacagaaaggcgacaactccgactctgattgtgaggacggggagccatgtgccaaacacatcctggaagcagagttccccaaaaattttaagatgccagagatggcagcttatgccaggaactctgatccaagtgatcacctgtcacggttcaaccgagtcatgacagtcatgagggtcagcaatgacaccaagtgtttctgcttcccgcttactctaagcggatccgcggaggaatggtttaagaaactggaaccaggatccgtggattgctggaataagttgcaaaccagcttccggagacaatttgtcgccgcaaggaaagtaaatctggaggtcagcaccttgactaacatcaagcagctgcnnnnnnngacactgaaaaatttcatcaagaggttcagggaagaagcctctaaaacaaagaaagtggatgacggacaacagtttgctcttatccaagcaggcatccgtacggggactccattctggaacgagttgcaacaagaaggagcttcaaaccttcaagacttccagaagagagtccagaaatacatcaacctggaagaggcccaaatagtggcctatgggggatactatcctaccgggatagcgagatatgcaccctgagcccagctctcaggcactgtgccaacgacagccccaccaatgagcgacatacaattttctgctactcccggatatagccaaggccaggccttagcccccgcgtcttctcattttggaaatccctcagggataaacggtcaagccccctcgcactccgctccgaccgcaagtttagccagaccttcccagggctcaaggagtaaaaggtcctccaaaggcagcacccaaacggaggataagcgacagaaaagggggtatactccccaatatacccagtaca

SEQ ID NO: 109438 - DNA, 703 bp, Cannabis sativa
gttgttattgggagttctctagctaccaggtttgctgcattcaatgattcagcaacattggatgtcattgtactgtatcttttgtgtttggaatacaaccttgaccatttctcatatataattttttgtagataaggtcgaacctgtttgtctaaggcatcaagctctctcatgtgatattcaaattttttagtagtgtatgccttggctgcacgagaaaatggcttttcgaagaaccttgcatttttcttgaatgttgttttcaggttgttgagtaggtgatacacacaatatccatgttgtatttcagggaagacttgttgagctgcctttattatactttcatgtctatcagatataacacactgttcttgtctaacaccaaatgttgctcttaatttttcaaagaaccattcccatgatagatcattttctgaatctgccacacaaaaagctaatgggaatattttacttgctgcatcttgtgcctgtgtctggtcgtcttgtacataacaacacatatggggattttactttctaatcaagaactcaatttccaactttaagtacttgcacttgttggtatcatgggaggaggcttcctatacagaactatggactctgtagccacgtagactatttcaggagttgttgttaggagggtgaatctgttgggttttgtgccctaaataaaacccattac

SEQ ID NO: 109439 - DNA, 616 bp, Cannabis sativa
  modified_base (397)..(398): a, c, t, g, unknown or other
taaataaacacttaatcatatagctttttaagcatggcatcacataacacataaatactctagatgctcgtgtactgtctaaaataaaaagcggtaaataaatgatcacataaccagtaaagtatttactctcaacacttactgcaccatgagtcgagcttgtctctaacgatgaatgtacatgttcggccggtctacaggaaatttaaaaaccttgacattctgataccaaattataacgccctaactattaggcacgttacctaagataattaagaaaccctaatcccctaaacaagattactaataaaattagtgcggaaattatactttaaatacagctggaatgaaaatcaacttataataattttaactttacaaaccaaaagttacatgnntcgggatcctaaaaatattttacaaaattctattacaagtctgtttccactagctgacctaagcgataaatcagagtcacaaaattcatcattggtagaccccaacctgcttgatctagtgtggcctgaacatgcacatgcagcgtctagctcccatactcatggctgatcagaaacagatttaccctttcctacacagtaaagcacccgtgagccaa

SEQ ID NO: 109440 - DNA, 676 bp, Cannabis sativa
ccttttttccttccaacccaggatgagaagaacaaacaaacggttgacacaaatatggcagccaagggtctgttataatgcttgtattgaagtcgttaccaatacgaattatggagcctgtactgatgatattctttgtttcaaagatactttttcaaatgaaacttggattatttccaagagtagctgtaagaaaggaaccattagggaaatattgagccctgtagaatttgcaaactagtaactattcatcacttagcagcattgaagcttgcttaccaagtaaagctagattgtagtttctgaaatctctaaagctcaagccacctaagttcttgtgtttacaaagcttcttccagctaacccaactgacaccttatttatttttagacgtgtaccaccaaaacttacccataatactttcaagaccacgacaagtttccaatagtaaaagaaaaactgacatagcgtagcttggagaagcttgtgctatagtttttaagagagtttctttgccttccttagatagaaactgaccttcccaatgttgaatactcttttgcagtttgctcgttaaaaaacttgaaattgcattcttatttctaccaactaaatagggtaacctcaggtacaagctcgagctatcaagttcttttatctccattaattggcaaaa

SEQ ID NO: 109441 - DNA, 739 bp, Cannabis sativa
acaattaatgtggcgcagatattaatgaaatatctcacctacaaatatagggtctcggtccccgagctcctcactaattgtgatttcattaacaaattccatctaaagagagttgagagagtgaggaagcccgaactccaataccgaagctattgcagggattgaagctcaaagatcaatggctggaggtatatcaatctttgattgcatatattatcgatatggttatagtttattttccgcatttcttaatatgctgtattacatactctatattatagtctaacagtctaatgataaattataaaagtatgtatgtgtatttttagagctattgtttgtatgtttaatgtcaataaattgaatttttaggtagcttaaagttattaaaaaatcccttatactacaattatacctataacttatagtcacataagcaaatttgttataaaaacgagcagaatgtaattgtagaggaatatttgcaacgattcgcatagttcgggagaatttttgcaataaaaaaatattcaaagggtaaaactctataaatatcatagttcaacggccaaatatcctatttatttaaattaataacgagtacgtgcataatcagctaccataactagtatatatatcttatattaaatgtgattatctaacaaaaattgttggtttaacgattgtttttaaattttttcgttaaagttaccggttaaaactaatactgttaaattaa

SEQ ID NO: 109442 - DNA, 1196 bp, Cannabis sativa
aattcaaatcaaaattttgaaaaatgagatttgaatatgctctgattgttatggatgtatattaatttaggacaaaagtatctagattatttgtataattttataagttactttgcttaataatttctttgtgattaaactttactatagaaatatagggaattttcacataaattgagtttataaattttaaccagattataaactacttaattcaacttgtcaattgttttttctttttcattttctcattttgttaacgcaacatcaccgttaacatcacaatcatctttctttatcaaaaaaatatcataatcttttccttattatatatataacgtgtgatattatgtatatatatgatcagcctatcacatcatcatatttataaatatatatataatcatcatcatatatcaccatcaccattatatataatatattattttatttatttatttattatttagtttttattaaattatatgcatgtatgaaaattgaaaaaaaaaattaatcacacaaattttgtgtatctaaaaaatatatatacatagatagaatgatggtaaattatagtgtagtattgtctacactatactatataatattatttgatttaattctatttttaagtattgtgctttctttttatttaaatgtacaggaaaaaaaaatattgatgtaaccatatgctactcacatattttatatattttttgcatataaatatttttcaatatatatcatttgtatgttattagatggaacaatctagtgtaaatcaaatcaaagagtaaattggaagaatatggaagtggtaaatatatttttggagacttgtactcaagaagtatcttaagtcaaattcgtggaataaagttagacaaattttagagactactcattctttctttgcaacacaaaaataattgaagaatcattttgattatctaaatgataaatatcaaacttggttgccaataactatgaaaacaggaaatgtttatgatcctacaactaataccattcttatatctaatgccgaatgggatgcatacattaaagttatttatctgaatcactattttataatttagatatttaagttgcacatattaaaatgcattgtgttttggtattagatataagctcacccaaaggcaaaaccattgaaaagtgctcctttacccttt

SEQ ID NO: 109443 - DNA, 650 bp, Cannabis sativa
  modified_base (438)..(441): a, c, t, g, unknown or other
atgttgttgactgttttattcatagctaaatggtcttagttctatgtatagctacaagccacaacctcaaatatgaattataaattttctgatatttacttataaattatttaataataaatattaaaaatttaatattcaagcatatatcaaaatattcaactctttattaataatcaaaaatatcttgacagacttctcagtgcataaatcataacattttattgcatagtatcttatcaatgtaattagatcatatgatcatggatttacaagatttataaatttatgtatttctaattatacacttatttctcatttttagaaatgaaataagttcataacatatttagtgaacctagtatatatatatttaaataaatattgatttattgtgatatattgaaatccctacaggtgtattaatatttttagatnnnnaatttttaaaaattctctcgattagggggagataaatatagttggaatcgatgaatattttgaaaaatgatattcttgcaaaaagtataatatgaacgatattactaaaaataatatatgccaactgcaaattaatattctttaaagttgagatagaatgagttgaaaaagcctgaagcgtaaatgaacaatgtagaaattattaataa

SEQ ID NO: 109444 - DNA, 648 bp, Cannabis sativa
aattatgttttgcattcattttttttaaaaaaataataactaattaagcataattaagttattcaatcacccacataaaaataaataaataatcccatttttgcaataaattaaaggaaaaaaatagtgatctatatataacctagaagtatatcaccacaataatttctaaatcacgtgagacttttgaaaagaaaaaaaaaaactctaatactctaaaaatataaaaaaaaatatatatatattaaaaaatggagaaaaaaataataaaatacaaagaaaaatttataggatgtcacatcaattttgtttaggctctcctttatataaatatatatatatatatatatataaacaagattaagttcatcaattgctaacattgaaaataactaatattaattttgggacaaactaaactaaaagatagcaatctatataacataaaagtatataatcaatacaatgaattctaaaccaattcgaagtttttgaaaatagctcttatattactaaaaatacaaaagttaaataaaaaataagaaaacaaagaagaaaaaaaaggaaactcatataaggtatcacatcattctctttgtgctttcttttatatatatttatatatatgtatagatattgatattgata

SEQ ID NO: 109445 - DNA, 533 bp, Cannabis sativa
ataaaatatacaaatacatatatatactatatattgaggtttaaatttttacctaataaccgcaatccgacgagcaatttcgtaaaaaatctaggcactgtacacatacaatacaacaatatttctaataaaatgaaaaaactcaaaaaataatttacaaaaaccaaaaataaaacaatgtacattataacaatgaatagaaactatatttataccttaaaggaggttgagattcaatgatttctcaacaaaaaatggtggctggattttaaacccaaaattttatattttggttcggatgacactcaaagagggtaaaaaatgaaaactttttaggtgtatgtgattaagtatcgaaaatggaagattttttaaaaaaaatgggctcaaatggttgagaaatgggagcgaaagggcggggtggaggtggttgcggcgagggttttgctctctgctggttttgggtttgctgggttaagctgagggacgttgtgaggaagaagacgagctttatactttggacgaccctatgg

SEQ ID NO: 109446 - DNA, 841 bp, Cannabis sativa
  modified_base (780)..(794): a, c, t, g, unknown or other
tttttttaaaaaataccatagtttgtgttttaactattatttattaaaaaaaaatataactattttctaaaaaacaaaaacctactatatttcttaagatacctatttaatatttcattaagataaaagattcaattatatttttaaatactgcatttgaaatttttactagtatattgattagatatttttgccgaaaactctaaattaacttaaaatagatatggtacgaatatatatgagaaaattatattgtatatttattttactttacatattttaatttttacttttatttttatattctttaagatatatcttttatagatgatgtcacattgtaccctttagattaatgtaaattgtgctagacttacgtagagggtgagggtatattgggcaacccactcacaaaagtggatacattttaatgaaatataatataaagatatttttgattaatggataaaaaaaagaaatatttttcaacttatcttaatatatattgtaagaaaaattgtaaatatcgtggttctataaaagtcatatttaggtctcattaaaaaaatgtaatcaaggtctcaaattaatctagatcaacgtgtgtcctagaaaaaaaatgcatcgaaagggtggagaattacgaccaaaagagaataaagtgtgaagtgatattattaaggaattatttataaatattaaaaaatgataaaatatttacatcttgatgaatttataggttttatatatatatatgagtgactattcaatggttacatnnnnnnnnnnnnnnnatggttacatttttctttgacctgcaatagcaggttactaataggta

SEQ ID NO: 109447 - DNA, 614 bp, Cannabis sativa
tgtgaaagtgcttactcatcattgaaaaaaaaaagaatataccaaaaagaaaagaaaagaagaaaaaaaaagtatcaatttattgaaaagaagaaaaaagatgatggtaggcacaaaaaagtggaagttctcaatctcttacaagtttttttgggtaaattatggataattgtgagtgtttgtttggtaattttgcttatggtataatagagcctaaataacttttcatctacctttcacctaagccaagacatttcaaccgagaaagaccttttgattccaagcaggggttgtcgacattagtggagagaggtgggtcatgcaagcatattgaacattggttggtggaacgttggtaagagtagaatgattgtgatatgttcaaattgaagtgttttgcatctatacgtgatttttttataacttgtgcatccgagttgattcctagagttgttgaattgaaattctggtttggccaattgattgaagttgcacaagtggcagtgggagtttaattatttggaggctcagttatctgtcgtgttgattttgctttgtcttagtttttagttttagtcgagggcgagtagagatctagtttgggggaatttgtt

SEQ ID NO: 109448 - DNA, 509 bp, Cannabis sativa
aaattaatggggaagaagatcaagcatctgctgctgttgaacaattctggaagaaattctgggctttaaaattacctctaaaaatgaaaaacttggcttggagagcttgtcaaggctgtcttccaaccatgattcagttgagaactaagcgtgtggaggtgtcttctgtctgccctgacagccaggaagaatcgattttccatgctcttgttggctgtccagctgctgcactttgttggaacagagtgggaatcggcacagcagcaccacaacagaacaattttttcgactggtatgcttcgaagtttctggtgtgtgatgcagatcagaaaaaactcatggttgctctttgttggtcaatttggaacgcacggaatgacaaggtttggaacaacaaaacatcaagtgtgaagagtatagtattttcggctcaatcttaccttaatcaatggctaactgctcacagttctaatgttattttccccagtcctggtcttattctaggtgac

SEQ ID NO: 109449 - DNA, 1070 bp, Cannabis sativa
ggatcaatttgtctctccttaatctgacagagatcaacccaagagtataaaacgaaaaaagaaaccacattttcattacctttgccgtttcaaaaattcaggaaatttttcgagcttatcttcaaaaaaccatatccagattatttcgaaaccttgcataccatctttgtcattgacattcttattgcgagttttctccgatttaatttttgacctcaagcattcagagggatcatcacaccgttcgttgttccgtcgattgcaagaccattcatcgctccaaaaaccaacttcaaacagcaagtgatttctctccttattttttgacatgcttttaattttgtgtttctgattttgatcactagtttctttgttagcacctttgtcacctctttggttttagcaattttagggctgaattgtatttgggtaaattttagggtttaggcagaatgtaggttttcggatttctcaaatttataaacttctggtttgatgaatttcatccaagaattgggattgctttgtctttgctacagcaatgtcccaatctggttcagaagttcattttttagaataattagaaacagagtgtcccattgaacttgtcgtcccatataaacctagaatttcagaactcaaatccaaaatagagataaatgatgaaaaattagggaacacttagtaaaaacccatcaagatgacattgtcagtcgccacagacacttcttgcaagaaattacaaaaggcaaacatctttcttgcgagatgctgctttgcctgaatcccccaatttatcgtaaattcctctggctaggcctttatttttacccagagtcaaaattgcttttgaaccacttgaaatcatgacctccaagcctcaaaattgttaatgcagatttttgttagcgataataaagcttatttcatgattaatttgcacagaaattataggaaataaaagaagaaaatagaacacaaattttttttacgtagttttgcagttaaaattctacatagtccacgagtcaatcttattcagattattctgatacaaactagggttcttt

SEQ ID NO: 109450 - DNA, 504 bp, Cannabis sativa
tgtaaagtctaattaataaataaaatacatagaaattttatttaataattaattataattattaaataaatagttttgaaatttattgaattgaaattagaaatatggcattattgaaagaagattaagtggttaaaataaagtggcaaaattataactagtgaggtccattagtggtcggccacttagtgtgatttttgcccattattttattctttcttaatccatataattaaatcctaaaccctagtttaaatactataaaggaacatgatgctctcattctcataaaacaactcagtttaaccaaactaaacctaattttcattctttgacaactagtagatgaaagactcctttctatagtgatttcgcaccttattcattgttctttaccaattcgagcaatagttatagagtaccatgcccacacataacaagtcaagtactcaatcataatgtggaagacggtggtaaccaactcaatggagagaaagagatcaa

SEQ ID NO: 109451 - DNA, 1063 bp, Cannabis sativa
agtaagacggtggtaaccaaacccgaagaaaagaaagagatccaagctcagatattgataatactctgcaacagaaagaaacaggtgttaaagatctgagctgaaggagtcattatattccgttgcaaccaatgtaaggttttttaacctcttatgtgtttaatttcattgttttagagatattcatatttaggatgttaatgaagcatacttgttagtaaatatagattctggtaatatattcccaacacatacaacatacaacatacaacatatacaagtcataacaaccataatttatatatcaattcacaaactcatattgtgtccataccacacattctcagtaccatatacatatttataataacaaattataaattatatttcaattcataaagaattcaaatttgtgcaaataaacacatacaaaactacctaatttccttaccttaaatctcgctgcttaagaattattatctcgtcactactacctataataagacatgggttaaggccctaatattaaaattcgtacttttacaatacaacagaaagaacattattttttactaacaactacacgaattcagtggaagttgccttcataaaaattatagaaaattcaattatctttctaatgatatgaagatcattaaaaatagattaaaactgagagagttatcatagttttactgaaataatttttgagaaagaatatagagtaatgaatcacaagagacatcagaaatacacagttttgacactgaaatattccaaatcagagaatactctcttcataaaagttttagaaatttaaattcccttatgaatgacattgaaatctttaaaattggacttataatgtaggagatatagatattttaccgaaacagttttttagaaatcctgaatcaatatcgctataatcaaaccaatattcagagagatattaaggttttactgagacaacgtataaacgatttacaataaacatcgtagaaatactaatttttgacatagataaattctgattcaataaaacctttcttcataagaatta

SEQ ID NO: 109452 - DNA, 1165 bp, Cannabis sativa
tatgcaataattcaaagggagtttcggtatggaggacctttgatggtgtcctattgatcaggtaagtggttgtgtgaattgcataaggccagtaaaccagagcaatctgagattggaaaaggagggatctagccacattgagaatgtgttgatgttttctctccacaactgagttttgctgtggggtatcaacacatgaattgtaatggaaaatacctattttggtatagaaattgttgatattaaattctttggcattgtcagatcgtattgctttgattttggctgaaaactgagtaagaaccaaagaataaaaggcagggataatggtttgcacttccccttttgttttcatcatgtaagtccatgtatatctagacttatcctcaacaatggtgaggaaatatctgaagccttcaaggctaggcaagtgaaagggaccccaaacatccatatgtaccaagtcaaagcaatttgcagaaaaattattgtgagaaataaaagggagtttcttttgttttgcttgatgacagatggaacaatgagagggatgttgtttatgaaaagaaaaaatgatctctttattcattcctttcaatatgcttacagatggatgactgaggcgattgtgccaaaggtcattgtgttgaattacagtatgagcattacatttattgtaaggtaaaggagtggaaccagtagagattggggattgctttagaatgtagagctttccaatcttgttagccatcccaaccttcgaagtcactaggggtgcctgaataaaacagtgcgcattagtgaaaaaaatgaaattattgtaatcttcaagatatgattggacagaaaataaattgtacttgaaggaaggaacatatagaacattgttaagtttgagtttctggtttatgatgacagtgccagatttaataatgggaataaggctaccatttggtaatatgacatgctttggatgaacctgattattaaaagaaacaaattgctttgaatcataacaaatgtggtgagtagcaccactatcaataatccaaaaagaagaggaaaaagaatgagtaccagcaagattagttgctgcaacaacagagtgagtgtctgatttcgagttctgttgttgaagctgctgactcaaaaaagagattagttg

SEQ ID NO: 109453 - DNA, 500 bp, Cannabis sativa
tgactcacttttttcttcctacaagggtttgcacgagtttcattcttatgagactgaatagtgggttggcgatttttgtccgatgttccatgtatcctaggctatacccctagtcttccttcaatttcctcaggttgcatcccttgagagatctgagtatacccctgggtcatctcctgcctcttgacttgtgagccacgaggtttgcctcgtaaatctcttttctcaaggtcaggttgtttttgggtacaatctccgagcgttgccttttcagtagctatttcacgctctaactcggcattacgccggtttgcttcctccaatcgacgcctaagatggcgattttctaattacactatcgttatgtatctggttgggtcgtaagcaccatcctcatcaacttgattagggagtgaccgattgttgctcttccaaggtccgtcgagccaagggccccaatactgggtctatctggggcttgcattctgttcatgtgatga

SEQ ID NO: 109454 - DNA, 686 bp, Cannabis sativa
  modified_base (392)..(407): a, c, t, g, unknown or other
tgtggttcgacctcacctgtgtgagtttactacttgattacgtacacttgcgtattgttcatatttttcgtaacatttgcttcctccaatcgacacctaagttggcaattttctaattccatgattggtatgtacgtggttgggtcgtaggtgccatcctcatcaacctggttaggaagtgactggttgttgtttactcaaggtccatcaggccggggaccccaatatcgggttttcccaaggcttccagtctgttcatgcaatgactcaatagatccctgaggactcaatggctcttttccaaggcaatcactgattccttcttgaggattattatcttcggcatcatccattacttttatgtcaagaggctttttctgagctttttcacnnnnnnnnnnnnnnnnagcaccaaactgttaacgcagattttcattaactaaatttgaacctcacagtagtgatttcacggagaaaccatagaaataaaaatatgaacacaagattttttacgtggttttgtagttaaaattctacatagtccacgagtctatcttattcagattttttattgtttttcaggacctctcctgtatgagtttttgtccccctttttgatcttatatgccactatttataactacatagtgggcagtaaattacaaaagttgactgtaatctttaca

SEQ ID NO: 109455 - DNA, 506 bp, Cannabis sativa
tttagctttatttccttgcacaattttctctattttttagatcatctttttgtgagatttgaccaatttatccattccaagtgtcaaaacctgaaattaacgaaagcgcaattctattccaaaaagtgataataaagaagaaagttaactctaaaaataacataaataataggctaaaaatatcctaaaatattccctaaaactaaatccttactcgccctcgagtaactaacaactaaaaataacacaacctaaatgaaacaagtcaatcaactgaaatatgagcaatttttaagtaaaataaataacatggttatgaacaaaatttttacctataataatctagaatttcatttcattcacattcttgattcacctcaatcttttattcagttcatgaaaccattattaacacttaactaatagttgaaacaatttatgcatgtcaattacaaccatcaatccactaagccaaaatattttataagcttgcaatacttactatt

SEQ ID NO: 109456 - DNA, 584 bp, Cannabis sativa
ggcttgcttttattttggactaatgatgtaattgtcactttgctttctcaatctatcagtcattttgattgctacgtttcgtgttctattactaatgtatcattccatcttacttgtttttatggctctccggttgattctctcaagcctcatacgtggaatattcttaaccgaattggtaggggtaaccctcgggatccgtggcttattattggggactttaatgcttttctcttttcccatgataaacaagggggaaatcccgataaaggcccttcctcggatttcaaacatttccttgactcttttaatctctcccctctcgaccctactggtcccttgctcacgtggaataataatgtcgcatccccaaaaaacattcaagaacgattagactggggcattgtcaataaccactgggctgatatcttccctgatgccactcttgcccatctgcggttctacggctctgaccaccgcgcccttgaacttaacacttccaatcctccgggcactcgccttaataataataacaaacgttttcactttgagaatgtttggcttaaggatccaaattggaacca

SEQ ID NO: 109457 - DNA, 507 bp, Cannabis sativa
ttgatttgcttgaagttgtgcaggtggtagtggtagttcaatcattggaaggtttagttatataatgcattgtttaatttctgtttgagttttagctttactcgagggcgagtaaagattcagtttaggggaatttgttaggctatttctagcctatattttggatctcttttatgttcgtttttcgatgttttatgacagaattatgcttgttttctatgttttcaggtttctcggagtaatggaggccccgagatgcaaaagtgcaataaaagacaagtggagccaagaaaaatgccaaatttaggctcgacgcacttgtggctgcggcgagagttcgtacgagcagggtattttcatccgttgaaccctaaaaatgagaaataaatagaaagctgtgattgaaaattagaagaagcgatttggagacctaaaacatagtgaagagcggcttgaggagcaaagtgaagatccagagtcattccaccaacagtttctttctctatt

SEQ ID NO: 109458 - DNA, 591 bp, Cannabis sativa
  modified_base (344)..(345): a, c, t, g, unknown or other
taaagagtggctaaaatggattggattcatccatgagatttattggatggatcttatccaatccaataaaaaaactagttaaagtattcaatagatggaactgatacaatccatttcatccattggatcagatcggatcggatgacttagttcaattggattggatcagatggaaatatccaatatccaataaataattggattggatcagatgggtccaaatccattggatgtgatccaatgaacacccctgtaggctgtagggtttgttagtgatcccccacatgtcggggtgtctccctaacaaaacccatctgccactctttttaatgaataaaatattnnaagaaaataaatatctataaaaatctccttgtttctaggaaaaaatcccataaacattgggaaagttgttattttcaattgatgatgcaccaatttgaaatggagtgatgagatgtcacatcttggctggaaatgtatgatattggttaggggtgttcattggatcacatccgatggatttggacccatccgatccaatccaattatttattggatattggatttgccatccgatccaatccaatt

SEQ ID NO: 109459 - DNA, 624 bp, Cannabis sativa
  modified_base (130)..(131): a, c, t, g, unknown or other
aaatttggacttaaaacgatttgtatgtgatttggatggtatcatgttattttgtgtgtcatattgatgtattattgatgtttgtgaattctagaattatttttaatggatagtttggaaaaaattaagnnatttacttttttacagaactcgatttcgattttatttgaattaggtatgaatttttgaaaatcggaaaaaaaaaacagggtagtgagcacccttcccacgcgcgcggacatcatccaaggggacccttgcgccgagtttactcggcaattcccccctcctgcgcgtgcggacagtgtgctttgcaaactgtccgcaccacctgccatttttttttcgttttcttcgatttttcatgctatttaatggaattaatttcctattttttgtgtagttttgtattttgatttttaattttcaaatttcaaatctaattatcagaaataaattaatttatttttaaaattaattttagatattagtgtaatttgtttttgaaaataggtaaaaatcattttttgtttaccatttttcttatttttttaattttgattattttttattattttaaatctaaggttagatattaaattctttttcaaaatattctatttt

SEQ ID NO: 109460 - DNA, 1020 bp, Cannabis sativa
ataccattttagaccatgtgtttttaaaaaaaaattgttgatcaaatcctttattttgttttaaatgataaattggatcttgtatattttaaaatgatacaaaatagaaccctgagctcaatttttcgttaatattttttttaatataatcaatctgaaacaagtttctagcatgaacagatgcaaaaaaatgtaacaattttagtcataattattgagctttatttagaaaaaattggctcacagtattattttgtactgttgatgctgaaaaatagttcaacaacaaattgtattacgacatggaattctttacatcataatcaacttagtcaaagtttgcactctacttgtttacacagttccctctcaattacagtaattctctctagtttgcatgtttcccgagctcaaagtgatcctgaggatgtattccgacagagtttatactagccaaatgtaaacaagaatctgtctgtttttcgaatgatggggtctcatatttataagcagaaaggatagttagtccttctcttttctcctattctgattgctccacgtggattaatttccgtttgttctttcgtgcacttcctcttttcatattccaaactcttcaagctttattatttatttattgagttatgctcctcatcatctcttgtttgagctatgctcctcttgagctatctttcctcttaagtgatatggtatttttctttgagggtctatcatatcatgatattagttttttctttacttttaaggctatgaaatgacttttttaccctttcgattatttttatcacatatatgtacccttttagaaaatacagggtccaaattatcatttaacaaaaagtctattcggtaacttttataaaacacacggttcaaagtagtatttaccatttttatattttatattctttaatttatttttgtgttaattttaaatattttatttgtatcagttttaattctttcctaaaaaataatgttttctttttaagtatttat

SEQ ID NO: 109461 - DNA, 651 bp, Cannabis sativa
cgagattaaacggtgcgaaattaccaatgaacgttcctccattagggaggattactcactaaaataaacgcggtgtaaaacccacaatggcactactacagaaacgccttttagtgacactatttagtgacacgcacaaaagtgcatgtcactaaatagttaggagtaatttttagtgacacacacaattagactctaaattttcaatgttagtctcttataatgtgtgtcactaaaaatttgaagtgtcactaaaaagtaatatccatatatttttattatttcttttttattaaaaaagctaacttatagagtcatgccaggagtgattggaaaagcatgtggcaacttgcttagcgtgtcactatatcatacctttaaatttattaaaaaaattaattttaatattaagatatagtgacgcgctatgagtgtaggtacacatatacccatacgcatttcgcgcgtcactataaaaatagaaaaaatatgagattaaaataaattaatttccataaaaataaatataaataaataattatattaaaaaataattaaaaaaagaaaataagaaagagtataaattcatctcttcctaattaaaaccctaaaacttctaactaccagtacacacacactctctctctctct

SEQ ID NO: 109462 - DNA, 532 bp, Cannabis sativa
atcttgtttgtgtctattcttatattactgaaactttctgcctgctgtaccactagatgtggtggaatatatgaagtcaacttattagtaaatcaggaagcaaaaattaaatgaaccaccaattatgagacagaacaaaaaggttctagggtggtcatggtagcggtcaaggtgagaataagaaatggtgaccttatcctgagtgttcaagatgcaaaaaggcgccatttgggctaatgtagagccatatcttgttattgtgggcaatattataattgctattgatattaaacattgtacatttagttagagatatcaagaaatctgaatggactatgcatgtatgttagttagtggtaatccatttgaccggatggacaaattagagaaatgacaaaatgagttaaattgctggtattcccaagtggaatatagaacacgagcagctaatggatgcattgatctaattgattcaaataacaaaatcttttgtttaaaagtgatctagcattagcaaaggtgggacaattta

SEQ ID NO: 109463 - DNA, 1155 bp, Cannabis sativa
attaaaatcacaactttgtatccagcaagaaataaatttctcaatttactctctaattctatttttgtatattctgaacagtataatctatttttgtatactctattgtctggatcgacaactagacaatagcattacttacacagaactacatttgaattttaaaagaggaaaactcagttctaatatgctataatctctacatcccagttcaaacatacactaaagtcctctaatatgtacattagagtcagacaaatcactacttataggaccaatgacactatcaacctctcaacttcatcaccaaacatgtcccaagtttcttcactgaaaaacatatcatttaacttggagcaagttttctgggctagaagcacttcaaaattagcaagagatttctaattataaagaaccaaaaccatgtattatggagagaaaagcatagcaaatttagtaagtatataaaaacaacatattttaaattgttgtattagttcagcccaaggcgccattatattgaaagaactaagtttttaatcataatttttaataagctaattaattagcatcattatcatgtatagccaaaaccactaatttttgctaattaactagaaaccctcaaaattaaagagttcaattatgataatgagtggcagagagagtgagtgagtgagtgtgagtgagttaacaataacaactaattaacccagattcaacaactcaaagaccagtaggataaagtcatgaacacataccaagcttaaatttgaactaattaatctttttcaataaatctttaaaaaaaataaaaatataaaataaaatacagaaaataatacatatcatactctaatttaaatttaaaaataaggaaaaaaattttacagaaaaaaaaaagaaagaggaaaaaaaattcattagatttgatagatcataaacataccagtttgggggttgctaaaaaaatttagctcaaacccttttttaattcttataattttcttcccactccagtcgctccagccgctcctcctgctctgcttcttccttctttctttcttttgatttttgtgtttcgttggtggtaacctagtagagagagaaaatgttgagttgaggagaggcttaattattaggctaattagtaat

SEQ ID NO: 109464 - DNA, 3311 bp, Cannabis sativa
attcatccattggatggaaccgattcaatccaatgatttattggatcgattcggttgagcctacaatattggattggatccattggagaaatccaacatccaatgtataattggattggacctggatgggtttaaaaacattggatgtgatccaatgaatagccctacttgaagaaaaataagtagatatcacttgtttgcattgcaatatccttgagagttttcagaataattttcaatattctattaacagtgatttactattgttatgttttcagattgaaccatgtctgacgctgattctaatgctgccactcccgccaccaccactactgccaccactaccaccaccatcgcccaaccaccagcggttaccaaaaccccagtgaaggaaactaaacgctgggccgatatggaggacgaagagtccaaaaacaccttgtctgcttcatcatcagaagtaaacattgataatttgaaaattgatgaggaaaagaagataaacagcttcttagatgaagctgaggattccaatatcaaagctgtatgattgattcattcccatttgttatcttgattttggtttggactaaagttaatgcttgatttttgagacaaagtcagtgaataaaagaaatttctccttggggtacaggttatatctggggaaacgccttacacttcggctaagacctttgaggaattagaacttagagcggagttgattaagggcttgtatgtggagatgaggtttcagaagcccagtaagatccaagctattagtttgccaatgatcttgacgcctccgcataaggatttgattgctcaagcacataatgggtctggtaagaccacttgtttcgtgcttggaatgttgagccgtgttgatccccagctcaaggctcctcaagccatttgcatctgtcccaccagagagctggctattcaggtatcatgatttaatttatatgaattaagtttttttatttcattgacattgatatggaagaaagcactgtttgtagcaattcagcaaattttccctcaagaataggccaactggacagaacatttggtttcgatgagttttaggcttagattcctcactcattatgaccctcttagcatgccttttaaagattgtatagatcagtgataggatgcagtgtctgcgaaactgtagaaatgatttctgtttcaatgaaatcattggttatccaaataagttatttttttcaataaaactttttcttgatgcccttttgatttaactttggtttatatacatcctctgttgttatgaccaagtaaatttgatctgcttgtaactttggttgatggaatgaatgaatgtggcagaatttggaggttcttcttaaaatggggaagtactcaggaataagttcggagtgtgccattccgatggacagcacaaactatatacccattaacaaacgaccacctgtgtcggctcaaatagtaattgggacgcctggtaccattaagaaatggatgtctgcgaagaaattgggggttagcaatgtgaaaattcttgtttttgacgaggctgatcacatgcttgcagaggtaatactataattttcaaattaagttgatgtttgatatagaattaagtttcctatgtcacttatgcttgctatcttatttaaaatttcttgcaggatggctttaaagatgattctttgagaataaagaaggatattgacagaagtagtcctcactgccaggtttgttaaatttcctttgttcacttatgttcctcattttttgtcataatatttctcaccttgtgtgttactgtatatttggtcaggtgcttctgttttctgcaacttttaatgaaacagtcaagaattttgtttcgaagatagttaaagattacaaccagctctttgtaaagaaagaagacttatctctggcgtccgtcaaacagtacaaggtctactgtcctgatgagatgaccaagattaaaataattaaagagagaatatttgatctgggtgaaaacattggacaaaggattatttttgtccgaacacgaaacagcgcaagcatgctgcataaacagcttgtggatgatgggtatgctgtgacgaccatccaaggtgctaacacaccagaagtgagagacaaaattattaaagagtttaaagatggtttaactcaggttcttattacaactgaccttcttgcccgaggtttcgaccaacaacaggttaattattgttttcttctttctttaagatattcctttgatatgtgcccatgagtgtcgaaaatggaaataataacataatatgtcctcatgtaggttaatttggtgatcaactatgatttgccgattaagtatgatacccaagaacctgattatgaggtttacctacaccgaattggaagggctggtcggtttgggaggaagggtaagtttcaagccatattaattgtcttagtcaatgtcatgttgagttcttaccaaagagaataccaaactggtttgtgttttgtgtttcaggtgctgtatttaatttaatctgtggtgatagagatgaagccacaatgagaaagattgagctctactttcagagtgaagtgactgtggtaagtttagcttttatgattgatatgttttctaccaaagtaaataataaatacgtatgtgtttagagtctaattttgtgtttgccacttaaattaattgcaggtgaataatagtgaggaagactttgaaaaggcattgaagcaatcgggtctacttgaatgagatgtatatgactaatgagtatgatccctttttatttgaaaaagctttggtgtttaaaagaaaagaaaaatgtagacaagtgatatgctgtgttttttgtattgaggaaggatgagtattttaattttacaattacagtttttcatggttgcatcagttatgaatgatgggccaagttacatcatgtgtatcaaaaacaaaaacaatactaatgaatattatgaccattagtattgagtaaattaatttttatactctttttatatttttttcttttatttttaagtttttttttaaatattgtaccaattttatttctgtcactttaagatgttctccatgtgattttcttaaataaaaagagatatgccttaattaaataaaaattagagataaatttagttaattaattaataaaagagacattttttcaacttactcattagtatcattccttaatcaattttattcctaaactagtttcacagccatgtacaaatatttattcggtattggattggagccctac

SEQ ID NO: 109465 - DNA, 1047 bp, Cannabis sativa
tagtggctacccctacgtggcttaacaaagcagaggccaccgttgaagaatggtgggagaccacgccaagaaggccatgggtactagcgcttttatgggttcctagacgatgaaacgttagaggaacttaattgacaagttggctagtgagagtacttaccaagatgctccttattttagtgtttgggtagaagttctgacttcaagttcctcatcatactcgccagacttgtgtgcacctttactgttatcttgtaacatgttgcagacctttttagttttgtccaaatatgcttactacatgagatttgctgtcaaggaatattttttagggagtaattctcttatgaggaatttctttcctcgatctatttgttgacgggcctagtaactccttatgcgcagccatgctgctttgagttggcttggtctcttcttctttcccttttttcaagtgatcctactagtaagatgttgtgtaccagttgttcactgtagaccaaaagtatgagagcagactgttgatggatcgggctggccaaggcaaaaccaggtggccagccatactaagagagcattgcctgggcaattggatgaggctatggtcggccagcatgtggacgtggtggtcggccaaaatgtggattctatggccgtccaacttgctgtggacatggttggctagccttctaaaggcccagtcgatgttgtagtttgatcccgcctacatttgattgcctttgtcccctgacaaaattgtcgtagagcctttgtgcacttttgttaatagctatacaacttctttcttggaaacactccttggtggtattgaagtacacttctgtgtgttatgctgtgtatgatttgacaccttgtaaatgtcctccatgtccctgctctctcgcagggtctttgtttggaggtaagctgcaataggtgtcatccatgttggaatgtcatccaaatgtcgacctcctctgggacaacaatgctaggttcttctaggaactggatgggcactaggtttgctttgtcagctatgatact

SEQ ID NO: 109466 - DNA, 631 bp, Cannabis sativa
tgcctctaggacctctacctcgaccacaaacatttaggggaatctaaactccttgatcgccactgaatccgaccaagttaccctaactcctagtgttttgcctggcgtccatactactagaacagcccgcgtaaccaagagctagtctggtcagatcgcgatcaagaataacttgctaacatgcttcctaacaggctcttcttaaatcatactacaaaaataagctactaaagcaataaaagattactgaaccgtgaaacgaattgatcgttgatgatgattgtacatgtcgtgacgatctttggaagacaacctggcgactctgataccaaattgtaacaccctaactaatttaggcgtgttaacgtgattttaaacttaactgtgcagctcgttgctaatcaacgagtttattgaaaattgtaattaattaaagttttacttaattaattaaaacataaaatatcatacatataaaaatccgggatcctgtttacaaaagtatttatgaaagttaagtgtacatatacaaaatcttatcgcctagagactatccaaaataagccctgatgtcccaaagatcgtacgctctaggcctaactgccccaacatgtacaatcttcatctgctc

SEQ ID NO: 109467 - DNA, 1273 bp, Cannabis sativa
aacaagacgcatttcgtgtagcgaacgattccgatcagtgctacgagttctgattttgatttatcgtcgttttgattctgaacttcttcttggagagactcgatttcttctctgcaactcgatgagtctcgaattcctaaattcgtaaaaatttctgaaagtttggaatgatcgggaacgatctctttcttgattccatctagcatggttacgatctcgagtctgagtcgtcgttttgattctgaacttcttcttggagagacttgatttcttctctgcaactcgatgagtctcgaattcctaaatccgtgaaaatttctgaaagtttggaatgatcgggaacgatctatttcttgattcgatctagcatggttacgatctcaagtctgagaatctcatcttctggatcgagaaaagctttcgtctccgaacactgttttctcaccaaacaaacaagttcttcaacatcttcgcttaattcaatctctttcaaaggaaaaatatccaacagagtcgataattctaaagtcaattcatgaaaattgttcgccatggaattattctgaacgagtaaccacatcttactagtcgatccattagaacaatcctcaatcagagccttaatcctctgcaaaacaataaacatttcttcgaaacagagaacagcagaggtagaataataggccatgggagctcgaagaagctcttcaaacaaaatcgctagaagcttcgatttacgaatcacggagagcgaatttcgccggaaaagaaactcaaaaggcttaagagaactaatttcttttgtgagaagaagaagagattgaaggagattgatacctgagagctttggagaaacaaaggcggccgccgatgggcggcgctttcgatggggaaatgcttgagcagaaatggccatgaaatgatttgattgagatttttgggatttgattttgattgaagaagaaagggtattaagggtgtgtttggatggtaataatattgagttgattacagaacaagtttagtagaatacaatactattacgattacgatagagaatagaagataaacgtttaagtttgagttgcctttttctttttctttttatatatttatatcaatttttatatttattatataaatacagaaagaaattaagtatggggtcaggtcagccctttgatgtcgttgactgcttttgtatcttttcatttttgaatcctactctccctattaggtaaaaaataataaagtaaaaataatataaggtaaa

SEQ ID NO: 109468 - DNA, 630 bp, Cannabis sativa
  modified_base (35)..(58): a, c, t, g, unknown or other
attcattttgataatacaggatactacaaaataannnnnnnnnnnnnnnnnnnnnnnntaatggtttaacacaaaatcaatatagactagaggtggtgccgcctcttatgagaattaggagtattctctagagagtccatgaattggaattttgtacatggccattaacggtgcaagagcgagacatgcagtctcaagtatgcattagctagagtgtgtgttatcaacaatttgaactaaaagaatagtggttcaatgacggcaataaaaatttcatcaaactttatgggaattacactaaggtaaaattcaagtcgaaaaatattttatctaatgcacctaagcaagacttcttaaaagtatatatttattcaatcaaagtgggagaatattatattttgatataatattttttattaattaaataaatgttacaaaagttacaagtttgttactaaaaagataatatttaatctggtgggggattgttatattattgatcattaatataatgtatagattaaatatgtgtaacaaactaacatgtaagatatgacaattgtcatatttttgtaacatttgggggagttacttgttactatgagtaacctccaccattatcaccaactt

SEQ ID NO: 109469 - DNA, 1689 bp, Cannabis sativa
  modified_base (96)..(99): a, c, t, g, unknown or other
gcattccattggaatgccattccaatactttaaaatgtaaccaaataaagaaatggaatgaaaattgtttcttttctattccattccatttcattnnnnccaaccaaacgccaccttaattcgatgactagtcataaaatgagatatttttttaattacctcaagaaaaacaagtcataaaatgttacaaaatgtcataattattgttcaagtatatatcattttgtttgatcatcacaccttatgcctccaaagcttttgttcactatgaaccacaacttttatttttagcatgaaaataaataatttaaaaacacacaatttcatgtagccttatatataaaggcacatttattttttggccctcaatcctatccacaatttggccatcaataggatatgagttctcatcaccaccatggttggaaacatagttcaactgtctagagttaaggaataacttcatgttgaattttcgtattgacgacacaccccaaccgcttctcagaaaatgcagatttttcgagtagttgaggcataaaacaagtgtaacataaagcaaactcttagctagacattatagcaattcatttcaagagggacacagatctttaagcttggctttctgtacaaagttacaatcttttcaacatttacgagttgtgtgtggcaggaacatacctgcttcgctcgatagtagcatgcagttaatgcacgccgtatgctgatgcagaaatacgaataccatgttagtggaaacaacaaaaacaaaagtgatgtctaaccatttcattcttctgtatactgtgaaaatatacaatattatcataaaagttcacaacaatatgagctagtaaactattcctcagttctacagcaagcatgtatgtttcagacaccattaagaattagaacgtttacgctattgggaattcattgatagcatgtatcgaggcattttggctcaattcgaaggatcttggacagatgccctttgttgtttgcatccatgctccggtaaaagatgttctgaagcggctctttttggtcttaactgcaactgaaattaacattagtgtcgctcttacacgaatgtgtttgtgtgtacggtgcaaagcactaaatcactgaccttctcttcagcgcgctgatacatttgccttagaaggatatttttagattcggtagttatcactgcgtaggatcaataaattcttaaaggttcaaaaaaccatgcacatactcagtttcaaatcaaaggcaatagctacaaaagatgtgaaatcttttgatttaccttgatcaggtggtggaagagtctggttgtgtgtgggatgataggttgtaagtgtcatcttctatacacaggcataaacataatcttagagagagaattttattaaaatttatgaaaataacaacaacaataataatagtaatcataaatagaagaagagagggaaagcattcatttttaaaatgcaaatgcatgaatgataagaaaattttgaatacattaagggttcgtttggtacgccgtattacactgtattgtattgtattttttttttaaagaaaatattgtattgtatagtattatattgaattgtattttatacaatattattatgtaaaattatatgtagtgttgatttttatgggcacctaaatatataaatttattataaa

SEQ ID NO: 109470 - DNA, 833 bp, Cannabis sativa
  modified_base (66)..(68): a, c, t, g, unknown or other
  modified_base (398)..(404): a, c, t, g, unknown or other
tcatgtatatatatatttttattttttacaaagaaaatttcataaatatttttattttaatttttnnntcataatatttaaaatataattttattttatttgataggtatattttttaagtttatgaattggaagaaaaaaagttgaaaaaatttagtataactaaatatataaattttatattaaattaaaattattaaaatggggtgcctttagaaaattttggggtgtaaataaaatttccctttttaaatgacaaaatggaccctatatttttcaaaatagtacaaataggaccctgaacaaattttttgtcaaaaaaatttaataaaaatccgatctaattgtgttatgacaaaattgtttacattttttgtatttgttcgtgttaggaattnnnnnnnagttggttatattaaaaaaaagttgtcgaaaattaagctcatggtcctatttttactatttttgaaaatacagggtctattttgtcatttaacaaaacggagggtctaatctgtaacttttacaagacacaggatccaaaatgatatttacccaaaaaaatactaagaggagtgctcctaaaacattttattgtcttccccatgatatgcgtgctccattaaattaattaaaatacgtcatatttaattatatgaaaaattattattaaatcgtcaaaccattttattcacaacttcttcattgaatatattactttgcaaaaataaaaaaggaacgatattattaaattaaatttttgagttgagttgcggattaggttgctttctataaaacattcacaacactgcccagtgtcacgggctcacctt

SEQ ID NO: 109471 - DNA, 1690 bp, Cannabis sativa
gaatgatcagtttaccaaggattcgggatgacttttgggttgattttagatatgagagattgccagaattttgctttgaatgtggtaggcttgggaatccttttgaaaaatgtgtggcttttatggaaagaatggacaatggcaatgatgatgattttgagtatggtccttggatgaaagggtctaaattaccaactactggttatgacaagtataggactgattttgctaagggcaatgcttggccactcttgactcccctgacccgtcaatctttgtcatctacaatctcgactctccataacagacaacaaccacaaccaaaaatacttttccatggtgagtcttctacttccacacctaatttgtctcgacatgctcacaacacttctgcttcctttcaccagtactcacggcctacccacactttgcctcaatcatcatcttctataccctcaaatactcacctaccttccaccacaactgctcctcaagattcatcgttaaatattcgcaccacaacatctctgactttgccactgccatcttcttttacaccccctcattaccacctttctagcatcacgtttgctgtatcaaacatgatcatcttggatcaatttacatctcccaccatatcccctcacgcgagaagccttccctctctctccttcaatcctatcactactgctaatctaagccacatattcacccctgatattggatcttctcatactcctcatattccctatgcaacctatccacctataaccctgtctaccattcctatgaacctttccccgatgcatggtacttctaccataacaccacctctcataacaacttcccagccacatatatcaaccaccagtaccagcccatatcccagcaaagaaaacatacatcccaaccgtatgttcaaacgacaaactgatgctccaaccatgagacaaatgcttaagagatgccgcaaccaaaacaacaatgttgtcccctcattctcgtcaatagggaattgctcacaccagattgtttcctcaacttccaaggattcagatggtgattctgatgattcagcggagattgctttgaaatcccgcaaggcattatgaaaatctgaggttggaacgcgcggggtttggggaacccgagagcgttaagacatctcagattgcttgtgcaacagcaatctccccatgttctgtttcttatggacactagactaaacaacaactctgtagatcgttttcgccaattattaaaattttccaatggtttggaggcacctcggagcggtcttagtggaggtctaatgctgctttggaaggatgatattgtgctccaacttaacacttttggttcttgctactttgacactttgataactgatgtcagtgatcataaatttcatttcacagccttttatggagctccttctgtgcacaatagattggactcttggattttgcttcgtcgactctctgatatcgcacctttgcaaccatggttaatcattggagacttcaataagataatatcaaatgagaataaatctgggggatctcttcgaagtgagtctcagatgtctgcatttcgagatgcacttgacttttgccatcttatggaccccccttttcatggagatagttacacctgggctaaagatagaactgttggaaatttattttac

SEQ ID NO: 109472 - DNA, 571 bp, Cannabis sativa
taacaaaaacttggcctatactaaatcggctctgcataattttgaagcataactttttcattttttttaattgcgggatagaatttttttcaaaaatactatgtaatttttatattgtgtactatgtagttttcacagttgttttttaattgttctattgttgttttaatagttttgttttgttattttatcggttgttttataaaacacagtatttttgtaaaaaattatgccctacggtaaaattgtaaatttttacccaaaatacagtatttttgtaaaaaccctccagaatatataactgcagattgggcctagctacaaattgggcctgcgtaattttgaagccgacgatagtttttcttgaaatggaattcattaatcgagggctttacacatttatatctattaaaataattaatgacagattatttattgaaaagataatataaccaaattatttaattatggttagaaatgaccaataatgttttttttttgtttgaaaaagaccaattttggtctttgattaagtaaaataatacacttaaaaaaaaaaagaaaaaattac

SEQ ID NO: 109473 - DNA, 593 bp, Cannabis sativa
ttttattttttttagttgtcgctatcgcttatcagacgatacgcagttggccatttttcagcatcaacacttgtgtatttaagtatattattataaaaattttataatgtacatcaaactgtttaaaagggctaaaacacacatggctaattaacaaaatgagattgaattatgaaacttgttcttattgttacctgcgttttcggatgggtgacatgtgtatttccaaggcccaaaatcaactcacaggcacattcgtcaagcccaaacagagcaatgggtcagcccataaacggagtcggactacggcttcgggttcaatcataaccctcttttgaaagtcgaacctttttggtcccggaaggaggactctcgcccagagaagtaaaggttcaggaaaacacaaccggataccctcaggggtagtcctagaggagtagtcgaagaggtgtccgggtgcagtactacgtggcacccttctaacatcagaccccagtcccacagaatcaagggtttgcctcctatgttagacttgggaaaggtgcacagcacaaaaagcaacatatccttctgtccaatgttcattactctga

SEQ ID NO: 109474 - DNA, 584 bp, Cannabis sativa
  modified_base (234)..(234): a, c, t, g, unknown or other
aaacaataataagttttgccggaaagtcaccggcgccgaaaaagtcaccggaaaaatcaatgtcaccggaaaagtcatcatctttggaaaagtcaccgtcgcaagaaaaagttactgaaaaagtcaccagaagtagatgtctcaaatataaacaaaaatagaaccggttataattgaaatataaccggttctgtaacacaaagaataaaaataaataaaacaaaataactcaanctaattataattaaattagaactgattataactaaaatagaaccgattatataacataatgaatacaaacaagtaacacacaataatttaaaccgattacaaattaaaaaataaaaggaaaattggttcttaaaacactaaaacataaattaaaaacaaaactagttctacaataaaaaatctcataacacataatacctcataaaaccgattatatttttttaaaaacaaaatagagatcaaattcaaaaaatattgaggcataaatatgaaaagaaccagttccataacaaaataaataaacaaaaataataacacataataactcaaatattatataaagaaaccgt

SEQ ID NO: 109475 - DNA, 1356 bp, Cannabis sativa
tccttcacctataatagtagagctcttttagcttatttttcacattaataaaactatccacaatgtcaatgcttctctctctaaagtttagagttttcgatacttagtgtatttttgtaattacaatctcgtgagaaataaaaactcaaagtagatgtagccccattactatcgttagatagggctgaactattataaattttgtgcgtctctataaattattttcttaagcttatcaatcattttgccaatctagcaagttgatgttgaccactttatagcgccaacaccatctaatatggggccttagaaacaggctctgcccccagtatcgattcaatctcaaaataaatttctcgctttggttgtaatccttgtaattcctttggaaatacatcttgaaattttcataccactagaatgtattcaggtcccattagtacctctctcgtggtatcaagctggctaaacaaccgatacatctatcccgtaacaaatcttttaccttaagtgttgagatcattggaataggagatccttgaaccttttaaaaacacacacatgggttcaaatttcattatatttctcttacagtcgatggttatattatacttttcaagttaatccactcccagtacaacatctaaatcttttatgtctaactcaattagattcagcgacagttctctaccttccacgtgcaatggaagggacctaattcacctatcggagataaccaactccctagcagctaacaaagtaccaaaaaactatttggtaatacatcacttgacttattcgaactactgatatcactctactcgatacataagaatgtgtagcacgagaatcaattaaaggagacaacataataccatcaatagaaatttgacatatcatggtagaaggaccaacatcggccactacttgggtcagagaaaatacttgagcaggaactagagcatcctctttcttctgttctagtatcactatttgtagataatttctgttcatgtggcctactactccacgctcgcagcaggctcaagcttccctgatgttgtattttaaatctaggatacttaggataagttcgtttttaatcctgccccaacagaaaccctaattacctagaaatttcttattgggacttatggctggtggatcattaagtatttttcttatgatcattagggtcaacacccctacctagacaaacatttggagaaaacctccaagaatctcttcttatgttacttttcttccaaatctattctttagcacccatagcagtaagggctaactcaaccacttcagcataagctcgaacaaaccctggttgtttagtagctacaa

SEQ ID NO: 109476 - DNA, 697 bp, Cannabis sativa
  modified_base (114)..(138): a, c, t, g, unknown or other
  modified_base (410)..(433): a, c, t, g, unknown or other
  modified_base (663)..(664): a, c, t, g, unknown or other
ttgtgtgattaaatgtattcctagatttatcagtacacagggtttcattgatagtttacttacaccttggataagtgttatgtccattccagggcattggttaaagtaagcttnnnnnnnnnnnnnnnnnnnnnnnnngaaagggaccgatattgaacttgagctagatatgataaacttaccgtaatatctattccattcaatatcacctagttgatcctatatcaaatgatctcaatccttagatggttaggttctagttcagttgcattatttgtgttctttaatctattagttaaagtcgaccaaatggttcttcccgtgatgtataggttaagaacatggtagttcaattaagtggaagggctaatcatagattaggaacctatagcttctatctggacatagannnnnnnnnnnnnnnnnnnnnnnncttggctaaatagagataaatgacagagtgctcattaggacaacccttgttcgaaggaaggcgcacgatgccttgtctgaacacccttctgcacgcagaactcctgctgtgcagggttcgtgtgcgggtaaacaaggctgtgcatgcctcctgcgcacgcggatggtatgcattgcataccatccgcaccaaatgcaattttttcgttttttttttcattttttcatgcnntttcatggaattaatttcaaatttttttgtgta

SEQ ID NO: 109477 - DNA, 543 bp, Cannabis sativa
aagaaagaagaacatgggaagaacaggagaagaaagaagaaaaagaaaagtggggaagaatgtagacttagacgttttatcagtggatttttgtggacgtaggttctataaaaaattatatatttaatatatatatataaattcataacatagtggacataagtaaagctattttttttttgaatggacaataaaattatattaaaaacttattacaaaaaagagagaaaatattacattgaaagccaaaaaaaattgtttctttcctttttctttcttaaaggtttcaactttgagctaattcattttttttatctgaaggcagtaaagagaagaaaagagaaggcttcactgttacagtaaagaaaaggagaagaaagaagaacaaaggaaaaacaagagaagaaagaagaaaaagaaaaaggggaagaatgtagacttagatttattatcagagggtttttgtggatgtaggttctattaaaaactatatatttaatatatataaattcataacaaagtggacataagtaaaactatatt

SEQ ID NO: 109478 - DNA, 611 bp, Cannabis sativa
atttttatcattatttgttaggagggaagtttttttatacaaaaattatactattcttagttgttatttaatgataaaatattaagaagtgagatgtttgaaaaaaaaaattgaaatttaaatcaaattatttcatttcttgacagctgataaacacaattgtaccaaatgtctcgcttgaaaacaaaataataagaatcaaaatgtgagtgtgaataatgatgaaaattcatttcactagaatggtccttaaaatacaaccatataaatgattgcaataaaaattgatttatttccattccattttattacctccaactaaacacaaccttagagaatcctatatcttaccacaatctcaagctgagggtaaaactaaccatcctcaatttgcttattattctttcaaataaagatcttactatattttttattagaatatttacaacttgcttgaaatatgtcacgtaaagcataagatacgggcatccaatgcaatccaaccttttttttcccgtccgatccaatccaattagtaattggatttggaaaatcatcattcgatccaatccaattagacctcaaagtcgaatccaattactaattggatt

SEQ ID NO: 109479 - DNA, 1146 bp, Cannabis sativa
gcttagaagttataattttaaaaacgaatgaaaatctatttttgttagaaaataattggaattaaattatgagaatcaatataaacatgaatatttttatatacacttattctaatcccttaataatatccccagatatcactgaaaatatctattactgttatttttactgttaaaatactttattttattttattaccaaaaacttaaccattttcagaactagattagagttgtaatagcttagattaaataagtattttttttatctcacacaattctcatgggtttgacctcgttcttcacaatctccatactacaataaagattcgtgcgcttgcgagttgataaatgtaaaacgtacggctttcggtcacaacaagtttttaacactgttaccggggaattgcaaaaagaaaaactattttaatccaaattggtataatttttctactagttattatattatacatataatattatgtttcttcgtatatatataaagttattattattattattattattattaaaacttacattaacggtttactgtaagttttgaaagattatatatatttattattaatacatataatattaatatactattattatatacattacttaactattaagaaaagcttattattataaatatatataattatttataattaatactaatatttatatttatgttaaatatatacatattatttattttccgctatattttaaattcagtctttattttcgcacttatatggtaggcactacttcctaattttttctattattttaatttttgtgatacttggtgtatgattcgctgggaacgaaattcttaaaatcgtttagttaaaaaaaattattgtgggttgaaattaaaagtgaaaattctgacatcataaaaccaaatcaattaaatgttgaagaaaaaactctcattgatcatttttctcctatttccgctaatcctctatcatgcattatttttcttaaaacaaatgctacacattttgagctgaaaaccttctataattcaacttttaccatttttttgtgggttaggtaaagaggatccatacatgcaaaagattttttagaaatttgttctacttttagatttcaaaatttttctga

SEQ ID NO: 109480 - DNA, 612 bp, Cannabis sativa
  modified_base (70)..(73): a, c, t, g, unknown or other
catgcaacataaaaatgttatttctgatctttattaataagtaattctaattatattgaaatggattttnnnnagggcacaaaacccaacaatcacaaggtcaggaggaaagttaatgtaacgattatttttggtatgggaaaatggatcaaatgcaataattccctcaacacctttagtggtcaaattactcacaagccaatgtgttgcattccattacatgaaaccgtattttcatccaattttttccctttaagaaaaatatacaatctactccatttttaagtctcaaaacaaaagacttcaacacaataatttaacgaacctgacgcctaataataaaatagtactattgctttataccttttttttcacataactattattattattgttattatttgggtaacaaaccaatccgcccattcctcttgatggtagaaaatctgattctattgaattcaatataaacttatgtagcttaatccattgtcgtgtgagtggattgcaaataacaaaactaggtggtaacgcgaaaccacataagagaaacaataaatcatccaaagatgcatacaaagttattttgttccatggtaagaaattgagata

SEQ ID NO: 109481 - DNA, 639 bp, Cannabis sativa
  modified_base (586)..(589): a, c, t, g, unknown or other
aattaacgaagcaacctaaatcgcaaccaaaatatgtataagaactcacatagaaactactaaagaaattatcgaaacaactcaaaccgaaatttttttcaaaaaaattaaaattaatatataaaataattctcctaataataataataataataataataatatatagctcactatttaattaaaaattgcggcacaaatctataattttagtaaatttagtcatactgtaaacttgtatgatatttatatttttggattgtgacataatgtaatgacgcgcgcctattttttttagcatagtgcgttgtgtgtttataatactaaataatattttgaattctgtattttgcaaaggttattaattgaacttgacaatttctattttgtcaagtgataaaatagaccttatattttccaaaatagtgaaaataagatcatgagctcaattttcaacaattttattttatttttaatataactaactttaaaataatttttaacacgaataaatacagaaaaatgtaatcaattttatctgttgtcgagtgaatttcgcaacaccaaaaagtattatttaattgannnnaaagagaattttttgggaaatgactagtgcgagtattcaacctaaaatgg

SEQ ID NO: 109482 - DNA, 1605 bp, Cannabis sativa
atgaatgaggtgtctagaaatctaatacatccaccatgtaatcgaactaattagtattttaatttagtttggatgagtaattagattttatattattatatgtaaaatatatatatatcaaaattatcattaaaattttatttttgtcggatttgatagatccaatccaatacatattagatgaatctgatccgattcaaaaaatactaagtttaacatgttggataaacttgaattaaaccaatagaacatcatatgaatagaatcaatccaatttaatatctaataaatgttaaattaattgaataactgaaactaattagatcggatcggataataaaatttattattcaatatataattaattaaatctgaataagtctaaaaacgtactatcaacactcttatattagatgatatgagattttatcctttcttattagaatatgaaatttctgagatcatgcatttagaatatttatatatttaaaatatgataggaatgggtcaacttttattttctttcttgaccaattcgacagatttacattaaacaaagagtaatgtacaagaaaacaaagtttaaaattcaatttgtcaataattatatatgtttttttttaatcataattatatatgttttgataatgaaacaatagctactcaatactagtactcatgatgttacaaacattatctactcccaaactaatatttcaataagtatccttattaaatattttaaggtgtccaataaattaaaaggtatctttcatattttctaatgtgatattgatataatatatatacatattattgttgttttatggaaatatatatggcaattttattatatagaatcagccattacaatgttcatcaacttggaaggtgagttggttacatcaaaaatacatactgacgagtaataagtgctaaaattaggccagagaataaaaaaaatgaaataaaaaaatgtctcataattaactaaatatatatatatatatataaaaaaaaagtaggcaaataaaaaaaataacaataaaaaaaagtctttttcatcaattttatattattgttgttaattatcataatttgtccttattaagcaaataaaaaaaaaagttggcagttaagctagaggctctgctcgtaaatacttaagtttaacttagttatatttttaaaatttttgtaagtacttaatagttaagtataaaattattatccacgtgttattttcttattattatactttaaattaattttcaaataaaaaataaaaatttaataacttaaactaattaggactgtcacatggcctttgacttgacagtacttaatcatattacgaacttataaattttttagaaatataacttaagtattaataattatcttaaaaaattaaatttaaatatttatctataactataaattaaaattaagtatttataacacaaaataattactcgtatagatatgtattgcagactttgctatgtgctcggtgtggactgtacggaacatagaatttccaatattattatagttttgatagcatatttttttataagttaatgattctcaaactaatatata

SEQ ID NO: 109483 - DNA, 584 bp, Cannabis sativa
tttccaacggtataaagaacgtcccaaacggtgtcccgagtcaaaagttatggccaaaataaaaacttaaaaaaataaataatctaccattatcatggtcgcgaccagacctatgatagtcacgaccactgggtttaaagacccagaaaacccagttttctgcttcgaaaataagtaccaaaactcacccaaactcaccccaaacatacatatctctcagaatcacaaaatagagctgctagcatataatagagggtcaaaaacacatatttcatgcatcaaaatcccatattaaatccaaaagtataaaaaatcaagttccaaacttgtaaaattcaagctcttgaacaagagcttcaaacccaacaactccatcaattttcaaccataaattaccaacaataaccttagttcaagataagagaaaaccctagaattcttacctagagctcaaacaatcatttaccgagaattcaaacacaacaaactcaaactaacaagagaataacacctcatgcaacatacactttcaacaaccaaaatcatgttccatcatcaagaaaattcagcaaggaagtcaaaat

SEQ ID NO: 109484 - DNA, 1047 bp, Cannabis sativa
  modified_base (750)..(755): a, c, t, g, unknown or other
tgttgtcaacccaagaacatttaagaaatggaattcagaatgcaaaataattgagctcccatatttcttcaataaccccataatacgtcgtagtatataaaacatggtttctatcttttgcacttgcaaaatgcatggtttctgcgacgatacatatgccattattttgaacctctcgagcatcatctcttgacttcgtatggaaacatttaccccttacaatgtacgcttcatgctttgctactgcaaaaattggtccaagggcaatacgactcaacacatcaaatactccatgctccggttcatttaactttgctataatggtattccttaaccacccaatgaaagtttgacgatgctagtctgcaaccaatttttatttatttttatgatttcttagaaccattgattgtaacatctccatatggtcattgtaaaacaagtaaggtaaatcaagttattgttcatcgtgacttaagaaatgttaatcaaaggaaagctacttacgttatatatggctaaacctctgcattattgttcatcacgactaattgagcttgatctagttcaaacttggacactatcaccattgtccctttcccccataatcctctatcaacctcatctaggtcagttcttggtttgctaattcctattgcctcaacttcggccatgtactctaaacaaaattccacagtctcttcagatatgtagcactcaatcatagatgcttctggccgatagtggttnnnnnnataacttttaagtaccttcatatttatttctaatggatacatccatttcgcccaaaccaggccacacaactttgtttctctcactagatgaatcattaaatgtgtcacgatgtcgaaaaggatggcagaaaaaactttatgaggttgcacaatgttttgagtacatgttcatgtaatgctctaacttatccatttctaattccttcctgcacaacttattaaagaaaatgcaaaaatgtgtcaaacactctcgaacatttttcggcaagactgatcttatgacgattggaag

SEQ ID NO: 109485 - DNA, 633 bp, Cannabis sativa
ttcaagagacggtttatatgagtcaaccacaaggttttgaagactccaaatatccaactcatgtttgtaagttgcataaggctctatatggcttaaagcaagcccctagagcatggaatcacaagctgaaatcaactttacttggctggggatttactgcatctaaagctgacacatctctctttgtgtatggcacgggttttaatcttgtgattcttcttgtttatgtggacgatattctggttacgggccctaataaaactctaattcagaagcttatcttggatctcaacactcaattttctctcaaagacttgggtcaagtccattactttctgggtgttgaaatgcatcgaagctctgaaggtctctatctgtcccaaacaaaatatattgctgatcttttactcaaagtccatctcgaaggagctaagagctgtgctagtcccacttccacttctcacaagttatctttgcatgaaggactcccttttgaggatgtcacgttatacagaagcaccttgggtgctcttcaatacttaaccttgacaaggcctgatgttgcctttatcatcaacaagttgtcccaatttattcatgcacccactcatgttcactgggaagcttgtaagc

SEQ ID NO: 109486 - DNA, 507 bp, Cannabis sativa
ttgtcttttcaggtgtgttctgacaggttggctcggtatagtcacaatcgggtatttcgggcgaattgggttcgggcccgaaatgcaattttaattgagatatataaaatttttatttattagtgataatctgaaaattatgttgggtttatatgtgaatgaaatgacattttcacccttgtttcatgcatatgcttcatttaggccctaggggcaatttggtcattttgaccatttgactcacttttgcaacaaaatgaatttttggtaaaatagaaaactcattttctgatttcctagccctaaccgaacacccctctctctctttcaaattcacactttgttaatcttcttcaattggatttttgggaatttggcttggattttggagttcatttttggtgttagaagcttgggattgtcgtaagcttctaagttgtttctttttatgaatttctcttctgttatttgagattgagaaagcatgttttttttgattgaatatgc

SEQ ID NO: 109487 - DNA, 745 bp, Cannabis sativa
  modified_base (51)..(56): a, c, t, g, unknown or other
atgcgtgccccctgaaccttacccacgaacaccgctgggttagcactatcnnnnnnaacaccaccatcttccgtttacagtcaatcatcgctcaaccaccattcccaggattatgtcaaaatcaaataattgtaactcaattagattggcggtcaactcacaaccgtcaatccaaaaagacaaggaccgaatccaccttgtcgatactatcaggtttcccgcgggtaacagggttccaaaccctgaagcataaatatcacatggcttatgaaaaatttctatcactctactcgatacataagaatgagtagctcctgaatcaatcaacacagtataagaacaaccattaataaacaactgacctgtcacaactgacagactagcatcagcgtcagcctgagttatagtgaaaagtcgccccgggttctgagcagtattcttctcaggcccctctttcttggcttggggacaatctctgataaagtggcccaccatgccacgttggaaacatgccttggctcgacactcaccgagatgatgctgcttgcatttagcacacttgggatatgatcggaatgaggacccgcgaccctggcggccacctctgtttccctaaaactttctatttccccataatgctctggaagcgtcagccttccgtttgtgctcagggttgccactattggtccccttactgatactaccactagcaagcggatttaatgccatgacgacatcctttgca

SEQ ID NO: 109488 - DNA, 561 bp, Cannabis sativa
acacttatcagttggcttcgaaatgaatttgttaagtgccgccattcttcctgtcagggcctgtacttccttaggctttgtcggggatggcatgtccattaatgcattgatttttttttcttcaggatttgcctcaatacccctcgcgttaactatgaatcccaaagactttctcgaggagactccaaaagaacatttttttgggtttagcttcatgttatacttttttaatattttaaagcattccacgaggtctgaggtatgatccttactctttatcgagttcaccaacatatcgtcgacgtaaacctccatgtttcgccctatttgatttgtaaacatttcgtttactagtccctgatacgtttccccagcgttctttagtccgaacgacatgactttataacaatagagttccatgttggttacaaagcttgtatgttcttgatctgggacacacatttttatgtggttatatccagaatatgcgtccacaaaagacataagctcgtgcccagcagttgcatccactaactggtcgatcctgggaagtggaaaaca

SEQ ID NO: 109489 - DNA, 611 bp, Cannabis sativa
tttgaattaatatcggtattagaataggatttgcataactacatctctaccttactaagctctttatctcatcatccactttctcatcattttattatttttacttcattcacatttctatcattttctatttataataatttttagtagtaatttacctccctgtggatacgacatatagcccatttactaccgcaaccacagtgtaactaattgggcaacatcaattttttgcgttgttgccgggaaggtttctgcgctacaagaggctagtatagtaatttattttttttctctattattaaaagaaataatattttgtccattgttgtattcatattttttagttaatgtttcatatatatatatatatatatatatatatacgtaagttattttttttttattttctttgccacgttattatttctacagtctataaaaaaaaaactaaaaaaaaaagctaggttcatgttttatttgtgcatacttataatagattttgttattgttattattattttttttatctaagttaggcttcttccataattaagtagcttacttgttttatgtatacatattaatttagtggcttttttttttttttt

SEQ ID NO: 109490 - DNA, 771 bp, Cannabis sativa
atagagtatacattaaaattcttatatatttgagtgtttatcttctcttgaatataataaatttatagtatccaacactttgttaacagttcattagaaacacttttaatatatttagtcttttcttgagaaataaattataaaaattggtagtattgtcatttatttgaccatatattcttgcactaaatagatacatcataattataaatctattttttgtatttaaaatatttaatataataatataatattatttataagttttattgtatatattaacataaaatattatattacatattaaattttaagttctatttcatctgataaaatgtttaattattttaaaatattacataagttgttattctaatttttacaatatttgatatatgtaatttataatttaaaatgcagatgtagtaacttcttcttgttttacttctttaatataatataaattgaaatcattgagtcttcatcttctcttgatcaacataaatttataatatctaatatttagttgtcaattcattagaaacactttcaatatatttattattttcctaaaaaataaattataaaaattagtattagtcttcaattattaattattttagtatataataaataaataaatatgtgtatattaaaatcatacttttttagaatattctattatttttgttgcataacagtccaaaatttattttactttgtgaccaaacataattatagatatgcttcaagtgttgtcttttattacag

SEQ ID NO: 109491 - DNA, 1145 bp, Cannabis sativa
tagatttttactagtattaagataagttaccattaatgagtgaaacacttagggagtttaagtctcattcctcgaaaattcatgttttaatcttgtacggagattaagcgatttgttataacctctcattattgattctatgtgaatcatgcatgcctaaatatagtgttcactttgtaacctagaatttctccttaataagctttttaaactctagtaacccagaatcaatgattgtcttctgttggtctgaaattactgctataaaatctttcatctccttcaaaatattagtgtaaacaccttccagcacatccttggcaaccttctccgtaatatttttaacaccagatgtttgtcctttcactatcctcttgggcatggctggtcctacgaaatcatcatcagaagtactcaatccataccactcaaaataaaaaagatccaataaatttttctctgaatcagttggttcaattagtacagctttcagctttaacaaaaaaaaaatagtttagcataaaatctttgttaccaaataatatacataaacaaaatgaaaaaaactaatgactaattttacatttttttttaccttagatgatgaaaatacttttttctcaaatttattttaatttggaaaagtactatcagtccacctacaaattctaaaagttggagcagaatcatacgaaaaaatatttttttcttctttaaaattggaagtatttcatacaaccaaacttgataagctaatggaaagtcccccattccgtattgcctaacacaattctccttaatatctaaattcttcttcttttccatctgttttgacttcagcgaaaccctcaacccatgataggtatactacaatgatgcatgaatcaactgagcttgcatcgaaactgatggcatatctagaaaatgatcaaaacatatttccttaaaaagcttaagttgttctgtagacaattttttcttaatgacctcaataaaatctacttttgaattaggatagaaagaaatcttttcaatcagtttatctttaagcttaaagtaataatctcatagctgcaaaaaatttatgaagaaagaaaaattaagagaaaaaaaaaataaactaacaatttgaaaaaaaaaaaaaa

SEQ ID NO: 109492 - DNA, 594 bp, Cannabis sativa
ttgtggacatcttaactagtgacagacacactcacaatggagtatagcccccaataaaaaaaattacattaagaaaaaattaaatatttttcttttcatttgataattatagcacaaaaaatttaaaaaaaaaaaaaaaaaactccacaaaaataaataaattaaaataaagtagacttaaattttttttaataacaattaatccccacataataaaaattttaggtctgtcactaatttttactactagaggctaactcaagtggccaaaagagtatgaatgggtgtgtgtgttgagagtcttagaatcaaattttaaaatatgtattgtaatatttatatatataaatgcttcaataaaaaaatggtggacatcattactacgagtatccaaaaccttgagaaatgctatattgctaaaggatacttatgtttaaaatttattacaaagtattatattgttacgagtataattattgaatcttatatattttattttaataattattatgaaaaattgctaattattttctagatgttattaggcattactcatagcgaatatgaatcttttttaagagaaaatatatgtat

SEQ ID NO: 109493 - DNA, 634 bp, Cannabis sativa
  modified_base (176)..(182): a, c, t, g, unknown or other
tcaaaatactattttgaaaacacaaaatttaaagtttcatttaagttcttattaaatgggtgtaccgatgcaacccttaactgtttcggtatctataagaattttctagtctaaattttttcatagtcgtgtacattatagttatttaaaacatcctataaaattttgagaaattnnnnnnnatttacaatatagaattcaatgtttaaaccgtttatttcacactcgtataaaaaaaaaaaagtcacgcgtacaacaaactctttgaccactattttttatgtgttaaattttatttcttaaaattttgccggatggtttcaataactataacgtatacgactatgaaaaagattacactaaaaaattcttataaatatcgaaacagttaggagttgcatcagtacactcattttaaaagagtgtattgtagaattttccaatattattttaccccattaaaatatactactttctaattcaattaaagactgtcattttgttcccatgaaccatcccccaccgcccccaagaaaaatagaccaatgctacattatttggttttactaaaagggttattcgtcaaatcttatcaataagaaaagggaaacttttatggttttttttttttttt

SEQ ID NO: 109494 - DNA, 1263 bp, Cannabis sativa
gagcctggatctctttctctctttgggtttggttatcaccatcttacccactatgattgagtacttgacttactatatgtgggcatgacactctatcactataggccgattagtgaagcacaatgaaagaggcgaaatcactatataaggaactctctcatctactagttgtcatagaataaaaactagatttggtaggttaaaaaatcaagttcagttggatgagatgagagcatcatgttctttttgtagtgtttcaactggggcttaggattgaattatatggattaaaaaagaataaaattgttgacataaaaccccatattacatgtacactgtaaaactagaatatttacaaaggattacaagacagtaaaattattccctatgtggccttcgacctctaaaatacctagggagatcacttaagttagttacaaagttttaaccactttgtaactaactctcattttctcagcattccactacaacaagatatataaaccaagagcaacaaaacaaaagaaaaaaagaacaacacaaaaaatcagatccatagcagttcaatacaacaccagaatcgggtccagagagaatatggccaaagattgaatttggaccttggaacccttggactagggttcggatatccaactcaaggggagaattgttcatgcaacaaagaaaagaaaaactactgtcagtatcaaattcagagagaaacaaagaaaaagagagagtatcaaaacactgtaaaatattagggattaccaaaataatacctgtgtgttttggaatcccaccactgtaatctcttgatcattgaagatccatagtgaaacgaggcgagcgcgaagaggacgtacccaacacatttttagggaacctctataaaaatctggtgttttcttctcctttttctttgctgtttttactattgtgtttagctattctatgtttgtgattttttgggtttgaatcggtttgggaagggttttttgttcatcgggttggactgatttctgggttggtgttcttcgtgttcttcagagaagaaccacgaagaaggtgatcgggttggggtttaatttttgggttattgtctctgtgttctttagagaagaaggaagaagtagatcgtctctgctagggtttcaaagtggaggttgttatttgtgtgtttaggaaataagataatatatatgtgtgatgtgttggaaatattttaccaggatctaaatttactaccaagtatgtttcatt

SEQ ID NO: 109495 - DNA, 513 bp, Cannabis sativa
  modified_base (471)..(471): a, c, t, g, unknown or other
tttttgtttatgtttgcctgaatcacaattgacccatattccctcattgatatcgtttctaatgtattcagtgtcgtcttcctcaaggttacgatctattcccatagcttgctcatgaattggttgtccaacaatgaagtcatcataacataagtcagcatttctcatcctcttcaatctctaagaacctcctctctggtgtcgataaaacaatagaccatttatcattagccggatcaaaaatgtaaaaaacttcaactgcttggctagccatgatgaatggatcattcttgcttcctctcttacttaaatcaaccaaagtataaccaagctcgtcaaattttactccaaatttgttgtcaacccaagaacatttaaaaggaattcggaatgcaaaataattaagctcccatatttcttcaatgacctcataatacgtcatagtacctaaaacatggtttctatcttttncacttgcaaagtgcatagtttctgggacgatacgtatgccac

SEQ ID NO: 109496 - DNA, 559 bp, Cannabis sativa
attttattttttttataataaaatgagtgcattgcattggataaggtaattctgtattatacttctaaaaatttgttttgatacatctttatctattttggcatcaggagaaatttttttttgtcttttcaaaatcatgtacgttgtagttataatttatgatcacttgcaaattctcattaaatttcttatatgtgtgtaataataaattaaactttatttttatcactgtaattttttaaaaatatataagtaatcttaaaaaaactacagcatacgaaattttaaaaaaatattagctaaaagtaattttcacaatacctaaacagataaaaattatacaaatggaaaccacaatttaggaggatttgctatatatattttcatcattatatataatttttttaaggataacatacaccctgataatacgagaattgttattaattatcaaaagtgtctaatacctctaagacgtgtcacattataattaattatcgatattctttaaaaaattattacaaaattatataaaattaatacttaattacattaatta

SEQ ID NO: 109497 - DNA, 551 bp, Cannabis sativa
aaggctacacgaatgcagactgggcaagctgcatcgatgacaggaggtccacaggaggctatctaatgtttttgggcaacaatttagtatcctggtccgcaaaaaaacaacaagttgttgctagatcaagtacagaaagcgagtttcgagcccttgctaatgctgctgctgaggttaaatggatcacatctctcctgtctgaattacaagtaccactctcacaggctcctattctatggattgacaatcaaagtgctgcagctcttgcagcaaatcttgtgtttcatgcaagatgtaaacacattgagatagatctccattttgttcaagaccaaatccttgccaagcaactttcagttcgctatgttccttcattagatcaagctgcagatatactaactaaaccgctcactacagatcgttttaactacttaaaaagcaaacttcaaatggcttcttcaccatttcgtttgaggggggatgtaaacgatataactgttaagtctgacagttagtttagttagttacaaattagttatgcaagtagtttt

SEQ ID NO: 109498 - DNA, 824 bp, Cannabis sativa
  modified_base (449)..(456): a, c, t, g, unknown or other
tgctaccttgagccgttttatctctcggtccacagacaagtgcattcccttcttcaacatcttgaagaagtgtcagaaatttgaatggcgcgacgagtgtgaggaggcattcaaaaaactaaaagagcacatggccaaacctccaatcctgtcaaaacccgttctcagagaggacttgttcctatacttagccgtctccgagcatgcggtcagtgcagccttagtccgggaagaggagaaaactcagcatcccgtgtactatgtcagcaagcgcatgataggagaagagatgcagtacacagtcattgaaaaactagtcttttgcctcctaatggcctcgaggaagttgaggccctacttccaggctgacccaatcaaggtgttgaccaaccacccactccggcaagtcttacagaagccagacgcatccggaaggctcctcaaatggnnnnnnnngttaagccaatttgacctgcactacattccccgcatttccataaagggacaagcgttagcagacttcatcagggagtacaatgaagctgaagctaccgcgaacataccgacaccatcagtcccagcatggaaagtatttttagacggatcctccaacgagaatggatccggagcgggggtcgcaatgatatccccgagcaaactttgactccaagcagccctacggtttgacttctcagcttcaaacaatgaggtagaatatgcagccttgatagcagggctgagattagcaaagactgtgggggctaaaagagtcgaagtctacagcaattcccaactagtagtgaaccaggtgtcggaagaatatc

SEQ ID NO: 109499 - DNA, 1125 bp, Cannabis sativa
  modified_base (181)..(190): a, c, t, g, unknown or other
aaagggaatggaaatgaatggtatggtattgatttccatacaattgtttactaaattttggaaaaggacaaactagtgggacccaaacaaattagggagaaataaaagggaaaggttctccccccatttttatagggaatgtcttttcctttccttacttaatttattttaattttaattnnnnnnnnnnaaaataaaaaagacaaatataccccttaaaaatctataaacaaaaaatacttacatgttctaataatggcaattttttgtcaaattaaagcattctgattacttttcctagttatgtaaacaaaataatacgattctggttttccttccggacagtttagtaaacatcataataaaatattgtttccgattattttctattttaaacccatacatttctctcattcattattccgattccaattacagttttgtaaatgcgccataagtttaatactctataaaaatataatacttacaaatttattgcaactaaatatttaaaataaataaaagtacaatattacttactcataaaagaacaataataagattagatcgatttttaattcaattttgaggttgacattcaataaccaatccaatctaattagagtctaacttctaatatccaaaccaattcaattgttaatagagatccaattttttgtaattggattttattggatcagttcagttaagttaaattggattggatcttatccacccatatttactagctagtgattgatattatagatatacttacctaatatactgatctattggaattttatgaactacaagaaaattgggctaattcggacccccaatctcagggagcctgtgtgtgaccgttgagattgactctaaaattaaaatgaaaaagtttgaagacactaatctcggcggtacacttgtagcctgtcatattggagttatttcccactaaaaatggacaaatctcgatgggcccattatggactgccaagatagctcccgtccaaccccttactatgtacattaaggtgaaacatcccactaattaatgttgacagtcctagatgagtctgtcgacatagccccactacaaaaaataacaaaatcattataatt

SEQ ID NO: 109500 - DNA, 675 bp, Cannabis sativa
ttcaataaagaagtatttgattgtctttatcttattaaattgttttatacggactatcctatgtgacatctcgggaaatcggggtgttacagaaagtgaagaaggtcagtttactaattgtaaagaaaatgatagggggcaagagattccaaggaaaagtggccattgtgtctggttccactcagggcataggctacaccatcgtgcaccatcttggcttggaaggtgcttctgttgtcgtctcttaccacaacaaggttaactatttattatcattataatgatatattcatgctatagaaattaaaattcattcatgccatagaaattaaagtgtgtatatatatacatgtagttatagcatatcttttgtttaattaaacatgaatactttattgggaaaatgttgatgaagcaatccaaaaacttaaaggtcaagaaatccaagtgttgggacttgtttgtcatgtctctaatacccaacaaaggaaagatctcatacacaagacactcgaggtcattggagttgtctaaataatgtataaataatactaattaattagtgatgaacttgatccatatgacttattgaattatagtgtttcataataaagtggttagattaataatgaatgttgacatattttatttatatatgtaactcaaaataaatta

SEQ ID NO: 109501 - DNA, 788 bp, Cannabis sativa
ataagaaaattaataaaagaaatctttgtcaacgttcttcttattctatttaatatttaattagcatatctagtcaaacatataataattcttacagtaataatttttataccactaagattatcaataatatgtttcaaacaaaagccaaattgcatgatattcctctataattgatctctgctggcataaatgtattttaaaatatttaattacgttcagttttactgatataacatctaaaaaaaaatagatctactcgggtagtcaaataatactgaccatatattttttttttcttcactgttatattatttattgcacgacaatattaacattaaaatttggtttatttcctagctagatagaattactatctattgaattaattacattcgcaccaatctatataatatatacatatatagttttgtttactgcacaataatattatgatgatgatagagactgtacagaattaatatatgaccttaatttctttctttctttctttcttttcattttcaattaaatatttagatattttaccacatttacaagcttttcacagtaatgttttcattagaaagagcaataatattataataggtgactgcttcataattattgatagattaacaagtaacaactttaatttctcaagatttatatgaatatgttagtaacttagtatcatgtagtacatattgagcaaagttaatcgttttctaatattattatatcattggattctttcattttacaaattactagataagggagcgtac

SEQ ID NO: 109502 - DNA, 534 bp, Cannabis sativa
atgccaattttactaattttccaacccctctctcttcgtctctctcaaactggaaaaaaaaaaaactccagtaatggtgtgtagtgactcagagaagcggaggaggagtgtagagtgagaacttcaagcccggcccattcaatttgaagacataattgactttgactttggtttttcaactgtatacaatagtttttttttccttcggaaatggagtaaatactgtgttttttttttcctcagttttagagagacgaagagagaggggttggggggctggggttagttttggaaaattaataaaattggcatatattagcaattttagtaagtatgtatttaggaaatagataatggggttttataagtatggaaatttaaatttcccttatgtatttatatttactattatcatttttaatattttattattaaatttagttaacatactcatttacattaaatgacttgcattattattattattttactagtaaattttatatttacttttgtattattattatttttttt

SEQ ID NO: 109503 - DNA, 597 bp, Cannabis sativa
ggccttatacaggatctgacccctgttaaatttggtagcaaatagtccctcaggctacagtcattgtggttgcgaccattagcctggtcttctacagctcctccattgttactgttgttaccgacgttagcgttgtcagccatatctacttcgtgttcaatctctattgaagctttttccaatcttttccttcttctgttttgcctgcaagtcttctctatttcaggatcaacaagtaatctggcagttgcaccttgacgtctcataaactagttaaacatgagaaaaaagataagaatttgaaatcaacagaattagtactaaaattgaaaagaaaaaaaaaaacataattagaaaaaaaaatttaatttttaataatatcaactaaaaatccccggcaacggcgccaaaaacttgttgtggtaatttgtaacacgcaagtatacgtatcgttttaacaagtaatactcataaagagtgaggtcgatcccacggggattgtagttaaaaacgttaaaattaaattcttacttctatttggctaaataaaattttaagagaaaatttgaaatcagaaaaacaagaaaaatagcgaaa

SEQ ID NO: 109504 - DNA, 1919 bp, Cannabis sativa
aaactttgaaacttcgagattttctctgccagttcccgtcgcgactggcatgttccccgtcgcgactagaacaggcagcgacacaatttttggtttttttttctcgattctatcaccacttgttctcaattcttgtacatactttctataaacacccgaggacctgaaacaaaagaatcaagcgtaaaataaccctaacactaaaaacaaagagtgaaaactaaccgaaaatatgacccgaaatttagactaattttagcctaacatggaaaaatcctccaattgaaaaaatatcaaaagcacttcaagaaagagttggaatctcgtcggtgccaggatcgacaacaattttagtacaactcctatatggtaattcgagaggtgctaaacttatttttttggctttttaatttgttttccatgttatattagtgtgtaatgacatttgtgttatagttttaatgatttttgtgcaatggattgatgcttgtggtagtggtggtatatattagaagataaaggcaaattttgcatttgtgatttaaatttagatcaatttttattatatgataaatttgaatcaacttttgacacacttttagatagatctcaaatttacattaagattaaatacatggacctaatacattagctgctcttgcctctaattgcccaaatttgaagatgataacaaaaagtgctgtttacgtatctcggattttgtaggttaatatatattgtatatttttatttaatatatacatgatatgtgaaattcaaagttaaatatatcatttgacaacatggataattcctgtgagtagatgggttttgaaattatgtaacgaagtagaggaacttctccaactagcagtgtttcgaaatagcaaatgcaaaattatttactaaatcgaataatccgcccaaactaaactcaaaaaactgataaaaattataaaccgaaataacccgaaaaaatacaaaccgcccaatctgttaattgggcaggttaaaaatagatccaacctgcccaattaaaccgaataacccacccaactcgactttgattttttttttactttttagtttttattatatataacataaatgattaaatatataataatataaagttacataattaattattattttcacaggcatatatattttgttgtgctttggtagaatttgatatttttaatttatctttttaaattttattgactttgactttgaaactaaaaaaaaaaagtttagccagtttgggtgggttaactctaccaaaccgcccaaacagttggttggtttacagattttttttttaaaattgcgtgggttgcacttaaattttagcaacccgaactttaaattgagttagaaaatatatagaataaaccgtcaaaactaactaatgtacagccctaattatatatatatatatatatatttgaataaaagatgatatcattcactcgtaagtggcatcaactattacaatgttctttaaaatggtagaagcatttagctcactgtacgtaataggatcctttaaccatacgatgaccttattagcagatcgattaacaaaagaaactaaaatattgttcaaagtagataaaactaaacaatcctctaccaacaaatcaaacttacatatgaacttaactattaattgtttgaaaaacaactaaagaggtactatgatacgctaaaataaggtggcgtttggtaatacttttttaattaattttctgtctttaaaagtaaaaaagtgaaaatattttttaaaaacatgtttaataaaactggctgcaattgaaaattatatcagaagagaaaaaaaaagtcttacacttctaacgaactggctgcaattgaaaatagtagaaacttaatgtataaatttgatgtcattt

SEQ ID NO: 109505 - DNA, 515 bp, Cannabis sativa
caataatactgtggtagtgagaggtgcgagagattctatctgtgctatgttggaaatttatgaggcagatgaaaatggctactacctgggtcttccttgttcggttgggaggaataagaatgctatccttggctttcttaaggataggcttcggaagagaattcaaggttgggaaagggcgtattttgtctcgtgcaggaaaggaggtattgctgaaatctattgctcaagcattgccgaattatgctatgaatgtatttctcttgcctttagacacttgtaaggagttagagcggcttatggctaagttttggtggcatttgaattcgagcagtggtaaaggtattaattggatgagttgggagcagttgtatcgtcataaacatctggaggactgggtttccgaaacttaagagactttaattttgctcttctagggaaacaatattggcgattgttggttaatgatgactctttggttagtaggctctataaggcaaaatattatgctcatg

SEQ ID NO: 109506 - DNA, 1099 bp, Cannabis sativa
tagagtttcaaataattctaattgtcgactagaggcacacactgagtgaagatcttccacatatcttttccttaagtgttccctcaaatgtagctcaattaaatccctattttcgtggaatttgctgaccaggctgagataatagtgggatttcatatttaactcctttcccaaatttttactgtaatatcaggataaatatttaatatttttgataatttagcaacttatgtaatttcacttcccctaaaaatagtgaagtcattttactattcaagggacgctttttgcattctaaagagcaggcactctacaaaaatttctgtacacttttcaagagctattgggaaactcacttggtcagactttatgatctggatagttcttcatagttatacaacaaaaagggaagtaggctattactataatcagggaccgaacttctatgtaatatcccaaaaactaaattatcattaattgcagcatattttatgaaatgtagagtagtatgagtattaatggaatatatgagtaagattataatcttactaggttaagtatgtgataattagagattttattagaaatgtaaaaaataagcataatttattatttacggagattttattggaatatacgagtaatatgcatgatatttgtgaagtaaaatatttttaggtctgccaactgtggaatcccgatgggttggccagaaatatcacaacagtattagtttgtgattttgttataccgagaagttttagttggtattggtgttaccggagtattgcgaggtatatggttttgaccatcttacctctaactttggggtttacttagaggcactgacaaacctagaatttttaatttgtgggggctaatttatcattaaaaaatatttatacctacattataattactcttactagatttatttaattttgtgggagcttttctattattttggtctataattatcaatttaaaaagtttacatttaattttttaaggtaatattttgttagtggaggttattgttacgaaaattataaacactacgcaagtatacgcagtcaagtagtagctcacgcaagtgagg

SEQ ID NO: 109507 - DNA, 646 bp, Cannabis sativa
aaatataactatacctcaaacttatattaatatttcacatttttaaatttccatcttttgttcattatataccatagcacattaaaataatatactataatcttaaacttatatgtatatatttttattaagatgtaattattcttatatagaggtatactttgttaatacggaacttagaaattgtataactaattacgatttagaggttattcttatttataataggcccaaattgggacttaattttttttataacaaattagaggttattcttgaatagggtattcttaaatagaggttctactgtactacctttaagatttttttaatatataattgcacataaaaacgatatactattgttcaaaataactataccaaccacttaattatgcaaggttataattgtaatttcatcatcaaatttttaacagaatggacattttgttaattttcataaaaagggacatttattaacttaattgttagatttatgactattttgcatcttggccctttaaaatagcatctcagtccaattaatattacgttcatttgtactacaaaaaatcttacttttagttacaataaaatttgtgactaaagacaaaaagagttgtagctaattataaattatcattat

SEQ ID NO: 109508 - DNA, 510 bp, Cannabis sativa
tcaattgttttaatcttaagagctttggggtcagcaatcaactgatcatcgttccgtgtcttcgaaatcttcaggtaaaatttgtagtcctttttattttcgttttcagagaaataggctttcataaaactaccatatccctctccccataggtccgttttcagtgatctaggtaccgttttaaagataatttaataatctatatatttttttatgaagaaactcttccctaattctgattatttcgatgtcaaaaaatttatgttttacactgactgtcgatttacagtttttttaaatttctttccgatattgccttagtaaatgtaagatatctctctcgatatctattattttccagcgattcttttactgttagaaagataattcaataatccatattttctttgaagaaacctttattactaaatgtaagatatctctctcgatattgccttagtaaatgtaagatatctctctcgatatctagtcaaaagttagtatctttac

SEQ ID NO: 109509 - DNA, 1449 bp, Cannabis sativa
attttgctctgataccaattgttagcccaagatatgtttccaagagggagagtgaattggaaatttaagctcatttcggtaaattaaaacttttaacacaaaactatgcaattgaacacttgaccaagtaaatgcaagtaatatggcaagcaataatgatagcaaataatcaaacttgtaaagtaaagagtttaagggtaagaaattacaaactctcaatttttaaaaggttcggtagagctaagccacctatgtccttggccttcaaagctatggacttagctttaagttctaatatcgagccaagttaacgggcttggctaacccttacaactgggaaatttttaccaatgtgtttccaaacctcttacaatagttttgcactgccgaggactattaacctctttctcgaattgttgtagtgaaaatctcaatataactaggttgtttacaataccgatgccaacctcacctcaatcaccatatgtaaatgtgtttgaaattacaagaaaattcactctagaagtatggtgatataatagaaacctagaaagatgagcaagcacacttgaaatgaataaacacaaatattggctcaaagtgtgtgaaaagtgtttgttggattttaaacttgggagctcattaatttcacttgaataggttgggtatatgatacaaatgctcaaccaacttgattttttgagtgaaaatcgagttcatatagtgttgggataaaatgtagccatttatagctgttagcacgcattccaagaataaatcttccatgaaccggaattctatatgggaactggaatttaggattgatgaaaaccagaatttcagattccaatcagaattccagatggctaacagtggcaacttttgcaattttttagacttaaacgtgtataactttttactcgatttcaaaaattctgattgtgttctctaagttaaatgaaatgtaatttagaaactcaataaaaaaatttgaaccatcaggtgagaaaacttgttgcacaagttagtgagtgagctaaaatttgaacttataaaccctagtgtactatgcaaatcattttaacaaggctaaaataaatttataccatttgattgtgtgtggtcttgatgtagtgagcttcctagcttgatttttatgttttgatccaaagttgacttctcccgagagttgacttttacttttactttgactttggagttgacttttgactttgagcttttgaagacctcttttgaatagagtcttgaattcttgatcccttgatgaatcttttgctcttattaagtatgaagtagttgatgggcttgttgaatcaactttgggtcactttgagaagtttggtaaaattaccattttgcctttgaaaattttatttttctttttatttgtgctacaaaatcaacaatcattagtaacaaataataatc

SEQ ID NO: 109510 - DNA, 500 bp, Cannabis sativa
ttgtcttttgtcggaaaatcttatgtttagatcacaagtgtgtatcacttttcttccatactttcgaattatgaatgacttcgttggtctgtttcttgatgccgctagtgcccacttgcagtttggatccaagcaacaaattttgtatgttcttgcacatgattttttcactttgaatcggaagtggttcctaattgcatagaaaccaagcacactctggagtgtttctttgtctttgtatatttgtgtttcttctattttaggatgttgtgattagtagttcaccataatttgtgatttctggctccctgtttttgttgttttccagttgctcaaccatttcctctgcctcaagtttgtcatagtccatgaagtcaaaattttctctcccatcttccagtgttgtagcttcaattatatgttgttgatttgttgagtcttctgttgttgctgcattgtattccatcagttcaaatgcgcttgtatgtgcaattaatgca

SEQ ID NO: 109511 - DNA, 1020 bp, Cannabis sativa
cttaatcctaggaaaatgcttgagcttaacacgatattcaggccacaatgggcgacgacatacattctcttgaaatctaagcagtttatcattcgagtaaaacggtgcattagactggttttgctcagacacactaggttcagggattttgatttttttagccactgaggaaggagtagcatcagaggaaacatgtttcctttttgggtgagacttcgacagagggggctgagacgagtcagactcagtgggagggaggggtgaagtggtggatgggggtggagccttagtcgaggcaaaaggaattgacatggaccgagtaaaccttctaggaagacttacagaggaagaagtcttacctgggattggtgtgcatggaggcgattcagacctagtgggggacgagtggggttccacatttggtgagagtgacgacgagccatcaccagttaatgcaaatgttttcacgagacgcccagcctttttgcccactgttgcacagccaccacaccccagaaacagtatataccacaacgaagtcgaactgagcttaagaagatgaatagtttgactgacaagtttggtgaaatcaaatgatggtaaaaacagatatttattaccaattattgaaaaagtccaaaatgcccttatcgttatatagaatgaagcccaagcccattaacaatagtaaaaacacaacagcccaaacccgagatagacaatacgtaaaaaaaaacgactgagaattaaaattttgaaaattattacatggaaaaacatacactcaatttggaaaaaaatagctcatcagaaacgaacaccaatgctttgaaaaacaatctgtagaaggacacctacacaggacaacaacacttaaagcacaggtaagccactcaataagatttgagaacatacagggatcaatatcatatgcatgaaaggataacaattgacacatgatcaaggatgaatcaccaagctaccatttgtgtgtgaagtgacctcatgtgaagcaccaag

SEQ ID NO: 109512 - DNA, 775 bp, Cannabis sativa
ggagtctataaattggctagacttgatggctcgctaataaagaactactggaacattgaacatttacgaccctactattaataaataaatgatttaactcacattacttatgtaaactttaaactttagtcatgaataaagagaatcatttatattaagtaattacaaagtttcattctttaaattacttaaggggcatctatgtatgactaaccgaaattcatctagaaatacattgtaaaatgcaagcccgccatttcaatttattttttttgaaattaaaaggttctcgactaaacctctttgacgaaagtggagtcaaaccgttataactccctgtccaaacctttttgacgagaaaagggtcgaattgttataataccttgatcaaacctttttgacgaagaagggatcaaacatatataatttttgatttataacatatctgacaggagaggaaaatcaaaagttataactcacgtataaagctgaatactaatggttctcgcgagctaggaaagtactaaacgaggcatcgcaacccctttataaaagtacttaaacctagaaaatggatagataatataactattcatacgagcaaattaaaaatatacaaagtgataaaatccttaaagtatatataaagtttgcttaaggaagattataactgcaattgtgaggaaaaattgacaaccgctcgaaaatcataaagtttggtagattactaactacttaaacaagaagattatgagcaatggagaaacccaaaagt

SEQ ID NO: 109513 - DNA, 735 bp, Cannabis sativa
ctggttgaattggcaggtgaatattgattctctgcaaggaatcttgaaatggattaggaaggcaaagaagttcaagttccaaaagaatgttaaaatggctactgttgcagctcttgtttattcgatttggagggctagaattgaattgtactggaattcgaataggcaacagactgctgagattgtgcagtaaattaaatgggttgctaaaaatagaataatatttgtaatgccaaaaaaagtaaagaaaaaagatagagattggttccagctattgtaaataatgttatatagataaaattaaggccttttaaggtgcttttaggttgtaaaaaaataagttttggagcaatgaatacattgacttatcaaaaaaaaaatattacatattgtaacgtattgattcaactaatcatatttatttaatctgatacacatacacacatacacacatgcaatactgtgtgtaactttatttctacaatatatattacatattttcgaatacgagaggccaacataaggctaaactcaaacgataataagggatatttatatgaaggagaggctgagtttttgtggcataatgtgaattcctttccaatttccaactttgttatgagcatagaaagaaagctcattcacgataaaatgtttggagggatgtgctcgatgactaaagtgacacatattcagtgaacaattcgcactcgttgattttaaatgaggaaaatc

SEQ ID NO: 109514 - DNA, 1302 bp, Cannabis sativa
tataatttaaaccatataaaagttaaaaataaaaaaatgccatataatgtggtcaaagttaaaattgccatatttaagtaaaatattttcaaaaacccatattatatgtaattttcactttttctaatttttaaagtgagtggcgagcttaatttgaaagccctaatgttttgtaagcagaagaataaatgacttagattaataatgagagatgatattttcttctaagttataaagagtcggcgtattgcttagttatgggataattaatccttttgtggttctgccaaattcgttcaagggtttaggagacaagaatctctaccttcccttgtatttattttgaatgcccaatatagtagtatgttagtagccatagaaattaacaaattgttaaaattttaaaatacaattacggctaagtaaaagaataacaacataattaaacagctacaggaattttatctagcttgtgaaaaaaaggtaagtcaaccgtatgtatatatggctacaacatgttgcgactagtgctttgtttgttagtattaggatacttagcacaagcctacactgcttcttagagtattaatgagacaaggaactagccgaagctatgaattgctctcattaagtttatatgatatagtagtatgtatggtatgatatgaatttaaggccttagtatctcagtctacccacaaaatgacaacttattgttgaaaaacaattattcataatcattaaacccaaaattgagtatttatttagagcatcaaaaataaaatacacatacctcccatatcatccatgagagtgattatccttcaatatcttcaaagaaatcaccaccaagatctctaaccttgagcaaaagcctagagaacactttgtggagctaaccccttcaatatcttcaaagaaatcaccaccatatatatctctcatacccttctaaccctaaggggttatataataattgagcttgagtggtttaataatggtaaactataatttaatgggtcaactatagtattaagggtgctctcatgatcctctaacacataattaagttgttaaccatcccattatggttattagcaatattaggcgcatagttaatgattgtgtattatggaattaaatctatgattgtattagtccattataataattctaacattctcccacttgggcaatacaatcaagcaaccataacaatgtctatcctatcatataaggtaattaatcaaataaaacatacataacatcatatctagaggatacatatatcatgtatgaatt

SEQ ID NO: 109515 - DNA, 777 bp, Cannabis sativa
aattttgtaggatatgttaaataattataacgtacatgaatatgaaaaaaaaaattagactaaatttgtttttctagatgccgaaacaagtaggggtgcagtaatacatcccttttaagggggtgcattgtagaatcaccctaaagtaattatgtaagatacgcggcaaactctttttcaaaataaataaataaatacacggtaaacttggaaatattgaaaataatttataattaaaagtaaatttcaatattttattttacacttgtataaaataaaaaaaattacaaaaaaattaatttttgtaaaaatttacgtttaaatttttttatatatatttttacgatattttataaaagtacaaaaaataaaaataaaaaatataaaaaaatcacaaaacataacatcaaaacaatataaaaaaataatatataaataacaaaaatataacataaaaatacattagaacatacactatattttatgtaaataaaatttaaaaaacgataaacttgttgtgaactccttacagaccattttttttttattattattgtttttgtatttttttaaaattatccaaaaaaaaatacatatgcaactgactatttgaactaggacagagtcactttatgcatatggatgtattggcattcctaaatattggtagaaacttatttttattgggaaatttgattttttatgcttacatttgattaaaaaaatttccctaaacacataataactaatatttgtaggatatgacaacttttatga

SEQ ID NO: 109516 - DNA, 1101 bp, Cannabis sativa
tgttgttcaaaccctttgaccattcccaattccttgacttttgttatacccaggctggtcaaacagccctatctcctctccactcttactgtggcctctgatcatcttatatatctctattttgatattcaaaataatattttagtcggtcatgtacgttataattatttaaaatattctgtaaaattttaaaaaatttaaaaaaatataacacgctgaaaacaagattcaaacagtatgttccacgtgtgactattttattttatacacgtgtgaaattgactgtttaaacattgctttctatattgtaaagtattctgaatatttcaaaatatttttgtaacatatcttaaattactataaagtgcacgaatatatatgaaaataaaaatagattaaaaaattcttgtggataccgaaataggtagatggtacatcagtgcatccattttaagaaagtacattgaatatatatattattcaggagatcgatattgtatatatattacaaagactgcagttaagtatccaaacaattaaatttataattatattcggtgacaataaaaagaaaagtggtttttaaattcgactgagaaagaaaaaacaaataaataaagtgaaattaataatgattaaaacttaggatgattaatttcgattgaatccacgtatgatttaatataatttaattctcaaattttaatttttatgtgataacagatttactaaaaaaacttatattcgggtcgggttagaatatataaatctcaacttatatgtaaactttctactctcgtgataaatttaacaaataagaggcattaagcataaaaatcctaaatatacacaaaccatatataggtactatcgtcctatatcgaaatatgtatctatttcactatagcataattaatactgatcacttctcaaattttgtattgaaatcattaaacaattaagtgatcagacaattaaaagaaactaagtacaaatacacatagaaaattggggaagaatttaatcacattaaaccaaaataaagtgtcgaacaatcttcatcaacaaccctaattgaaagttagctactcatagtcattg

SEQ ID NO: 109517 - DNA, 765 bp, Cannabis sativa
tttttttttattaatgggaaccttattagagagcaaacacaaaacacattaacacaacagagatgtagtgctaacaaattccaaactctagtctgaaactacaacataacttactctaatttcctctggacttcttttgagctctgcagcaattctttgaatccaattctcagttataatcattccctgaggaccaccaaatcctcaaaaggcagtgttactagtaaaacacaatgtaatatctcatccatattaagttcaattcatttcaatacacaacttcattaacaactttctatctattaacataaaacaaaaatgaagaagaaagaaacaagaaagaattattagtcccaccggctgcaaaaactccaagcacactggtcacagtgctccctggcttggtggctgtttgtggtgttccaaaagcgaatacatatctccgctgtccctcctctagatgcaagaaggccactctggtgaggtgaccaagcaatggccttaacaactgctgtatgttctgtcaattttagaattggttgttggctgtgctaattccacaccaatacctttccgataacaaaagcccaaacaagttagcaaattgtgtagagatacaagagaccaaaaacttagccatgacttgagatgtaccagcttacctgattatcattgtgttattccgaaattaaatacagtaaaattggaacgaattaccgatagaataatctggctgagtcgcggacaatgtcgctctctttaaga

SEQ ID NO: 109518 - DNA, 560 bp, Cannabis sativa
gatgatgaatcattagcagaatcttataaggtaattgttgccttggatttttcccaaaatacgtgaatgcggataaaggtgacacgtggatatgaaagaaccatcactcacgaaaatcaattaagtcttggacaaaagaggaacaccacagggaaggcgcctcctggagaagagcataggaaacatccttactcttcggtaggctagagccatgataaggcatgtccgggaagtaaagagataacctggacaatcacttctcatttaatgccgcatgggggaagacgtactggaacttccataaaagacgtgacagatgacgtaaacccctttttacggcgattacacaacaattaatgagtctagtgacgggtactttatgagaaatcacatcagtcaagaggggataaaagatgatatccacctaactcctaagatacctacggtgtaggtcatgtattttctattttaaatctgctaggaatatgtgcccctatgaagctaacacagaaagacaagtgatccattcctagggattctcctagaaaaacactataaat

SEQ ID NO: 109519 - DNA, 1101 bp, Cannabis sativa
aagtaaaatacaatgaaagtggagttgttgaacggtttaaagcccgtctagtagccaaaggctacactccaaggcatggcgttgactattctgaaacctatgcccctgtggcaaaattcaataccctaaagatcttcttagctctttctgcaatgtacaattggaatgtccaccaattggacattaacaatgcttttctccatggcgatcttcatgaagaagtcaacatgaaaatccctcccggttacaaagcacctcctaacactgtgtgcaaactcaacaaaagcatctatggcctcaaacaagcatccaggcaatggtttagtaaacttagccacactctcatttcagatggtttttcccaatccctatctgacaactctctattcataaagagaaccaaacattctttctagccatcctcatatatgtggatgacattattgttgccatcaataatgattttgctatatctcactttaagacatgccttcatgacaaatttaaactcaaggatctttgaaccattcagtttttccttggccttgaagttggtagaacaaaacatggcatttctgtctctcaaagaccatttcaatccaattgctcaaggacacaggttacataggagccaaaccggtctctacacctatggaaactaacctaaagttaagtaacgacaaagggactcttctacccgatcctactatttttagaagcctcattggcaaactttaactatcacaagacccgacatctcttacgcggtcaatcatttgagccaatttttgactactcctcgggttccccatctccatgctgcacatcgcatcctacaatacttaaagacaacccctggacaaggtttattctttgcctccaacacaactcccaccatatcagctcatgctgagacaagcttgtctgcatctaatgtccaactatccttcttctcggatgctgattggggctcctgtcaagacataaggcgctcaatatatggttactgcctcttcctaggtagttcacttgtgtcatggaaatcaaagaaacaacaaacggtttctcgatcctctgctgaagcagaatatcgagctatgg

SEQ ID NO: 109520 - DNA, 899 bp, Cannabis sativa
cactaaaacaggaagttgacaagttgttagtcaacaattttatacacgaggtgttttatcccccgtggacagccaaccctgtactcgtctcgaaacctaacggaacttggagaacttgtattgacttctccgatctgaataaggcgtgcccaaaagactgttttccacttcccaagatcgactagttagtggatgcaactgctgggcacgagcttatgtcgtttatggacacatattctggatttaaccagataaaaatgtatgtcccagatcaagaacatacaagcttcgtaaccaacacggaactctattgttataaagtcatgccgttcggactgaagaacgctgggcccacttatcagcgactagtaaataaaatgtttccaagccaaatagggcaaaacatggagctttacgttgatgatatgttggtaaaattgataaagagtaaggatcatatttcagaccccacggaatgctttaaaatattaaaaaaagtataacatgaagctaaacccaaaaaaatgttcctttggagtctccccgagaatttttttggaattcatagttaacgcaaggggtattgaggcaaatcttgaaaaaataaggcattgttacgctaaaattagtctaagttttgggtcatattttctgttagttttcactctttgtttctagttttagggatacattacgcttgattcttttgtttcaggtcctcgggtgtttaaagaaagtatgtataagaattgatgatgcgtggtgaaagaatcgagaagaaaaaccaaaaattttgtcgctgcccgttccagtcgcgacggggaacatgccagtcgcgacgggaactggcagagaaaatctcgaagtttcaaagtttaaccccgtcgcgacgggggaat

SEQ ID NO: 109521 - DNA, 1969 bp, Cannabis sativa
catatcgcgcggtagtgcaacctggagagttttggttttataacattttgagttgccctatattttgtgtaattaaaaaaaattattacataactatacattgtaaaggtaattttcaactatgttttaaactcgggatcccgacctatatggttatataattataatatgataagattaattttgttttagcaagttttcaaatacgggcattacagtttggtatcagagccaccaggttgtttactgaagaccgtcaagatatgtacaatcaaggctagtgttgagctcaattcacggtttcgtaagttttacttttgcaaactgtttaagatatatcgcatatatgtgtaaattattgtttaaaccctaaatgcggtcttggaattattttaatcattgtctaacctacatgcctcgtgggttcgcaggctaagtcctaacaatggactcccacggaaacgtccgaggacggggaaaaatggttgagaccgcagatggtcggggtggtagaaatccccaaaatctctgtggacgcggtagaggccacggtcgtgctcctggggtggtcaagagaatccagctcaggctccgtttgactgggagcaaaggtttgctgagatgcaagccagaattactcaacaagatgaagagattcgaaggctcaaagaaccgcctgctgctgtggttcccgcggtgctagcagaacagtatgttgttggcaaccgaatggagcccttatatgagaggttcaggaagcaagcaccccaagtgttcttgggtggtcttgatgtacttaaagcagaacaatggttaaatgtgattgagaggatattaaatttcatgggagttactgggaatgaccgagtgggatgtgccacgtttcaattccaggaagatgccttgatatggtgggagatggtatctgtcactaaggatgttgctagaatgacctgggaggaattccgggacttatttaatgctataaattataatgaggcagtccgcagtgcaaagcaaaaagagttcgttgagttggtacagggcgagaacatgacagtgactgagtacacgaccaagtttgatcgcttcgccaaataagccttagggatcgtacccacagattttagtaaaaaggaaaattacttggcaggtttgaatgctaagattaagcatgatttggttatcactgcaaatgatactacaacctatgctgaaatggttgacaaggttcttcgagctaaaggagcagtcaagtttctgtaagagaactttcatcttgagtaaaagaagagaactttcccacctatagggagttcaaggcaaaacaagaggttttgtggaaaccaaagtaaagggggacgtcagacctactcctatcctgagtgcccgcgctgtaagaaacatgacctcgggacttgtaattggagtgcttgttttcagtgtggatcaatggggcacctcaagaaagattgtccccaattgaagaaagaggacccaagccagaagccaaacctgcaccagtgcgtgtattttccattactcaggcagatgcggccaccagtccatcagtagtcacaggtcagcttcttatcaacggtattgcttttattgttttatttgagtgctacacgttcatatgtagcgtcgaaagtacttaattagcttggtaggcctagtgatgtttttgaggtggggttttgaattctattacctaatggggaattgattatatcgagaaagtgggttatatctatactaatcaaaattgagggcagagaactaagtgttggtcttgtggagttaccattggctgagtttgatcttatactcggaatggactttttgtccaaataatcagctagtattgactgcaaatgaaaaatagtaattttccaaccagagaatgaggaaccatttgtttttgttggtttagttccaggttctcatgttccaagattctcaacat

SEQ ID NO: 109522 - DNA, 1147 bp, Cannabis sativa
tcctaattagccttttaattattatatatgttgtagttatttagaattatttgtaatttttttaattttggaattattttccaaaaaaaaaaaattaatattttatttcgtgttttacattttgctcaaaacaattatttgaactttactcttggtaatctcaactgttcaaaaatttctaaattttttacacagtcttaaataagttgtggtgttgtgtgatcaagtcacttgccacctaagcaatcaactcatcactcgaataagaagattgttaagttagttgtactagttatttttctttcttactttcaatttttttaccgatatctatataaagacttgtcaaaataattgtaaaggttaatcccattattaatagcagagagagttcaggaggtatcgagtgattgaatcttgatgtttggtaatgaaattttcaccacaacgggtatcagagctgaggtttagattgacgaagattcaagtttgaagtttcaagaaatcatcaagaacatgaaagtaatactaataaaaacctaacatattctcccaaactaaacctttactcatcctcgagtgaagaactaacaactaaacacgacacgacataaatgaaacaagtcaatcaaccaaaacatgagtcccaatctttcaagtaagccaaatagcatggtttttacaaaagtttcacctatatgttttaatcgagaattttagcttaatcacacccttaactgatgacctcaattctttcttttagttcataaaaccataatcggtacttaactaacaattgaaacaatttatgcatgccaaatactacttttaatccactaaccaaatatgttctatatgcttgcaatgctcactattctccagtaatataaatagatacataatcaagaattacaaggtctttttaggcatataatgataggcttaggcacaggtggatagaataattatttaggttcacatataccataagcttctccaatcaaaccattacacaatttttataaatgatcttgatatcccttttttctaattacatgagagaacctttttctcgataaccttgcaataacttttttttttttcaaatatgacaccttattgtcaaattttctcttttcttcttctt

SEQ ID NO: 109523 - DNA, 1008 bp, Cannabis sativa
  modified_base (187)..(189): a, c, t, g, unknown or other
gtgtaagtatactttattgctgattatcacatcagtgtaaatccagtgcattgatgaagcaaggacattatctttataaacatataatcacaattacattccactttgttgacatcactgtaattgtgaataattatatgttctggatttaacagatttcgtatacattaaaccataaacataaaannnacatgtaaacataaatgatttctaatcttctattgaaagcaaatcagattgtattaaaatgggttttatttagggcataaaatcccaacaacttattatataatcaagaatatttatagctattcataatcaacaatctcagtgtttcatacaacaccctaaacatatatcattataaatactcaccttcagtgtttcataaagcactctaattcacacattacaatagccacataatctcagtgcttcataaagcactctaaccttacatctctatgaacatgtattcttacactccgtgagtcaatgagattctgaaagaaaagtgactaacttcataagcagtataaggtttgtctagtcacaccataactaaacgtatttgattacaacctatcacataatacattcttaatcaatttatcaacattgcaatcacaaaatcccagtacttcataaagtacccttaccactcgctaaccacgagctatgtatgtcactatcgttacccgatatagcaaacaataagtaaaaaacctatccgcggtttcagaattaattactcctaacagtaatgacaatttcttttactcgatcataattgagtcacaacgataataatcatttcataccatttccctcgatcataatcgagtcacaacgatgataatcgtttcatattatttccctcgatcataatcgagtcacaacgatgataatcatttcatatataccccttgatcataatcgactcacaacaatgataatcgtttcctattttccctcgatcataattgagtcacaacgatgataatcgtt

SEQ ID NO: 109524 - DNA, 888 bp, Cannabis sativa
gacgactatcgaagatgccactgaattacaaaatctccgtgacgtgctcggactcatgcagggtcataataataccctacatcatgatcaagatgaactacgcgttatagtaaatctcgcgttcgacgaacaaaggcgtatgttcgccgaatggagagatagagagatggaggcattaagggctcaccatgcagagatcgaagatcgtagtcggcaagctaccgtgctgatacgaagagcctaccaaaatgtaggtcggcattcgccgaatgtcattcccctagtagagacggacgaggatccaatgatgaacacttcccagactgaaaatggtcagctgcccaatccccggtcatgagttccactcgtgcgcccagcggtaggcgagaagacctggtctggtaattcatcaagaggagtcatacctgatggttccaaccagatcaatggtgtcattccacccgtcaaccaagtgaatcaaccgctaaggcagccaggcgcttctgtgttcgaaaggttagggacaacccatggcctaaggaacgatctaaacagaaggaggggagcagacgatcagaatgttacgacaatcgtgcagcccagagcccgtactcaaatcgccgctcagaaagatgatgacgtaatccaaattgaccagaatgccgagcaggtcagcccagccgtacaagcttagctagacgagctgaaaaatatgtttcacgacatggctggacaaagaaataatgatctagagctagaccgagcacgcagaactcctttctcctaggagatcaatctcttgccactgccccacaagttcaaaatgccgacgtggaaaatgtacacggggagagaagatcccctttcccatctcaagtacttcgaaat

SEQ ID NO: 109525 - DNA, 1012 bp, Cannabis sativa
  modified_base (124)..(128): a, c, t, g, unknown or other
tgcaaatcttcgaacgaagcaaggatcgctttgagaggatgaagttagaggaaactcgcaggaaaaaggccaaggacaaggatggcatgcaagtcttcggacaaatttaatggtgatccttgannnnnaagtttaagggtttttctcaaactttctgaaatggagaaaatggtgcaaagttggttcctttttttttttactttatacccatgatagtggcttcgttagatcagagaaagatttgatcctatggacataattcaaagcggaagtggaaaagatggtcatttaattctgatgtacctcgaaaccgtataaccgccaaaattagaggatatgtgtcttttcaaaaaagaggaacatgacagaaataccctttgtaatcattaaaaggctctttttaattaaaaagaactttttaaggggcaattgttatacctaaaattcggtaagcacatcagagaaagacatgtgttaagctaggaagaacgaaaaactcaaacacgcaaacgaaagtacacttggcatggaacaaattattaccgtgaggctcaaatttggttaacgaaaatctgcatttacagtgtccattttagatgagatgacaactctattcaatgaatgatatctttgacgctcgcctaccgggacactgtacaagtttgttagaaaccttggaaattatttaagatgtgtttcttttgtattttcacatatctttattaagtgttaaatgtttgataatttctaaattgtgtatgaatttatattgaaccatattgttttctgttattaattgtagttgtaaatttcgtgtaaaataagaataactttgactatcgcctaccgggacattgttagatttttattttaatcaaaataatcctttatttttccccttagctttttcatttcaaattttcttaactactatatcattggatgaatggtttataaatcatctgcttatgatgtcactctaatttctcttatgaaattgaatggtgcagat

SEQ ID NO: 109526 - DNA, 2737 bp, Cannabis sativa
  modified_base (2556)..(2557): a, c, t, g, unknown or other
gccagagatcactcaggaacgtttatgtgggctgcttcgtcctgccttaatttcagggaccctctgattggtgaggcggcggcgtgtcagcttgcattggataccgcgaggctcaggaagcataactatgtcttagtggagagtgattcagaagtggttaccaaagctctgaaaggactgcactatgtttggaacattgataattatgtatctgtgtgtaatcaactctctaattattttttatcttgtaactttgctttcatttcccatgtttgtaattttgccgctcataatgtggctagatgggctttcactcagaacttttcaggagttttggagtctccctccatacctgtttctatcctttgtaatgaccgcgaggtctaatgtttctttatctatgcaacgtcttatttttttttttaaaaaagaggtagttagaactaactaactgactgaattataacagaaaattaactaagactaactttaatatgccccttcaaagtggtgtgtaaaaatctttgacacctatcttggatataatgatgtggaattgagtgggggaaaagtagcttagttaagacatctgctaagtttttgagaagtgacatgattcatttgaagtgtatcattggttatcttttctcgaactgtatggcaatcgatttttacttgttttgtttgttcatggtagattggattttcagcaatgtgaatagccgcattgttgtcacaatataaaactgagggaagtttaatggagacactagtcttggagtattgatgtgagccaagtgagttcacaagtggcatgggccattgatctgtactcggcttcagcagaggacttggagatagtttgttgtttcttggatttccaagacaaaagagagtgccccaagaaaacacagtaccctgaaattgatctcctcgaatctgggcagacccccaatcagcaccagcaaaggcatgaagttggaggggatttggtgttgcagcatggtaaaatagtccttgccttggggttttgaggtagttgacaactctgaatgcagcttgtaaatgaggttgtcgaggtgccagaaggtattgacttaatttgttgacaacataactgatgtcaggctgagtgattctgaggtatataagcttgcctataagacttttgtattgcttaggatctagaagaaggtcacctgattcactatcaacttgagatttggctccagtggtgtcgaagcaggcttcaagccaaggtgacctgtatcttgaaggagttgcacggtgaatggtctttgggagactgaaattcccttgttgcagcgagcaacttcaagtcctaagaagaaccgtaggcttccaagatctttgagcttaaatgtagtgtcaaagagtagtaataaattggttgagaacatttatgttgttagtagctacaaggagtggtcacttttggaccgttgaaagccttgtgtaatgagagtgaagcttagtttagcataccactgtctagatgcttgttttaaaccgcacaagattttgttgaatttgcaaacaacattgtgtggtatcacccctttaggagtgtaaccttaaggtagtttcatataaacatcctcatatccatgtgatgaaggtgccaatgtttgatggcaacaagggcaaagagtaattttagtgtattgaacttaggtacaggagcataagtgtcaaagaaatctataccttgttgttgtgtataccctttagtaacaagccaggctttgagcctattgactgatccatttggattgtatttgatcttgtatacccatttgtttccaatagcatgttggttgggtggtaatgttgtgacaatccaagtatggtttctttctaaggcatctgtttcagcatccatggcctgtaactaggtaacatatttggaagcttcaaaatatgattttggtctagttaatgtatgagatgtaagaatagaagccccaaaaaattagaaaatcgatgataggaaacatagttagcaattggataatttgttgaatgagcaacctcatcatatatataatcttgtaaatataaaggttttgtaatgttcctaccagacttggaaactgttgggggaactgtggtgctgctttgtgtgctatttgcaatgtctaaatgagaaatagggtccgttgggattggagagttaggagtattggttgctaaaacaggtgttgcagaagtgttgtctgctggtttagtagcagcagggaaaaattgtcaatgttgagattggggttgttattggtaagaggatatatggattcataaaatataacatctttagattgaaaaatgtggttggattgaatgtctagtaaggtgtaagctttcatatttttggggtagccaataaagatataagctttggccctaggggacaatttgtggctaatggtatgaggagaagcataagctaaacaaccatagtttcttagatgatcatagtgttgggaataatttaccaggatctagatttacttacaagtatgttgattaacatcctanntatgaatatctctaaaacaatgaaattaaacatataagggtttaaaaaagccttacattgatagagcagaatataatgactgattccgttcaagatctctagcccttgtttcctttttgtcgtagagcattatcaagatctgaacttggatctctttctctcattcgggtttggttacca

SEQ ID NO: 109527 - DNA, 1042 bp, Cannabis sativa
atatatattataaaaaaaatgcaaaataaaaattaattatatataaaaatgtatgaaaaaatagtaataagtttttcttgcacatattatgtaattaattaaaataatgtatacaaaattgtaaaatgccatttttttaaagcataaccaaaaatatgataaaaaaatacttatttgttggtttgccattaatttattcgtttttatcggaatcttctccaccatctaattaatcaacctctcccgcttataataaaaaaaaaaaaaatcaacccattggtgcagattaaaatctgtgttttttaaagaacattatttacaattaaaaaccattatttagcatacaattattgagtctttaactctttatgatgcaaatatgtctgttgggatggattgagatagtgggtaaagcaatgttttttaaagaacattatttacaattaaaaaccattgtttagcatacaattattgagttttgataagagtggttaatgtatgagtatggatgttgtgtttataatacgaaaaaaaatccaaaatggtcgaagtcttaaacataaatagcggtataaatatttaaattttaaattagtaagcaatataaatttaatagttatttttagcgatataaatactaaatatttataaaattgtaattttctttcagtttcattagtatcgattccgttttgaattttttaaaggaaaatttataagtaactgatactacatgtttttgtctagattcaatgatctaaaatttaagcctcatatatatcatgtttaaaacaataaagtttgtactgacaaaattgaaaaaaaaaattataattttataaatattagatacgttaaaaaaaaaattaagtttataattattttggactaaagtaagcatatataacgcgcacgcaaacaattcacttagttctaaaaactcgtatatttttaaaaagcttatcctctaacctaacttggaaataatataataagcccaaacttttttaatttgtaatagtctttcaatgacaagtattat

SEQ ID NO: 109528 - DNA, 800 bp, Cannabis sativa
  modified_base (249)..(256): a, c, t, g, unknown or other
  modified_base (531)..(538): a, c, t, g, unknown or other
aaccatataggtattctcgtcctacatcgaaatttagttctatttcactatagcataattgacactcacttctcagatctcgcatcaaaatcatagacacttaattggtgaccaggcatttaaaagtagttaagcacgaatgaaatagaatacatagaaactggggggaaaataaatcatattaataccataaaataatatcaaataatatccatctaaccctaataaagtgtttagctacacatgttnnnnnnnncaaaatcacacatattaactttaataaagagaagaagatagagaataaaataatgctgaaaaccctttgcagaatgcctccaatattgacttctgtctctgaaattcgtcctccttttcccctctaaattgcttcccccaaaactattgaagttcacttcttttatagccaaaaaataataaaataaaataaaattcgctgaagaaaaaaacctattctgcttagaattagaagaggaggtgagttttctgctacgtcgactgatagtattttgnnnnnnnntctctcgatattgcttggaatcggacaattctagatgttctggaaatataaaagagagatatagaactttcttgttttgactttttccaaaaatctaatcagaacataatcgaattcaggcttgaagtttcagctttattgtcttgcacaattttctgtgttttaaatatcatatttttgtgagatatttttatcttttttcccatttttttcctttgatatttttctaatgttcttttattttaaatctacaaaaataaaa

SEQ ID NO: 109529 - DNA, 515 bp, Cannabis sativa
cccctagctcacctacggggtcttaacatgtcatatctcatattaattcacatttaataaattatataataatataattccacaataatactcaattaacctgttagggttttgctaattcattttctcaattccagggtattacaattaccccctccttataaaaatttcgtcccgaaatttacctcaacaactccggatatttctgctgcatatccgtctcgagttcccaggttgcctcttctactttactgttcctccataacactttcaccagtgcaatcgtcttgtttcttaagactttctccctactgtcaagtatttgcactggttgttcctcataggataaatctggttgcagtcccaatgcttcatatccggttgttcctcaaggatttcaaaaggtccaatgaacctcgggctaagttttcctttcttaccaaagcgcttgatgcctttcataggcgatactgaaaatcaatgtcccgtccctttggatcagcataactcttttg

SEQ ID NO: 109530 - DNA, 1908 bp, Cannabis sativa
ccttgactctccaaataaatatattatatatcctaaccccactatgtaagatattattcgcaattactgctattccacccggtgaacccactcaacaaagaataagcaggaaacccataacactccaaaaagacccatatcggtgcttaattctttttacctataatattataaagctctcatgttttttttttttttcctttttatgatacattttttctttaatatgattatattgtgcctcgtgttttgtaaagtagttccgaatttgaaattatggatcaaagtttatcaagataataatgctggattatttatactacattatatttactgatataaatgataacactaattagttgtaatgagaaagaaatgtggaataaagttgtgggaacactgcaactaatggaaatggaggtaagggatcaatacgtacgagtgagggagtacgtgtcagggcacgttttgttaaaatttgtgggttataattatatctcttactttcatcaattatattaaataattattaaacaattttgtttaaagaaggatataagtgtggtataggtttacttgttgcaggtaaggtcactgatcgtcctatctaaatataagttcatctgattttctccactattatctactaataaacaaatttgagaagaaaaacaaaataataaataataactttttattttttaaaaaagaataacaacacaaaaaagattaatatcatatgtatcctcatatattttttacactattatatatttaataataaacaaataagaagaaaaacttaaggaaaaataagcaagtaaaattcattaaaaaaatacatgagaaaaaaatggtaaaaaatgtacaaaaaaaaaacagtattttaataaagcaaattgagtaaaaaatgagagattttttaacaaaaaggaaaaaaaaaaagttaagagattaaaaaaagaatagaaaatgacaaatattaataatagataaaaataaaaacaaaatacataactccatatatggtaaaccaaaaaaactcaaagtactaaaataattttattaaattgagaaaatatataaaaaaaaaaaagagtaaaaactgtaggaaagtaaatataaaatttagagttatcataatttaaaataaaatattttaatgtatcaatacttattttgttttaaagataaattatatttcttcttaagttcttaaaatattctgaggtaatatacatatatatatatatatatttgcagaaaagtaaaaaaaaaaaaaatctaaaatttaattttatacataattttttttttaatttttttgggtaattactcatttggtaccctatattttgttgaaaaacacagttagtactctctattttagataatcattggtaccctatattttcaaaaactacacatttagtaccttaaatgtattttaattttttagatttctcaaattacccctattttaaacattatttgattataagccaaataaatttaaaataacttaaatgataataaaaaagtaaacatagctttggttaattaatcttttaagtatcgaccctctaaatacccaaataccagatttgatttgaatcatgtaatttacttgaaaaattgagtttttgctaatgtcaataattattcaagaaaaatagtaaaaatttaattgtaacagtctgcagcagcagaatgtaattctgttaccgcaaaacacattattgcagaaacaaactagaaccagaacaaaaaaattagcaaaaataaaaaataacaacaaaaaataaaatcacttgacacaagagatttgtacgtggtatcagtgttctttcgaacactcctagtccacggggccacccccagaggaagaaaccaattagtaaagtctca

SEQ ID NO: 109531 - DNA, 656 bp, Cannabis sativa
aataatcacggtacagaattcagatgtatctcggatggttgcagacggattttttcgatttagaatctggatgtctatcaacaaaccagtgtgtccgggattttccctcccttggagcggccaaaagaagtggatagcattccaatatgaagaattgcctttcatgtgctttcaatgtggaagaattgggcattgtttcaaagattgtcatcaagatcccatactcactcaaagagaaggcatggatggtacagcggtttatggtaaatggttgaaggttggaaatagtctacaaggagacacaccagatgatcgaaaaaaacttgaaaggaatttaattcctgaagacactatgcatgaattgacaaaaacaaatggaagggccatgaatgcttccttttctccctcaatagcttccatgggtgagaatacaatagaaggcaagttcggggtgaatagcagagactcggtacaacgcaagattcagcagagattagaagaagggtcagggtattcatctaaaaattctgatatgaagacaggggaaattggcagagaagaatccaaaggaaagtatgatgatggaaatagagggaaacatcgaattgtcgaagattatggagatgtagaccacgggaagatgaagaagtcagcca

SEQ ID NO: 109532 - DNA, 512 bp, Cannabis sativa
  modified_base (198)..(214): a, c, t, g, unknown or other
aattaaaaaacgatgatttgtattgtgtattgatttggacggcttcatgtggtttatgtgcttatgtgatgatagtttagaagtcgcaatgaatgttactgtaatattttttatttcgatcaggaattatttttactggaaagtagacaaaaaattaataaattttggctattacagaacctaatttggattttttannnnnnnnnnnnnnnnntttgaatttgaatgaaaatatttggttttgaatgcacaaacgcacgcgcgcatgggcacaagtgtggctcgctcagacaaaaccgctttagataacaggcgtgttcaaagcttgcccctgtcctgcccatgtccttggctcaagtaggctgcatgcagccttgatgctcggtcaaatgggccattctgcgcgcgcaagggtattgccccaaacttgttttcttcctaacttttgattcaaaaatcgtttttcattgaaacaaaagccaatttttggtagttttttgtgtagaatctga

SEQ ID NO: 109533 - DNA, 507 bp, Cannabis sativa
gttcataaccatgtgataacagaacataaataaactttggaaaaaagggaacgaagaaatttctgaaaactacaagtaaaccaactgagaaaaaccctaaaacccattcccgtgagaaaaaccaactgagacaaaagtcgaaagatcttaccccgaacaggaacaggacagctgagagagagagagaggaaaggcgaggaggtagctccggtgaaccagtgaccaagagagagagaaatggcgaggaggtgagccaaccacgcttcaatgggtccgtttcagtttcaggctgctccagagagaaagagagttaattaggtttttggggaagatgagtggactacgggcctgggcttggtgtctaaagcccattaatgttacagcccaattctgaacctatttagaggggtaagttgaaaattactatttttattaatcaactaattaaatttacctctaattttatatttaattgaaacatacttctctttttatatgtattgtacc

SEQ ID NO: 109534 - DNA, 1407 bp, Cannabis sativa
  modified_base (255)..(261): a, c, t, g, unknown or other
  modified_base (1358)..(1358): a, c, t, g, unknown or other
tggaggcttgaagcggggacgttacccgggtaacgtataaaagaacgtcaggatgaatagttgtatcactaaggtaagaagattacctaaattacttaaggtgacacggtaatgatggagagtactttataattgactggatagtcaatgtggtttataaggagaccattgaaattctaggaaaggattactttattaagcaattatggaaaggcatactcacccacaatggggaaaagcttatgaattgagatnnnnnnnaatggacatgtatttgagtgattggtgaatgttggatcacaaagtaggttgtttattaaacaacaagctatataattgagggtaaaataagttttagagtggttaaccaagtatgaagatagtgatgattgtaagaaagcaatagtaacgtatgaactatggagtaaaaccttagtggtaatgatggaaaaagaacacgagagtctcagatgttgatgaatcagcatcatcaatgagaaactgactataagttagtttggtaatttttaccaaggggttatcaataaaacagagaataccctagttccctcggaacctcttgctctgacttgagccaccaggtacagatggtgcctttcctttttggtcagtggtcgagtcactacaacccctaccataacaaagggtaggaggagtaggggctccaccaacaacttgagtccctcaggactcctaggtgcactcaactgcgccctcagctcgcagtgcctttcccaccatatcagcataggttgtgttgtcatcagtgttagtcataaggtcgtgttttatttttggatttaatccatttaggtacttctcttttgtgctaaagtcggttgccacaattcccgaggccaacctagccaatcaatcaaacttagttgtgtactcggtaacactcatattctccttctgggtcagctgagtaaattctttcctctttgcacttctaactgcctcactataatactttgcgttgaataattcctagaattcttcgcaggtagtggtagtaacatcccgagttagggaaaccatgtcccaccaaactagggcattctcctagaactggaatgtggcacaggccactctgtcgttactggtgacgcccataaaattcaaggttcttgtaataactgtgagccattgcgtggctttcctcacatcgggacctcccaagaagattggaggtgcttgcctagtcagatctcgatcatgaataatttactatttaccgcttaatttggtaattaaaagatacgcctattcacctatcaagctactaacatgcttcctatcagacttttcttataacatactaataaaataaactnctaaagcaataaaggcttactaaaacgtgagtcgagctgatcgctgatg

SEQ ID NO: 109535 - DNA, 889 bp, Cannabis sativa
tatttgaattaaaagtcaaaacgatcttaaaacctcaatttatcttttatcaattaaaatatcaataaaaaaaatagatttattctgattttactattcttaactttaaaaatggaaagtattcgaaaaaaataataaaatttagcttttgaatcattcaaaaaagatatttgaaactcgagatatgccaaaaaaaagttttggcatgcttgagcatgcatcagacgtgcaccaagtgccgatttttttggactgtgtctgagaaatcagggcaggcgcatggtgtgtggccaaggaacctcgacatcacgtagttccacgcacgctagtccttttatgatcgagttttctcggcatcattccctgttgccgtgcgtacatcacttggtgtcacccaagtgatgctcgcagtcatgatgccaaattttcaaagtcccatagctttgtcaatttttatcgaaatcaagtttcgtagaaagaaaacttgcaaaatttttcctaaactttcaatctaaaataattccaaaacaaaattcttattattttatatagaaaaatttgtaatatcacaatcaaacatcaagacacatatcactaacatgtaatatttaaatctcacataaaaatacatatatataattgttttaaatctaatttacatgaacaataaatggttaccatggctctgataccaattgttaaaaactcctgttactgagatcttatttactattcaagtatgttagattaaatctaatctaataacctaacatagattcctaaaacaattaaaataaatatgtaaagagtttaagaaaaccttacaataatgcaacagaatttaatgtcccattccgtttaattttctaacgcttaatcctttctatca

SEQ ID NO: 109536 - DNA, 999 bp, Cannabis sativa
cacacaagttctaaataaagttagtaaaatcaagtgtaatgaatattatatatgtaaatatttataatttgttagacaataacctctcaattagaatataatttgtttggtattcttagatagaggttgtttattagaattagtctcacattgtgaaaataaaatactaataagatgaatgaactactcctctcatatctaattagttttatgatggagcccccatgcactttaaccacacaccttaatcctaaattctaatcgtatgccaaaacagtcttttaaggggtgtacgtttttttgcttaatattaaaacttcattcacaaaacctgctacaagagaacaattttggcagccacaagaggagctacctcctcaagcacattagagcaagataagtcattcctctttgcccacttagccaacaaatcagctaaaacattgttcttcctaaacacaaacttaaaagttatgaaatcaaaacgacttagcaagttcaaaatgttacaaaaaataaaaaaacccctcaacaaggggtgaaacgtttgcattgtaaagccttaattgcctccaagtaatctgaatgatttatgacctgtgttcactgccaaaagaatggccatgaactctgcttcaagaacttcaacgcaggcaaaagaatccacactcacaaagtgccacaaaattgtctggtcttttgcctaacacgttattcctgcactattatttgaaactgaagcatcagaaaataaatcaattacatcagaaagtgattcagacttatttataagaggtgtacgtactgcattttttttatgctgaaggtgttttttgctattcattacttaattattttaatttgtatcttttctatgtataaattagctagattctctcacattttcttttgttgataatttttttctttgatatcctattttttttttgtacctatttgtttattatggcatacgttgtgttattaggtactaatgat

SEQ ID NO: 109537 - DNA, 2249 bp, Cannabis sativa
aaaaaaaaaaaacccctaaaaaaatatagagagagcgttaaatggatggaagaataatatgaagtcagggatgttcacgatgcgggtagtgtgagtttagactattattttaaaccaaattgcatatgatgtttttgtaatttctcaatctgtaaccgcagtgcaagaccttaaaactgcaaaaatcacactatataaaataaagtgtgatacggtgtgatttaggcgggttatactatcattactatcaaacattaaaataaaaattaagagattagtctaataaaattacaacaattataaaaaaaaaaaatatatcttatcaaatttttaacgtcacaagatataaattatataataatatatatatatattatatcaataataatatgtacaacaataagaagttaataaaaaataataaaaaaaaataatttatatagatgtttcttaaatttaattatatggcttaaattttataatgtgagttaaaaaaacaaaattcgatagtgtaaaagttaatattcttataatatataatataaagcgatttgaactattaaatttgaaatcgcaaactgcattgtagcgcacagtgcaattcaataaaaatataaattgtatcgcactatagaaaattttaaactatatttttatacagtgtgatatggtgtaagcggtttatacagtgtgaacaatttgttgaacactaatagcgagtttcctattttaaaagaaaagaataaataaatgtaacatcattcaaattttttttttttattactggcaacagccaaacaacaggcaaaacaaacgaaacaacagagacaataagacaaccgaaagaaactatagacaaagtcccaaaaaacaaggaccagggaacactaactactaagaaataactaaaaaaaactacaaaaggaaaaactattacagccgaaaatcacctacacagccatctgcaatccaagattgcagggaaccatcaaaatcggacaaatcaaaagtgccaaagtggttattctgatttgcccatttggccaaagcatgggccacaccattatgtctccgggaggtccaatgagtctcccagttacataaagaaccagctgcactaaggaagcttgaaatcagctctctcgaattgtggtgtaatttcttgcaatctgaacgggcagtctgaattgcatcaatcgttgtcgccgaatcactgagaaagatcacatccttgtagcccaatgatcttgctgattctgttcctttgctgatagcatggagttcaccagggagaggatcgcaatagttcgatagaaatgtaacaatttttacaatcctattgtcctcatcatggaatattgtcgcacctgcagattggaaattacctatagatatatcgaaattacaaattattcaacctgggggaggagcaaactactgtgagtcgtgaagagtagcggttaggttggaattcagcaactcaatttccttgaagcgttgattaatcctgttgatcactaagcggattggagttgagttcccttcatgacagagtttgttccttaccctccatatgttttcaaatatgatggctgccccacccaagaaagagtctaattgttgtataccttgtctatgttgagggatggagaaccatttcaaccactcgtcccaagacgtaaaatttacagttgatgttctcatttgccaattgcatccaaaccagatgcccctggcgaaaacacaatgccataacaagtgtagagagttttccgatgctgcagagcatagtgggcacgttgaattgatgccagggtatatgtgtgcaagtttttccttttgtgagaatactgtgagacaagatcttccaccagaaaattttttgacatcattcaattagtctacaaaatactcacgtatttcccattttctatcgttgctaacatttttttatttgaaaaaggcttacattgttctcctttttattttgttttttgtactgaatctttctaattaagtctaattaaatgtaccttctattctccctacattttttccaactcttaaaaatttataattcaattaaatttataagataattggtatgatatattttttttttttttttaaaaaaaaaaagaaaactatactatgtacggtcttcttttcaaatgcggatccacaaaaaagcgagactgcatagttattctaaaaaaatcaagaaaaaaatatatacattttaattaatt

SEQ ID NO: 109538 - DNA, 918 bp, Cannabis sativa
gtatgaaacaaaaagagttttatgatttattggtttctgtaggtatttattataattatttgtgactaattaactatttaattaggttttaaatagaataaatattaaaaattgtgttcactgtttgggagctgtcaatatgatgttacaatataattatactctatgaaataaatttaagactaggttgagatgttttgttattttatttatttaattaattggtattttatatacaatttgaagtgtaaattagtacataaatatgcataataaattgtatgtgtttctagatagatttaattacttttataatctgtataaataattaaggaatatactagcttctaattttggtaaataattacatatttgtatattttgttcataaatgatattttagtaaaatttcacgtaaaaagtgtttgtatgagttcatgttttacgttaaaaatattcatttgagtacatcatatgtgttggtgtgaaatataatgataaataattgtgtttggtgtgtcatgcaagtgaaattgacctatgtgttgtgtagtttgacgtaagattttattgttaatcttaggttatgcttgaatatgttttaagtgttattgtgttattagatctaggatcttgttctcaacaaagaaattcattgggtgcttgaagtagcaaaaaggtaatcttaacagctgaggtaagaagagtggacatctgtgcacagggtatatgttgaaacatacagctttattgtgggtttgatgatcatgtgtttatgagattttgtactatgaattgttgtttatgttagtattgttagtatgtgatagtaataaggcttttgactatttgtgtgagaacaacacttataagataggttttctactgctggtgtgagcatagcactgcaggatatat

SEQ ID NO: 109539 - DNA, 755 bp, Cannabis sativa
  modified_base (174)..(180): a, c, t, g, unknown or other
  modified_base (269)..(277): a, c, t, g, unknown or other
aatttatttcatactaaacaatttctcattttatttatgaaagaataaccaaaagtatttaacttgaaatttaataaattaattatttaaccattataaattttttataattataaataccgcgcgactaggttgtttataattataatgtcgtcagtacagtggaatataatnnnnnnnatatgttcaaaagtttaattctcaagatttgttagtttactagatttagactgacatgataatcggcgataaggtatacttacaccttnnnnnnnnnttatgtccttttcagggcattgacaaagtgtaccaatatcggatgtatggagtatatattggaagagaccgatattgatcttggataagatatcataaacttgttgttatatctttctaagtcaatatcaatggttgatcttaggtatatggattttaatcttaatatggttagcttagttgtattatttatgttcttcaagttgtttgtggaagcttttatacccaaaattcggctagcacttcagaggatgacatgtgtcaaccttggagaatacgaatcaataaatataatgacaattataaatagaggatattaaaatagaataactcattaaatgcggagattgatagagtatattcataactcgctgactgtatagttataagcgagatagaactattaactcacgtgttaacgagaaactatttcgagtcaaaagacatgattgaagggatgacatcgataatgcataagt

SEQ ID NO: 109540 - DNA, 638 bp, Cannabis sativa
gttagtccagtcgtgcaggcacagttggacgaactaaaaaatatgttccaaggcctggccggtcagaggaacaacgatctcaagttagatcgagcacacagaacccctttcttccctgagattaatatcctggagttggcccacaagtttaagatgccaacctggaagatgtatactgggaaggaagatcccttaatccaccttaagtatttcgagatgcaaatggatctgcaaggagtacgaggagatgtatgttgcagagtttttcctaccaccctttcagaagccacccaacaatggtatttcaagttggcacccaaaaaagttcaactcatggaaggctttctccttggagttccatgcacaattctcctcctctcgccaactaccgttgcacctaggatatctggtcgaagtaaagcaaagaccaggagagcctcttcgagcctacatcaacagatttatgatggaggcgattaaggtttcacgggtaaccgagaacaaaaagctgtccgcgatacttgggggcattgaagtccttggtgagctttggaaggacataaggaagattggaccagtagactcgatgagtgattttcatgactgtgtagaacgttttatcaaacttgaagaagcca

SEQ ID NO: 109541 - DNA, 510 bp, Cannabis sativa
gttcttatgtgaaactttgtcaaggaaggaggtggtagagaggttgcgggtggctattggttttgatggtgctatttctgtggatgctagaggcaaaagtggcggagttgctctactttggagaattgaggaggaagtaaaagttatggaatttggtgttgattacattgatgtgtgtatcactgatagtgaaaatggcgaatggaggttaacgggattatatggagagccaaaccgaagcttgcgtagaagaacttgggatttattgagaattcttcgtgacaaatcaagactaccatggtgtgttattggtgacctcaacaatgtgacttctcaagatgataaaaaaggaggcaatccttatccaaactggttgattgatggttttaatgaagctttgggggagtgtgggctttgcgacatggatctctttggttacccgtatacttgggaaaggcatcgtggtacggatgattgggtagaagtgcgtattgatagagcggtggttaa

SEQ ID NO: 109542 - DNA, 507 bp, Cannabis sativa
cggtttcccttgaaatcaaaagcagtatcatctattttgatactgcagctaaaatgtggaccgtgttataaaatcagtttaaccaaggaaatggtccacgaatctttgagttgaatgaaacactaacatatctcaatcaaggagatgattctgttagtgcatatttcaccaaactcacaaccatgtgggatgaaatcaaccaattgaggcctaggattccatgcacatgtgttgctgctgttcagcacttggatcatcaaaatcatgatcaagtacttcagttcttgaatggtttaaacgattcatatcaagctgtacgtgatcaaatccttcttcttgatccatgccctcccttgaacaaagtcttttctatggtaatcaaccaagaaagacaaagatccattggccatcacatgctaccccccatgggctgcctcgagttcctctattgcaccagaagctgctcctgcagtaaatgcagcctctaaaaataaaaggccaagaccc

SEQ ID NO: 109543 - DNA, 665 bp, Cannabis sativa
ctcgattggtttcaacaggtttctctcatcttgaactcgggggtcaagatcttcatctttctgctcagtttcttctgccaagatcgccatcaactaatgagcggcttttctatgttgtatagctctatgcgatagcaatcgcgagccagcatctggtcgccacgcaccactcccacgccatctggtgtttggaatttcttgatcgaattgactgcccctagtccgatcagtgctggacgacccaacaatatgttgtaagctgagggcaggtcaacaactaaaaagtcttgcataacattagaagttaaaggtgtctcgcctaaagttaatgcgagctcgattatgccaaggctagcgatactgtctctggtgaatccacaaagatttaccatacaaggccttaacttggcttttttgagccccattttctttagagtctccttataaagatatttaccgagctcccattgtcttttacactctcttgatcctcttattggtgagttgaatggttatcaccagtggatcgacgtgaggatacctcacatttttctcatcttccttcgtgaatactatgagaggttcctcggttttcaccttcttggaaggttctggggcaaaggccgattgctcgttctttatttctttcacatatcttttctggg

SEQ ID NO: 109544 - DNA, 781 bp, Cannabis sativa
ctttttaagccgttatgctgcccaaattttggtagatagttatgtaatgtaatttttaatttaaataaattaaataaaaatttgttaaataatgtatatcataaaatatcaaaagtatgcaaaaaaaatatatatatatattttaaatttataaactttataatatttaatttaaataaataaaataaaaaaatataaattagtatatattaaaaaaaatataataagtaatcaaaatatttgttttagtaatctttaatttaaataaataaaattaaaaattttaaattaatatatattataaaatataataggtaatcaaaatttcatttttattttaaaaaatttataatctttaatttaaataaataaaattaaaaattagtatatattataaaatataatatgtaatcaatttttttttttaaaaaaatttgtaatctttaatttaattgaataaatgtgaaaattataaattactaattattgtttaattttaaaaaagtaagtaagtgatattatgaactttaaaaaggttgtaatttttaagtttaataaataaaataaaatattataaattaatatttattataaaatttaaaatgtaatgaagtgatatttataaattttaaatatttatacttataaattagaaataaaataaaataaaattttaaagtaagtatagtaagaatttaatctaattatcataaagtaagtgtaattataaagtaagtacaaatgagcataagatattaaaatagcataaaattaaattttt

SEQ ID NO: 109545 - DNA, 507 bp, Cannabis sativa
  modified_base (156)..(158): a, c, t, g, unknown or other
gccaacccaagtggagaactatccgcgatgatctcggccctatgtcacaacaacgataaaccaataagtgtttatcccaaaacactgcttaatattcacataagataatctatggttttttataaaatcccgcggtataaatacactaaaataaannntatattttggctctaaaacatactttatattgtagagtttgttgcaagcttccaaacggtatatagaatgtccaaaatggacacccgagtcaaaacttatgaccaaaatacgatttctgatatcttaagaatttctaaaaactataaaactcgaaaatcctaattttcgcactcaccgaaacactatcaaaacttatttaattcactccaaacttcacagggcgcatgtacaccataaatattacaatccttatgcaacagaaataaaaatcgggcctttaaatgaaaaacgccattaacgttcggactaagctttaaaaagtttcaaactcgatttctaacccaaaat

SEQ ID NO: 109546 - DNA, 579 bp, Cannabis sativa
ggctaagtgggccttttcccacaatttggttggtgatatttcggtatccaccatccctttgaacattttatgtataatgaccacgaggtctagcttgttgtttaataaaaaacgcttctactcaaaaaaaaaaaaaaaaactttgctatcataattataggtatttcaaaacaatctcgtccattgataggatcaaagcagctttcgcaacatttaacgtagctaaacccatcaatggtcacgtatatcaatataaccaaatgacatagatcaatcatggatgcatatcatggaaattacatgcaaatgtgatcttagcatgcctatttgcaacttgtcctccttaattgagatcaatcctttagtctttctacccttatacttaaacctcaatagaaagaatacattcagagtactcaaaacttaattccatactttatctgtagaattaaaccataaatatgtgtcagcttgatagaacattccaaataaaaacttccgctaaactagcacaatcttaaataataccacatccatatatgagcaacaagctcttaaaaagccttaagtggtatatcc

SEQ ID NO: 109547 - DNA, 786 bp, Cannabis sativa
  modified_base (623)..(631): a, c, t, g, unknown or other
tattatttatatattattttattcttaaaataataattgcctaaccatatttattttaaaattagtttattttattattttagttttattaaattataagattagaaaatgatatgagaaataactaattggttattttcaaattatttatcttattagatatttaatgtaatttgataaaataattcaaataaacctagatattttaaaattagtttgaactttaaattttgaaaagatatttaaggttatttcaacaatcctaaattttcaaaatagttggttatttgaatgataatttaattatataattaataaatatctcaacttcatatattattacatgatttgtttatttcatataaattgtttattcaaaattttttaacaaacctgttatttatttgatctaaattgctatgattaacttgttgacagttccaatgataattttaatcatagtccaattgtcaatagattatgtaaataaattgtatcatgtaaattttgtaatttctttcatctgtggtaaacctagaagcaggataaagtctatccaaatcagattcaatgatctaattttaatcatagtccaagtgtcaatagatcatataaataatttnnnnnnnnnaaattttgtaatttcttttatctgtgataaacctagaagcatgatatggttcatccaaatcagtttgcctgtgtgagcctatatgtttgtttttgggcttagatgcatatagaaagcccatttatttctatatatttaaatggactaggttgcta

SEQ ID NO: 109548 - DNA, 568 bp, Cannabis sativa
attaattttttctatataaaaaaaattatttgatatattattttttaatttttttttatttttacggtgtaggttgctccgataattattattgagttgctatgtagatttgagttactatttagattcctccattggttactatgtggtttcttaatgaattttagtaaaattataaaaaaaaaaaaattaaaatgtaaaaatgaaaatactctaaattattaacttaaaaaaaatcagaaaaagagttatgaaactcgatatatggtaaactataaggtttaaagaccttgtttcatacaccattgtcatcatattaagaaaaattagacttttttaacttttttgatgtaaaattttgcaatgaatatataatgatgttttggttaattgattttttgcatgcaatgcagggaaaggtcttccatgtatggattggccaactaggcttcgaattgcaacgggatcagctaaagggcttgcttatcttcatgaagattgtaataatatatatttatatatatataaatatcattcctacttctattaaatatttaaatatatatat

SEQ ID NO: 109549 - DNA, 587 bp, Cannabis sativa
ggttctggtctgattcccaaatccaaacagtgactatgggtcaggtccaagcatcgagtcccggatcccaagtcccgaggtgggtcctaggttatgatttaggtctcggccaggtcccggatcctgatccaagtttcgaggcccaagtttttgtcccagtttggggtcccaattttggggtttgggtcccccatctatgtccaggttctaggtgtcgatccgggtccaagtttgtgtttcgattcgtgttcgggtcttgagtcctagtttgagtccaggtcttggttggcgtttgggtcccactccctgtgtgggtctgagtttcaaatcccaggtccgagtctggttcttaggttctgggtccagccccagtttttgggtttgggtctgggtctggctctgggtcccagtctaggtccaggtcccggtctttgtttaggtcccaagtcacaggtcccgatccgggtccaattcttggtatgggttctagtctgagctttggtttaggtttgggtcctgctacttcccaggtctgcgttctagtccttgacctggtccgattcctattctgattctgagatcgggtt

SEQ ID NO: 109550 - DNA, 1376 bp, Cannabis sativa
  modified_base (78)..(84): a, c, t, g, unknown or other
  modified_base (315)..(329): a, c, t, g, unknown or other
ttggcgtgatttgtaatcaaagcccacaattttggggataatagccgtaaatgtattttggtcagctttgtaattaannnnnnntatgcaattataaatagtggcagataagatcaaaaaggcggggacaaaaaaaagaaaaataggctcagaaatctaaataagattgactcgtggactatgtagaattttaactgcaaaactacgtaaaaattcggtgttcattttttttctatagtttttctgtgttgaatcatattcgtgaggctcaaatttggttaacaaaaatctgtgttaatagtttggtgctttcannnnnnnnnnnnnnnaaaaagctcagaaaaaaacctcctaacataaaagtgatggatgacaccactggtaatagtcctcaagaaggaatcaatcatcgtcccggaaaagaaccattaagtccttagggatctgctgaatcatcgcacgaacagaatgcaagccccaggaagacccagtattagggctcctcgctcgacggaccttggaagagcaacaatcggccactccctaatcagcgcttacgacccaaccaaatacataccgatcctggaattagaaaatcgccatcttaggcatcgattggaggaagcaaaccggcgtaaagccgagttcgagcgtgaaatagctgtcgtaaatgcaacgctgggagactgtacccaaaaacaacctgaccttgagaaaagagatttacgaggcaaacctcgtggctcacaagtcaagaggcaggagatgacccagggatatgctcaaagctctcaagagatgcaacctgaggaaactgaggaaagattaggagtacagtctgggatacgtggaacatcggacaaaaattgccaacccactattcagtctcataagaatgaaactcgtgcaaacccttgtaagaagaaaaaagtgagtcaaaccttgagaggaagggcagggtccggccacaatcatgacgagagtgatctacgagagcatctgaacctaaaaaagcctgacctccgtcaacgactcgattcaagacaaaaggattcattccatttgcgaatgaacgggttagagaataagtctagagcacatcgaatcacgaaacccaggagacaactagggcacgatactgttggagaacttaattcagaagcctcgggatcaatgaaaaaagatgattccaaaaggctgcctaatgataggaaacccaacaagtatatcactctttataccgaatacaccgagctcaatgaaactcgggagaagatctacctcgcatatgtaaaagaagctatttttggcgagccaagacctatgaaacatgcgaggcgcaagagggatccaagtaagcggtgtgaataccatgg

SEQ ID NO: 109551 - DNA, 638 bp, Cannabis sativa
ataaaaatcacattaaaaagtatacttattttgtaatttttcatttttacactttaaaacagttttttctttttatatttttacgaaattctacctagaaacccctatagcaactaatgaaacaacctaaattgcaatccaaatctgcatagcaacccacatagaaactactggagcaacccaaactgtaaatttgaaaaaacaaattaaaaaatagtatataaagtaatttctctattttttattaatataaaaataaattttgattataaataaattatttaattttttttttatataaggagactattaaattattaaaaagaattatcataatctatagtatctcactattatatataaggtgatatttaatatttggttaactccactattttttaaattttaaattagagaagccctaagtagtaagtacttatttttcttattaatttgaaagaaataataaagtctattttatatcaactagctagttttatgagtagtaataaataaagagagaaacaacccatataatccaaagtattattttaacaacacaaatcatgtaaacaatattgatctcattatgttttattcttcaaaaaaaaaaaaaaaaaatcttatttttgtttgcc

SEQ ID NO: 109552 - DNA, 889 bp, Cannabis sativa
tattatgtcaataaaaggttactgggggcagaattgaggtatccccctcttgaaaaacttgccttatgcctaatccacgcatctcgcaaattatggccctacttataggcacacccgtgttaactgatcaacccttgagacaagttttatcaaaaccaaacgtttctggaagattgataaaatagtcaattgaactggggcagtttgacataacttatcaccctcgaacatccatcaagggccaagctttggtagatttcttaataaaaggaataactccaaaagaaaattcgcttgttcagcaagatgcggacactgggaaatccaacgagcagggctcgggtgtaggggtgatattaattttgccagatggatttaagtttcattatgctttgagatatcaatttgacgaatcaaacagcgagactgagtatgaagccttcatcgatggtttgaggatagcagaagcgttgaaggtcaagaatctcatatgtcatagtgattcgcaactgattgtaaatcaggtactcggggaataccaggctaagggcctgagaatggccaagtatctacagaaggtttggaagaacttggaaagattcaattattttaaaatcgagcaaatcccaagagaacaaaactctaacgttgatgccttagcaaaactggcctcgcagaatgatttggatgaactaaagttggttccagtggagatgctaaatgagccaagtatatgtgaaaaggaagacatcaagatgatagatagctcacctacatggatgactcccataatcaactatctactcgacgggcaacttccaactaacaaaaacgaggcacgaaaactcttgtatctagtgcctccctacacgatagttgaaggaaaact

SEQ ID NO: 109553 - DNA, 711 bp, Cannabis sativa
ttatttaaagacttctactaattataattctataaagtaatttttaaacataaaatattaacaaaaaaatctatactcattggtaagaaagcattgttaacgcagatttttgttaaccactaatattagtttttttgtaataaatgaactacaaaattaattatagccataaataaatgaaatcatgtcccaatttaacctagatttaacactcccagaatcctcaaaatctgaatgtccattatttccagtctttataaaccccaaatctagaaaccccctttacgtcagatcaatgatgtaaaaatccgtagccatcttatatagtctagcaaagaagaaacttcaaaccattataggcgattcctacaagagattattaagggtaaatgtcattttttgcgagaagtttcttggttagaaccaccttatttagctgatattctcctagcgaaactaatgtttttacctccactcactgttttcaccaagtgacttggaggttaaaattatggctcaaaaacctcgcaaatccaagactccccagaacccttctgtcaccttcgaggcagaactttttgagtcaaaggtcaagtctataggcccttacgttggggatgttctgagatcatgtggcatcaagaacgagaaaggatgtcgcattcggtctattgctcaggggaagttcatgtaacgtcttactcaaaggaa

SEQ ID NO: 109554 - DNA, 1041 bp, Cannabis sativa
  modified_base (749)..(755): a, c, t, g, unknown or other
  modified_base (992)..(992): a, c, t, g, unknown or other
agagacgaggcggagcttcgatgtcgttcaccggaggatggctggtcaccagcagcgaagaaggagaagaagaaagaaaactttcaggcctactcgtactgtcctagcgtttcctgaggggagaagaagaaacggcgtgacttaattttttggtttagcatctgatagggtttcgtgtaaacccttatttacctttttttttattattattttttattttttattttgttaaattattaaatacattagtattacagcttttaagaaaaaaaatacctgtttcaaaaaaaatatatattaatattacagctgtatttttttgttttttttttttaaaaaaaaatataattatggtatagtgacgcgctaagtgggtgggcaaatatttatccagtcgcacatagcgtgtcactatatctcaatatttttcaaattaataaaaattagaaaattttgaattttactctttagtgacactctatatttttagtgacacgcattataggagactaacattgaataattagagtctaattgtgcatgtcactaaaacttatccctaactctttagtgacgcgcacctttgtgtgcgtcactaaatagtgtcactaaatagctaaattgtaatagtgtgatcaaacaaatcatcgatgcgaggcaagggatacttgttctttatagtcactttgttcagctctcgatagtctatacacatctgtataccaccgtccttcttcttgacgaacaannnnnnngcaccccaaggtgagtaacttggtctaatgaacaccttgtctaaaagatcttgtagctgagccttcaattccttcaattcattgggagccatgcggtatggagccctcgagattggtgctgtccctagcgctaactcaatcacaaattctatctctctatttggggttagccatggtaggtcttccagaaaaacttcttggaattcacatactatgtggacattctctggctttagngtggtttctcttgacttgtctactatgctggccaagtatgcttgacatc

SEQ ID NO: 109555 - DNA, 528 bp, Cannabis sativa
tttaataataaaataagtaatatctgatcttataattaaaataaacaaaaataataaaaaaatagccataaggctaatttgttgaaaaatgaaattttcaaatttaaaggctactaaaattaattttaattaattaagaaattaataaaaattaattttattatgataattagatttttaattgaaaatttagattcgacacaaaattctcccaaaatttgaattttgtttcaatgaaaaataatttttgaatcaaaagttatcacaaaaataaaatttgggcacaggggtatgcaatgcatccccctgcccgtgcggaagtgagcatctggccgagatacgaggctgcgtgcgacctccataggcgaggaaactcggtcaggtgggggggcatgcttcggacacacccttgtctgaagggattttgtccgagcgagccgcacatgacacacggtcgtgtccccatgcgcgcgcggaggatgttcccttagatattttgtttttcaaattttaaaaaatcataactaa

SEQ ID NO: 109556 - DNA, 505 bp, Cannabis sativa
  modified_base (237)..(237): a, c, t, g, unknown or other
atgggactcaagtcatctcttaactccaaaaaccaactccagctgctggttgtctctttctcagtgatagcataagctattggaaatatagaatttgctgcatcaattccaacagcagccaacagtactcctttgcaaaaccccttcaaaaaacacccatcaagtcctatgaatggcctacaaccatttttaaacccttccttgcaagcatgtagacagacatagcacctttggaanattcttttatcaccttgcatctcacacttaattttggcagtgctacctggattggtctgcaagagttgtttgaagtaatcctccaagattgcatactgctcaatgactgtgccttctagctctgccttttctatgttctttgcccgataaaactttgtggtagttaccatagaatactttgtatccttgactatctccaagaaggacttgtactcaattgatggatgtaatctgaatgtgtctctgaattgttctgctagccattgtg

SEQ ID NO: 109557 - DNA, 4934 bp, Cannabis sativa
  modified_base (164)..(165): a, c, t, g, unknown or other
  modified_base (324)..(335): a, c, t, g, unknown or other
  modified_base (969)..(972): a, c, t, g, unknown or other
  modified_base (1070)..(1082): a, c, t, g, unknown or other
tttaaattattttgtgttattatttgtgtttatttattttgttatagaaccagtttttttttttttttttttttcatatttatgctttaatattttttggaattgaacaccacattttttaaaaagaattataaccggttttatgaggtattatgtgttagagnnattttgttgtggaactagttttgtttttaatttatgttttagtgttttaagaattgatttcctctttgttttttaattgtaatagttttgagttatttcgtgttattagttttattcattataatattgttatataaccggttctattttaattataannnnnnnnnnnnattttatgttatttatttttatttattatgttacagaattgattatttttcaaatataaccggtttgagttattagtttttattcatagaactggttatttttttagttatatctgagacatttacttgtggtgacttgtccattaacttttctggcgacggtgactttttcggcgacaaatgattttttcggtgcctgcaaatttttcggtggtttttccggtgctgggaactttttcggcaaaacttattgttattttacaaatatgagatttctattttttttttttacaaaaatatggcataaaaaaaactcatataaatgtaaaaaaataaaaaaaacctataaccctataatattatttatttatgccataaaaaaataaactataccctcaattcccatatttatgaaaatttcccttaattagtgatggttaaggaggctaatgatctgcagcaatcgacattagctcatttggcttttgggttagatattaatttggtgtaagttgaaagatatcacttttattaatcaattaatcaaatttacctctacttttatatttaattgaaacatacatctttttatgtgtattgtacccaaaatatcctgacataagagagtcacatnnnnagtatcttgaagtgacagggacaaaattggtataatgtttaaaaaaagagataaaaatgataaatttaaaaaaaaaaggtaaaaataaaagaggacannnnnnnnnnnnnatagagtgtaatttcctctattaattttgcaagacttgtcaaagtaaataggatttacgcaattaattttgcaaggcttgtcaaagaaagggctaggcctgatacgtttgggtctaaataaaggagttacgaatgggccaaaagaacagtttgggcaaagattattggatcatttggtcctatgaaccatgctatgctcttgcaaaatgaaaaagggaaacttacgaaaatattaaaatttattgtacttttacaaaaaaattactgtcacacggaattttttttttcaaaatactgtatttttataaaataatagtagaataactaaaaaataaccgtagaataacagtaaaaacttaacacagtacatgatatttttgaaaaaaaatacagtattccgccccagtaaaaaagtaaaaaagaaatttcagtatgtggtgtaaataatccaataataaataaataaatatatgaaccttgcaaaatttatttcacttggaaacaattttttattttccacaaaattcacttgctacattagttataatgttccatttagtgatttcttacttaaacaataaaataacaacaataatcatttgtaccacttatttcacaataaaaaataggaaatataatatttggtaacttgtgtttgattaaaatacagagttggtaacggtatcctatattttcataatatataattggtatcctgaattcaaatttaatcaacttaaccaaataattcttaattatatgtaattaaataattaaaataaaatctataactcatatacttggagacattttgatcccaataataaaattttagtaatcaaatttaaatgcatagtaccaaatatatataattttaaaatataaagtatcttacaagtattattaaaaatacagataaaggtaaattgtgacataaatacttaacgtttcagattttatacacttaaatactttatttttatttttggaggcaaaaatattcaatgctacaattctcttacacccgttactatcacttccgttaactcataaatatggacacgtgaatgacctaaatgcattacatttttttttattttaaaacttaatatttttaatatcagaaactaaatgctacttgttttaataaaaaaaaccagttctcataacagtttttacatggtattagcttttcaattgataactatgttccatatactgtactggttcacttagtattgcatctctctcatttttttgaaacaagtatcatttagtttccgatattaagaatattaaaatttaaaataaaataaataaatgtaatgcatctggaccctccacgtgtccatatttatgtgttaacagaagtagtagtaacgaatataagagaattgtaatattggatatttttgccttcaaaaataaaaataaagtatttaagtgtataaaatctaaaacattaaatatttataccacaatttactcttaaataaaagacagatactttattagttaaattcatgttttactttgcttattacctagttatttatttaaaagttgcacaagtatgctaaaactttaaaaatagtcatgtttttttttttttttgaaaagactgaatttttaaatttaatttcttatttgtcaccgtttaaatcttaaaagtgttaaattctttgttttatcttcaattatatctatgagaaattattttatcaatctatatatatttattataaatttattatattttgttccattcttatttttatatattttgagactaattatatagattcttaatttttgttagagttttagatagaagaatggaaagtgaatgtggaacaaaaggtatggtaagaaataatggtggaatcttaaactaattaataatgaatgagcaatttatgtttttacaaacgtatacacaagctttctatgtgggatagttggtgaaagaaattaaataaagagataaatgtaataaaagaaagacacaataatctacataaaattttacaatgcaccctaaaaaataggtgtatcgatgcatcaccattatatatatttttgatatcttcatagtaatagtttcatttttttatatggtaattagatatactatacattatagttatttacaattctacaattttttttttaagaaatttagaataatttattgtacaaatataagattcaaatagtctcttacacacgtatatattttatttgtactcatataaaatagactctttgaaccatattttttttattataaattattttaattttttttgaaattttgtaaaatatcttaaataattataatttacactattatatatatatatattaatgagattataattattctaatattaaaaatataaagaatgtgcattagtgcattcatttttgagatgcaccataaagaactctaatttatgtgtttaaaaaattaatagctacttaagatttttgcattctaaattatgatatatacattattgtgctcttaaactttcagtctgttacaaatagtctttgaacttttgagagtattgtaaattggtcattttatcaagttttatcacatgtgacaaataaaatgatgacataactgcttagttaattgtcacatcagtgtcacatatataatttaacattaaaaaaaataaaaatgatgtatttttaaaaaaaatattaaactaaaaattaattaatgattaagaaaattatgtaaaaataaattaaattatttttttttcaaattaattatacatgtactgttgatataatactaatgtggcaactcactaagcacctatgccattattttatttgtcacgtgtgacaaaatttgatagaaaaactaatttacaacactgtgaatatttcaaggaatatttttaacgggatgaaaagtttaagggacataataatacatagatgatagttcggaggataaaaattttaaatacccaaaattaattatcctaccaatgttatacaagaccaagtagtcttttttataagaagcttgtaagcattttttttttctcaataatgttgcccaataaaataagacaactatgttgtttttgcactttcttctaagatggtgactattgtgtttttcttttgttcgcacttattagaataaataggatttatctctaaaactatgactattctagagccctcaatttttctttgttgtaaaaattcattttaaattataaaaattgttgcaaatgtttctatatagttgcaatttggtcatttattttaacagtttgttgatatatcactaatttaacgttaatttagcccaatttaagaatccaaacaaaaaataaatatataattaacaatttaataataaattatgagagtatatatgtacattcttagagctaatgtttaatattaataaactgaattttagatagtttaaagttattaaataagccttactataattatacctgtaactcatagccacataaataaattattataataaatagaatgtaacagaaaatatttacaacaatttaaataattcaagaagaatttttgcaatagaaaaaaatttaagaaacaaaattctactaatgtaatagttgaagaagtaaaaattctattattctacttattatattggtcacaagtttacgtgtgcctttttttcgctttatatatatttgggcatgcttaaaggtgactatattttagcggataactattttagttcttgtattttacaaaaattatcaattggaccttctgttttgttaaatgataaaatagacactatattttctaaaatagtaaaaa

SEQ ID NO: 109558 - DNA, 1058 bp, Cannabis sativa
ctcttttggtgtgggatcactaaacctaaatgggttttttggggtatctttggaagtaatgttgtaattactaaggtagtaattactaattgtgtataggatagtaagtacactatgtttaaaaagagcaatttgcggcgaaaccttcttatgttttaatttttatacacttaaccactttatctttcttttggtggcgaaactcctttatgttttaatttttatatacttaaccttcttatctttttttttttggtagaaaaatccccttaaagttatattctaaaaaagttatttcttgtcctacttgtacgttatgtaattatcctaataaaacggtgacccacactctcctagattgttccaacgctaattagatttggagagtctccccctttaaaaaaaattctataatgataacaagtgttgtgatgtcaaagaatttatgttatgtgctttttattctctcaataaagaggatttagcaatgttgttgggtatcttatgaactatttgaggtgtagaaataataaattgtttgaaaaaagatatatgacttcgactaatactgtagagtagattagttcttacatcaatgattacaagatggctcaaaggaataacatcatgaatgattaggaacaaccaacatttcatcatgagatgcttgagaatttagttggtttgggtttcttcaagttgaacacaggtgctacaatagatttgaggaatggtgagcttggcttgagtgctgtagttaatgtttagaaaggaaataaagtagctggtttgcctattctcattgcaggtatcagaaactcaactcaaactaaaacattaaaattagctttgcattggtgtaaaatcacaaagatgcctattgttgttattcgatttgttgggttcgtccatcattgttgggcttggaccaattaagggcttaaggcccaaattagttgaaacctaaaagaaactaaaaaaagaaagaaaggggctgaaggtatcgtgagcagccaagagaaagaaagaaaaagaaagggaaagaagagaaagaaagc

SEQ ID NO: 109559 - DNA, 720 bp, Cannabis sativa
gccccaccatgccacacagaaagcatgtcttccggttgcactctcccgggtgatgtttcttacaacgaggacacacagggtaagagtaaccctggcgtccacctctgccttgatttcgacaaaaccgcttgctttgccctgaaccatcagatgctgaggtgactttccttttctgctcaatggtggaatcaccaccatccctaccatagacaggggtaggaaaagtgggggttccaccaacactcggagtccttcagggttcctgaaggaatttcacaacaccctcggctctcaaagccttttcaaccatttcagcatacgaagtcgcttcagtggtagtgatcaccagatcatgcctaatcttagcactaaaaccggccaaatacttttctttcttactaaagtcagttggcacgattcccactgcaagcttggcaagacggtcaaacttagtagtatattcagtaacgaacatcccctcggttttcaccaattcagtaaactctttccgcttagcactgcggacaacttcattgtaatatttagagttaaacaactccttgaattcttcccaagtcataactgtgacgtcccgagtgagggttattaactcccaccacacgaacgcgtcctcctgaaactgaaaagtagcacagctcacccgatcattaccaaccactcccataaagttgagaatacgctcaatcactgtgagccact

SEQ ID NO: 109560 - DNA, 783 bp, Cannabis sativa
atgcaacttttcaactacaaactcaattcccgcattaaccatctctgaggccagttgaggagctatcataacagtggtgaaaacctgcccgagacctctcctactcagtgcattgccacaacattggctttcctggggtgatacaaaatctcacagtcgtaatctttaaccaattccagccaccttctctgccccatatttagatctttctgggtgaaaaagtacttgagactcttatgatcagtataaatctcgtatttttcaccataaagagaatgtcgccatatttttagagcaaacactacagcagcaagctctaaatcatgcgttgggtagcactgctcataatttttcagttgacaggaggcataagctatagctttgtcaacttgcatcagaacacatcccagaccctgtctggatgcatcacagtaaacaacaaacttttctcgatctgatggagaatttaacaccggagctattaccaaacgctgcttcaactcttgaaaacttgcttcacatttgtctgaccatataaatcgttgattcttcttagttaactcggttagtggcatagagatcttagagaatccttaacaaaacgtcgataataccctgctaaactgagaaaacttcaaacttccatcacagattttggcctcggtcaattcttcactgattcaatcttactcgggcaaaccataattccatcttttctgacaatatgccccacaaaagatacctctgacaaccagaattcacactttttgaactttgcataca

SEQ ID NO: 109561 - DNA, 1236 bp, Cannabis sativa
tatttggcaatcgaatagataaattttgaaactaaataaactaagcaaaaataaataagcaaacaaataagaggtttaacaatagatgtgaaattagggatattttttcaattgtatctatcattatggtctaacatgattcaattcctattaccaaattttatgcaatagcaagtttactcaagtaatttatagtcttctcagatatataaatctcaattacatgccaattttctactctcgtgataaattaaacatgtaaaagatattaaatacagaaaccttataagctatccaaaccatataggtactctcgtcctatattgaaatttatttctatttcactataacataattgatactcacttatcagatttcacatcaaaatcataaacatttaattggtgatcaggcaattaaaattaattaagtatgagtgaaatagaatatatagaaattgggagaaaattaaaccacattaaattcataaatcaatgtcaaacaatatccatctaacccctaataaattgtttagctactcatgttcattgtagaaaattcacacatattaattcagaatagaagaagaaaatagagaataaaagaatgttgaaaaactccggttaaaaaagaaaaaaaaataactctaaaaataacataaataattggctaaaaatatcctaatactttccctctcaatttttaataacttttaactaaaacaaaaaatatctattctcaatttcttttattagtaatttttatgaatattttttttgaataatttttttcttattttaaggacataatgtctttctaattaaaatgaataattatctattatttataactattttttacattggttttttttctttccattatacttgattgatttccatttatatttctcttacataaaatgtgatcaaacataaattgttaatttaatgattatatttaaatttgtttctttgtttaaaaaacaataattcaattgtattaaatttaattttattattatttaaattaataataaaagaataacaactctaacataattttaaacaaatatacattgtatattactaatacctagtgtaaatatatgtattattttcttgggatgaaacatataaatttatatttagacgtggttttttcttgtgttatttatatatacaaaaattattaatatgtatttgttacccctgattttgcccaatgtacgtggac

SEQ ID NO: 109562 - DNA, 571 bp, Cannabis sativa
  modified_base (476)..(476): a, c, t, g, unknown or other
tgaattttatgggcgtcactggtaatgataggttggtctgtgccatcttccaatttcaagaagacgcactggttttggtgggacatggtgtccatgattcattatgtgacaactatgaccttggaaaagttccaggaactgttcaatgctaagtattacaatgaagcagtcagaagtgctaagagaaaagaattcacccatctgactcaaaaataaaacatcagtgttactgtgtatacaactcaatttgactgtttggaaaggttggcctcaggaattgtgcgaaccgacttcagtaagaaagagaaatacctagatgggttaattgcaaagatcagacacaacttgatgattactacttatgataataccactatgctaagatggaggataaggcactgcgagttgagggcgcagtgggatgcaaagtagagtctcgtgagacaccgactgttggtggggctcctacccctccngcatcaggttttagcaggggaggtagtggcttggccacaaatcagaaaagaaaggcatctactgcaacaagtggctcgggtcaaaacaagaggtt

SEQ ID NO: 109563 - DNA, 792 bp, Cannabis sativa
ttagggcacaaaacccaacattgcccccaactcaagaaggacgaacaaaagactgcagcaaaacccgctccagcaagggtgttcgcgttaactcaggctgatgcagaagcgagcccctcagtgttaacaggccatctctcggtcaacaactcttacttctctttgttatttgactctggggccactcactcttgtgtggcagccaaaatttttagtaaattgggtcgaccgtacggcagtaatgaatcagggtttggaaccctactgcttggcgaagaattagtcatctccaaaaggtgggttaggtctatgccaatcagaattgaggatagggagttgagtgctgacttaatagaaatggatttagcggattttgatattatactaggaatggatttcttatccaagtacttaaccaacattgattgtaagaggaagatagtaaccttccaaccagaaggagaagaaccgtttgtttttcttggatcggttcaaggatctcagatgccagtaatttctgtactaaaagccagaaaattgttacaagatggatgtctagggtttctggctgtggtattgataccactcgacctgaatcaatttggccagaagacatcaaggtggtttaggaatttctagatgtttttcctgacaaagttttgggtttaccactactgagggaaattgattttgtcattgatttggcacctagagcagaaccggtttctaagggcccttacagaatggcttcagtagaacttaaagaactaaaaattcaacttcaggggttgc

SEQ ID NO: 109564 - DNA, 710 bp, Cannabis sativa
cttgaaggagaagaaggaaaagacttcgcatgtacaagaaaaaacaaatagagagttagactttgttagggagagagattaaacacttaaacttgtattaaaaatagagattaccagtcgaaaaagttacctgtaacttggaatctcctctgatgtacttctaaacaacaagatctagtggaatcgagctctcatctttgaggagcagctcaaacggagacgtagccaatttattggtgaacttcgagaaaaaatctggtgttttctaaacctaatctatttctgtttgtgtgtgtgtatgtgtatagatcagatcttaaccgatctgatcttggcttggtgtttgtattgtgatttctgggtttcctagggtttggattcgagtttctcagagagaaactctctgctagggtttcgaggaaaacctaaggaaagagacaaagtgtttgagaagtttctcgagctttggggttttgttcaaacacaaaacgaagtcgttttggtgttctgactttgaaaagtcaagtgaacagggaaaggtcgaaattgaccttaatattaatactgattacttaatgttggtgtagggcaaaattgtaaaaggcaatttaaatttcctacaatggtatcagagcttggttaaagctggaaattcaacattcaagataatcaggaaggaaggaaacacaagcaagaaatcaagaaacaca

SEQ ID NO: 109565 - DNA, 648 bp, Cannabis sativa
  modified_base (45)..(46): a, c, t, g, unknown or other
  modified_base (334)..(336): a, c, t, g, unknown or other
  modified_base (436)..(441): a, c, t, g, unknown or other
caattttaaaatagatgtgattagataattattattttaagaatnnaataataaataaataataattattctaattatatgtcaaaatctctcaaattaattaagcattattcaaatctatagaaaaatatcttagttatttaaatatttaaaatataatttataaatttctaataataagtgaaatgatataaaattgtaaatatcatttttttaaaaacttataatttataaacaattaattatttaacgaaataacaaatttttgaatttgaaaatattatgcttagaatatctataaaaatatcaaggttaatttcaaatttattaattnnntaatttatcatataagataattttaatataatatttgaaattaaaagcatcaagttatcttttaatttaaaatatgcccaatattaaaatatctaatctnnnnnntaaataatatataaatattaaggaaattaacaaattttaaatctcaccataatttaaaaaataaaataataaatttttaaattttaacctcaaaatatcaaaaaaaaaaggtaataataatctattaaaaataaatattattaatttaaaaaaaatgatatttaagtttaaatatattaaaataatattttatttgaaattagggtt

SEQ ID NO: 109566 - DNA, 3008 bp, Cannabis sativa
tgataccacttgttgggccctgttatttcaccttgtcaggccactacctcactttgactcccacattagtacgatattgtcaactttgggcctaagctctcacggttttatttttgggcaccttcccaaaaggcctcatactaatggagtagtatccatccttatatacccataattctttccattcctagccaatgtgggacttgggttgataacccaacacttttaaaagaggatagttctgcaatgggttgagcttagtggcagggataccttcgcgatgggaggtgaggtttgtaacccagatgacacgtgattggtggtaaatttcgaaaggaagacaactcacgatggggtaacagacattggtgaatggggtttttttttttggttcaaatatgggtttagcaaaataaataagatggaattggatttttttagatcagatctatgtttatttttaagtgaggaccaaatctgggtgaggaataatctgagttgatttttcttgttcttagtttctttctctctctcgccggtggaccataagaccgacggcgtcggctccttaactcgttggactagcaacttgggttcgtcgaatccccagactagtgactggggcttctcgactcaactatgattcaatatatacatataaatatatatatatatatatatatgttgatttgatgagaaattaggagaatttatgtgtatgataatgaaatttgggttgggatagagggaagaatttaaactatttgattttttatttatggtaatggttttgtagtttgagtgtgttagaataattttatatggtaacaaattaaattttttacttgatttgatttataaaatataattaattattttctaattaattaaaatactctaattatggccaaatttaattatcaaatatttcagttacctaatttaatttttcagaattaattgttaaaatattttgacaattaattgtgacagagactttgatggaaggtctcacctatataaatatagggtctcggtccccgagctcaaatacttattttgtgaaacacagtagtaaatccatctaaagagagtagagagagtttggaagcccgattactcacactaataagtttctttttcttttgcagatctaaagctcgtgtgggattgaagcttcaagaatcaatagctgaaggtatttcgatccttattcatagtgcatatatgtttgattaatttcgtattttatacataattttattttatatatataaatttttaacaaagtgttgatgaagaaccttagaagaaaggaatgaacaaaaccaaacaaaaaggaaaagaaaaaggatatgaaattaaaatttatagtttaataatattttttatttttaaaatggttaatctcttaatttttatattttttaattttaaaataatttttattatttttaaataaataaattatatggactaatgtaaatgtgccacgtgtatatgagtttttacatggacaatccaacatagcacatgacagaaaaattaacaactaaactaaatttgcaaatagaattgtggtttgacatgtttagccgccaaaaaaaattaaaaggttagttattataaaacgtgaagatctattttttttttcttaaacattttacaaaaatggtgccatttattctcttgcggggtatcaaaatggatgtcatttactatagccttgtcactatgtagtggacaaaatatgaaagagtacataattgatgtaatcatcaatcttatgacgaatactttttcattttatttatttttattttcttaacataattcttgacaaaaattaggagccgtaaggtggtgtgctccaactaatgacaacaaaaaaggtgacttttgtgataccttgattagaatatttgaaacaaatcatatgaaatcgaaaaatctttttatttatttagtttagctggaaattatatcacaacacatgcaatttttatcaattttaattgttacccatgaggttatgatatccaaataatggattatggatatcacacctttaattttaatagtattatccaaatgaaaatggtagctaataaatgttcaactagctttacattttaatagacactacacaagtagtagaaaagttcaattcagagacaaactaatgtattagtgagccaatttagtggaagaaaatgatatttccaccaacttagtgagccaagttaagttattaaagtaaatatatgcattattgatttgcacaatcatttagtgaatgtctatttaattgaagataaaaggtgaaatggcctattacatcaagttttcatattacaaaatactaatgcaacatgttgttggggccttggggcccattgataggctggtgtgtatgcagtaatgcataatatatatttaatatatgtatgaatacaaataggacaagtatgtaggtatctatgtattatgaaagttcatttttcatggtggggtaaaagatttagatagattgtgatggtctcttgaatcagattcacatacttgagcaaataattcaagagttgtcctcatcaaataaaaccactaatttcttttcttttctttgttttttgtaaccttgaactgttgcaatgaaatgactaatgatctatctcatcccccctaattacaatattgaccattgtttattgaataattttctgaaatttaaagagtaggtttatttttttcatctacctaattgagtgagttgtagtatttatatctatagtaaatgtcataatgtcttgaaagttgatggctaatcatttgaactcaatttgatttgtcatatactttgactactaaattagtaatatgtcaaaaagaaaaattaagatagtattgattaccgaggaaaaaaagttctttaaaaaaatcacaaaacatttagggttggtttgttacgtcatattacactgtattatattgtatagtattatattgaa

SEQ ID NO: 109567 - DNA, 596 bp, Cannabis sativa
ttgtattatacatgtttataaataaagatgatatacttgtatatcagttcatatttagcccttagttggtgttatctagtttttaatgagttgttgtttttaaggtaatatgcaatttgctgatttatgaaaaaaaaaatgttgctcttttgtgtcggctgacaaaataattgacgcatattccatcaacacaaacttagaattatttatgtcagttccccatcgatgcatttgaggagtactatcagtttaaaatcgatggaaatattgttaaaaatatttgtacgctattcgcgttggttttacactgacacaaacgaaaacaatattcaacaaccattctcgaactatcttgccagagttcagatctaagattctcattcaacaaaacaaaacgaaaaaaaattacaatatcaatttagatccaataaaacaaaacaaaaaaatataaaaatttcaatatcatctcagatttgagatccacacatatcctgtcgaccctaaaagaaaaaaaaaagaaaaaacaatcaaatctttgatttgagatccaccatatatcccaccaacagaacccacactacaagaaatgtcacttt

SEQ ID NO: 109568 - DNA, 554 bp, Cannabis sativa
tttcaaagattgatctctgatcggactatcattagttgagaatctgagaggaagacaccccaaagatggcttttcgtactaggtatggacattatgaatttttggttatgtcgtttggactaacaaatgctcccgtagctttcatggatctgatgaacagggtattcaaggatttcctcgatatctgtgttattgtgtttatcgacgacatccttgtgtattctcaatcaaaagaggagcatgagtaacatctccgaatggttctacaacgacttcgagaacataagttatatgcaaaattcaagaactgtgaattttggctatctcaggtgtccttcctggggcacattgttagcaaagatgggatcaaggtagatccaggaaagatagaatccgtcagggattggccaagatccaaaacagtgactaaagttagaagcttcttaggtctggctggttattatcgtcggtttgtagaaggattttctaaaatttcaactattggaattaattttaccaggatttgagatttactcacaagtatgttatttaac

SEQ ID NO: 109569 - DNA, 705 bp, Cannabis sativa
  modified_base (78)..(95): a, c, t, g, unknown or other
tataatcatacttaaactaattacgagtcgattagggaaatatgaatgaatgaataataaagcgtaatttattaattnnnnnnnnnnnnnnnnnnatgtgggtatcgtagataccataatttgaataaaatattttcggtcctggcaattgtggaactcgatagaatggtcagaaatgacacgatggttgaagttgtgttatattggaattataccggagtaggttaaaatgttgagaagtaggtttgattgggaaagttagaaaatgaccaaaatacccttagaatgtgtttagtttaagtttaggggcagggcaaaatagtcattttaccatgtataattttatttgtcttatgtgatttttcttaaccttttgttggctgagttaaagataaaccttaagtttattcattgtttttttatttaagggtaggaaatttgaattaaaaccaaaagaatgaaagaaaaggatacatatatttgctctctctttctctctctcgcaaatcctaagaaactagctgaaaacttttagtcttgtgttacatttgattgtacctatggggggacacggtgaggtatccagcatatgcacatcaaattatattgtgtttgagggacacaagttgtctagaaccttgctagtgttgcctgtggggcaatttgatgtaattctcggtatggattggttgtctaaatactaag

SEQ ID NO: 109570 - DNA, 578 bp, Cannabis sativa
  modified_base (58)..(64): a, c, t, g, unknown or other
tcgacatcaagtacaaaccaagaactgcaatcaaggggcaagccttggcagatttcannnnnnngttcccaagtactgaagtggcacccagaaacgaagaaatcaacaccgctataccaaaaggagaaggatggacgttgtacgtcgatggggcttctaatagcgaaggttccgggggtggaatcatactaatcagtcccaacaattttaaggtacacgctgctttacgttttgagttttctgcatctaacaatgaagccgagtatgaggctttaatcgcaagattgaagctcgctctcgagatgagaatcgaatacttgtaggctttcagcgattcccaaatcgtcgtatgccaggtgaatggagaatatctggccagaggcgggcgattggttaagtatcttgccatagtatgcgaactgatgcagaaattcaaggaagtagtcgtgtcccgagtaccgcgtgctcacaactcacatgcagacgcattggcccgtttggcctcgactagagaagctgaattactcgatgtaattcttgttgatgtattggcacacccgacgataaatcgagaagaa

SEQ ID NO: 109571 - DNA, 1099 bp, Cannabis sativa
acattaactatctataaagttaaaaataaggtcatttacttgcatttctctttttactacatattaaaattttcaacttttttatttttttactatgggctagatttttttcaaaaataatgtgtaagctttatactgtgtactgtgttaaatttttacgattgttttttaattgttccactgttgttttaattgttttgttttgttgttttacgattattttataaaaagattatatttttgtaaaaaaatctccctgacagtaaaattgtaaaattttgcccaaaattcagtatttttgtaaaaaaatcttaaaatatgtaagtggtgacacttttattttttaactagtaaacatgttgtgttttgcgtgtggctattattaaaaattttaaattgtatatataaatattaattgaacaataaaattgtgttaattaattttaaacttatatttatgtgtaattttaaaaatatatatatttattaaaaagaatgagaagtatatagagaagaatttaaaaaaaaaaaattaactcatcatattattttttgtataaaaattaaagcataaaaatatatttaaatgtacgaataaaaattagtcaccattacattgtttatgtcatcactatctcattaatatatattctcttgtaagtgaatcattactttaacataaataatttcacttttatacataatgatattctcttttttcaagtgttttgctatatatgaaggcaagggttagtaaaaaaaattattaaatttaaaattttgatatatttagtatatttattaatatattaattatatatgtacgttctctctatataaaaattgtacaaatagattaaatgttcattttttttaagtgaaaatacttgttattataaattagaaatagcattcatttacaataacagagtaaattggtggagggatttcctcaaaccagaaacaagcctcatccacccttaatacaaactttgccaaaccgtgagcaaccatattggcagtatgtttggcatgtgagacagttacattagggagaaaggataaaagacaagagatatctacaatcaaatcattaaaa

SEQ ID NO: 109572 - DNA, 1792 bp, Cannabis sativa
ataattaactaaaaataaaagaaatatttgcgacgaaacttctttaacatttataattgttatacatatgactttaataaaaaaaatagtagcaaaagtatcttatcttacgattttgttgcagtcataactttttttggccattaaatgtcaactcaaaaacacgtgacgacatattattagactatgtattaaataaactaaagaaatatatcgcaatgtatttttgagctgtcacttaagagcatctccattggagatgctatgaaggatgcttgatgacataaatatatttttaacatttttttaattgatgtttactattggaatgaaaaggaatgccataccatatcatagcatcctttacatcttctctttttattttttattattattttatcgtaagtaagaaataatataatattattttaataatatttagagatccttattattaaattattttagaataaaaagtgtcaaaaataacgtaaaaatgagataaaataaaataatatatttttaagtaatatgaaagtttttgatattcttaaaaaataactattagagatactctaataggcttaattaatacttaacaaccaaaactaacattcataaagttacaacatataatagaaggagatgacttgtattgtaactatgttgcctacaatgtggctaagtgggcgtttactcaccagatgtacggatcctttttggggaacctattttgtaatgaccgggaggtctaactattatctcttatttttttttttgaataaaatcatctaactttatttaactgcaatcattcatgattacaaaaagcaaatcggtagatacctcattgctcaaaagagtacgatcagcgataaaataggatgcttgagctaacgaatgagcaactctatttgcagaccgtctaacaaaaataacagaaacatcacgcaattgttctaaaaacattttacaatcagaaataatacttccaaaatatgacaacaaaggaagatcactcctaattgcttgaaccacagatagacaatccgtttcaacaaccgttccttgccaatctcgttgttttatccagcttaaggcctccctaacccccatttcctccgccaattcaggagccacaatccctgccgacatctggttatagcctctacaaaatgatcattagcattcctagccacacaaacaaaactgtaagtgccattgctattaaaaattgcagtatcaatgttcacttttatcgtgtctgcagcaggtttggaccaacccgaatgcccatcatcctctgttagaaaagctgttgtaggaacgagcaaactgtcctgagctttgcaccagttcgagagtgtgttcttggccaaaaaaacaacagaagccgctgtcgattgagtgtccgaccaaaccagatcatttctagttttccatacagcctaacaaagcactgcaacatcagctctctgatctttatccaactgctggaacatggcttccaaccaaccggcaaaagaagtcacggctgggacagttttcttcaaaccagtaagctcccaacaactattagcaaaaggacaatcgaccaaacaatggtaaggagtttcagcatgattcgcacaccttggacaaccattatcaacttggacatgcctagaccgcaagcgagttttagtaggaagacaatccgaagccgctcgccataccagatctttaactttaggagggacatacaacttccaaatgcccttccaaatcacagaattactttgttgagactccc

SEQ ID NO: 109573 - DNA, 842 bp, Cannabis sativa
gacacacaccaaactatctgtttccaacatgactctatcccacgaatgagttgtaatccaactcaacgcttctttaatgcctattatctcagaaattttgtgttgaacacactcaatcttccccttattgaatgcttctaccatagcaccatgataattccaagctacacaacccatgccaaagcgctcctcttgttcaaataaagccccatcaacactaacattgatcttgtttatctcagtgcaatccaaagatcaagatttcccctcccatcatgcagcggagataacgaaagaccctttcttacttgagcaaatttgtactgatcaagcatgtttctagctgatgcaacaatatttgatgcagaccaactcttcttctgacaaacaaattcattccgcgcacgtaagatagcccaactcaatatgtagaaaaatagtaaaattagaaactataagtgtttttttataataaataaatgaaaataataatatcttttaagttttataaaatgaatttgtaattaataaatgacgcaatttttaattgatgtaaaaaaattgtttgcatttgtttttcttcagcaaaaataaataattcaaaaacaacaatttaagtgttatttatgaaagggttttatattttgttttgtatagttgctagaatgtatctcttcttcttcacaaaagtgtgtgtaggatgacaaatataaaaaaaattgcacaacattatctatttcgatgagggatttataaaaatgttagaagtaaaaaaatttcaatatgaattatttagataaaatgttgaacaaattatatggatgttaaatttgtatcttaat

SEQ ID NO: 109574 - DNA, 679 bp, Cannabis sativa
cctgtaaatccaccacaagcaccttcagattgggagcagaggtttgcagaaatgcaagatcgaatccgccagaaggaagaagaaattcagaggttgaggtagaagggtccttttgccgtgcctcctcagcaagttgctcaggccattgcagttccagcggtgccagcagaacaacctgttgttggcaaccttatggagccgttgtacaaaaggttccgtaagcaagcacctccagtgtttctgggaggtcctgatgcgttgaaggctgagcagtggctcacagcaattgcgcgtattctaaactttatgggagtggttggtaataattgggtgacctgtgccactttccagttccaggaggacgctctcgtgtggtgggagttgacaaccctcgctcgggacatcacagttatgacctgggaggaatttaaggagttgtttaactctaaatactataatgaagtcatccgcagtgctaagtggaaagagctcactgagttggtgcaaactgaggggatgtcggttactgagtatactacaaagtttgactgtctgaccaagctcgccatgggtatcgtgccagctgactttagcaagaaagagaagtatttggccggtttgaatgtaaagatcaggcatgatctggtgattacttttgggttttgtaccctaaataaaa

SEQ ID NO: 109575 - DNA, 1562 bp, Cannabis sativa
  modified_base (1523)..(1527): a, c, t, g, unknown or other
aatgggttttatttactgcacaaaatccaacagcgggttggtttgaaaaaatggtcaaaaatcgcaccacccgcaccgctaacacccctacaactaagtgtatacgagcaacccaaactcccttaccaacataattcttaaaaaaaaaaaaaataagcatgtaatttatttagtaattattgtgttgtattcagtttgatatgaatagatctacacatattattcatttattttagttgttttattcttgaaactcgaactgctcggtttcttgcactttttggtttttttttttttcagattttagtgattttttatgacgctgttatcgatatctagcgacattagagtgcgttgaaggttagaaatgacttttaacatgtagggacatgttgcaatgaaatttacgacattaggaaagacgacagtgaaatgcttggaaatcagaagcttaagtttaggaaccatctacaaaaaaaaatgagaaactattaaaacacataaaaaagtgtcgcaaaaagtcgcaaaataaattgccaaatatcgcaaaccaagtcaccacaaatcgacaataatcgctaaatcatacacattttctgttaaaaataatccccaatgaatatgtcgcgacatgtcgacaaacgtgttgccacatgtcgctaactacagcaaggccttgggatgcaatcaaaagacatcaaaaccgcaaactatgtcgacaacatattgcttcatgtcgctaaaaatcataacttctaataacttaggtaataccgcgagatgtcacgaattatatcgactaatgtcactaattatagcagctttctagcctagccaaactatgtcgggaaaggttgataatatgtcgacaaacatcgctaaaagccaaataactaccataacttgctctattttagacgaagtcgaaagacgtcgcgaacaaaattaataaatatcgataatcagcgaaaaacctgaagttgaatagaaaacaatgaaaatcaactgaaacactaatatcgaacctaatccaaataaattttcttacaatcaaccacaaacaacaaaagagaagtgggttttggatggcctcctaggtttcgtcaagggtagagaggagtgagtttcgtccaaatgggcagccgaacggtaatggtgtagtggtcgtgggtttttttgggtggatttggtgagagttagagaaagagagagggagagatagctgagagaaagagggagagttagaatgggtgtgtttgaatgaagatggtattttggagtttaaagaattttggagtattaaacccctatatgttttaaagtgggatactaaaagaccataaccttatttaagcatggatagtcaaatttctcatacataattaatttgatttttgttatttatgtattttttattgtatttaagtaataattgaaaattttccataaaaatataagtatggcggcaaatttttttacacatttagttgttttggggtaaaatttttgggttttatgccctnnnnnaaactctatttcaatgtaatctattttatttaaca

SEQ ID NO: 109576 - DNA, 873 bp, Cannabis sativa
aaggtgagtttattaactggttctattattgttgctattttttaactggtttttttattatagaaatgtatttttaaatgtttattatatgtaatttagtgtttatactttttataactggtttttttttctttaagaaatgtgtttataaatgtttaattgatgtaatttagtttatatattatttataactggttttttttttctttaaaaaatgggttttcaaatgtttatattatgtaattgagtttttatactcttttttaaccggtttcttttgttagtttttttaacatattttgtgtttcatttgttgttttactattataacctgtttctaaatttctttttgagctttttaaaagtgttgtttttgtatgtttttttcaccggtttcttttttgtgtttcaaggttaatgttgatccttttgatgacgattttgttcaacatgttgaatctagaactagttctaaagttccagttgagaaagagattcaaccctctgtagggaaactcatggccgaaaaaaaaaggtgtttatatgtttataattttgttctttgttaatgtttgtgaacgttgtttttcttatgtatctttatcttttttgtttcctatttttttcaggccgcagtggctgattctgatcttcccaatccgctggtacgtcgtacaacacgttctggcattaaatatgttgcttcgaagggccctagtccttcgatagctgaagagtccgctaaaaaatccactagtttttttgatgtggtaagtgctttaagtttttcattttacatatatgttctatttttatttttaatgtgatttaatttttgtttatggaaccagttattttatttatcatgtgctt

SEQ ID NO: 109577 - DNA, 816 bp, Cannabis sativa
  modified_base (212)..(214): a, c, t, g, unknown or other
aaagccaaagaccattgtgcatcacttctctgttagttatattaagagaaaaagtagtttttaaacagtaataatcattctaattgaaatagttaaaattttacatttctaatagtggtacccctttgttaaatgtggcgcagacccatctcgaaatatttttctccactagtcacaaacaattcgtactactaacacgtgaatatgaagannngtttgaagttaaattttgttaaaatagctcctattgcaaaaattgaaatattcttttgtttaggataaatttctacaagttttttccttactcttactgtcgttagtgttctttcaaaatctcaccgtacacatcttaaaaaattgtgaaatttcatggggacgatgccaagaccgttgtctataacttttctattggggtttggggtttgggggtttacgatttggggttttgggttcgaggtttgagggttttgggtttaggatttggtgtttgtggatttcggtttttaggtttggggttttgggattaagttcttttacattaggtgtttggggtttgggtttggggttttgagtttggggttttgggtttttaggtttgggatttagggttttggggtttgggattaggggtttgggttttggtgtttagagtctttggcttttggggtttttgggtttgaggtttagggtttcgggttttatgactatgaaagctaatggaatacggacactcgtttgaaatcatccggcgtcaccactctccgatgggatttcgtgggcgttcacgttggatgattgaaagccatcttgaccgac

SEQ ID NO: 109578 - DNA, 518 bp, Cannabis sativa
ctaagctcaggcacaagctacccagaacagagtccctatgccacctctaatggtaggtcacttaggggtcataattggcagaccccacattgcaggcgagactagcaaggctaaggaatcctatgctcggaatctctgtcatgagcctaaaagtgacatcctggccattcaagaaaagggctctaaccaactcaagcttggggagcctgtcatctcctttacagaggggaatgtagcccaagtcaacttcccgcacaatgaccccctagtcattgctgcacagatcgggaacatggcggttgctaggtgcatggtggacaatggagcctcctccaacattcttttcaaatcaacacatgaaaacatggggctccaactgacagacttagcaccttacacccaagtaaggtatggcttctttggccaaggcattgacctatgtggtacatttgactacccttgatagttggagagaatccaacaacaagaatgctgatggcacaatttgtagtaatcga

SEQ ID NO: 109579 - DNA, 728 bp, Cannabis sativa
tttttttttttttataattaatcaatgttagagaaaatattttggttttgaaagatacggttgcataaatacttaagaaaaaataataaaataattaaaaaagttgaagaaataaaaaaaaattaaaattaataatttaataaattatatatatacactttgtattttttaagtgttcattgtacataacttatattattatttaaaatatatatatttatcttatatttaggttattatgaaaaaaattatcactcaaatatataataataattaaaaaacaattggaaagacctcaaacaccataccttacccaccacttggttcaacattggtaagaaaaattgatggtgtttatgcttttggcttggatggaacgatatgaataggagagcagtagtgccaatttgtctccagaaataaacttaattcaatacaaaagcttagcaactcaaccattataaaattatgcccactaattaataaacaatatatgaaatatatgagtaagataatttacatataaagtgatacatgcacatgcactataccaaaacatacattcgtaattgattaaacactcacatatttctataaaaattgaaagtttaagagttgtatgccgttcttctcctttaggaaatttcattctatggaatagaagttcttatagtatgcaaacaaaatgaaattctttaatagagaaaaaaaataaaaaagaacaacaa

SEQ ID NO: 109580 - DNA, 692 bp, Cannabis sativa
caataaccgggacctggaccagaaataggatagggacctaggaaacagaactaggacccagacctagtacccgacccagacccgaaccttaacctaggacccaactcttcacccggcactagaaatggaaccagacttggacacgagattcagatccggatctagacaaagggcttggagaaaactcgtagtcggtgtctggatttgggacccagcccttgacatgagccatgataaagacccgaacccacacacgaacctgaaacaagtcccaaacccaaaagttgacacgaacccttaccctgtgacccaaaattgcgaccaaaacaggaagttgaccgggacttgaactaggacttggacttggaatcataacagaaattggacctagatctacaatcgtaaccggaccaggacccggactaaaaatcagacctacacccgaatggggagccggacccagatcccaacccaaacctagactcggggcctaaactcagacaaaaacatggaaccagcctagggacacaaaacaagggtcgagacctagaaccgcacctcagtctcgatcctcaacctaaactcagaaatgggacctgagacctgaaccagaaccagaccgagacccgtgacagtgatccagatctcgaatcgggattcgggtaacaaggcctggaatagaccagtagtcg

SEQ ID NO: 109581 - DNA, 887 bp, Cannabis sativa
aaatacaatccagcttgtatttcctaacccaagcccgtagcgcttggggtgtcgggtctctcgcgaggccccgacaattccacgaaaggcacttcatggggccgttgggggcttgataagggccgcctcctcgcccgtagttaaattgtgagaacattccacttgaacctccactaagtttaaagaatcaataagatttttctgagttaaatcgtcttgtggtgaaggtagctgttgtaagttttttttctttggttcggatagttttgaacgagagccttttttcctttttttatcattcttcacggatgaagaggaggctccagatcccatcttaaatggggtatccaaggtggacgaaaaaggtggcaggttaggcacctccgtggaaaaatccatggtgttttcttctaggtgctggacaaatgggactaaggtaaggcttgcctttcgttttttctgttgtgggcagggatgaacaaggttggtaacatcttctgggtcatgaaagatagttgggattggttcaaatttgtccacttggggtgggcccatcaactcctcagttaaaccaacttcctcagcataaatgggccaaggaaagtgggtgggctcagggtgtttatggggctgtctagattgacacacatctacatgggctttttctaccatttgatcataagagggcccagtttgggccattatagttgtaaggataccattgtctgcagcattgggtggtggtctagatgaaaatttctttaaaatatcatcatcagaaagtgtactattattaccttgttgatgaaatcgtgcccctctaggagagactgacctagctttccttcctcttgcagccattcgcaggtctcgagatgtataaggtc

SEQ ID NO: 109582 - DNA, 1186 bp, Cannabis sativa
  modified_base (560)..(566): a, c, t, g, unknown or other
acaaaaaacagaaaacaataccagacatgctcatagtctcttgttgatggggatacaatagtaaaaagatacgatgcaaattagggaccattacctgttattaatgactgataaaacagtaactagtctttatttactatttttaatttgatctctcatcaaatcagaaattatctcaatagtatccacatattaaaatcatgacaatcatgcccttaagtcataaattttattctaaaatagaccacattaatttgactcatttatatgatgactcaacacacatttttatatatacaattgtgtctctaaataaataaatttctaaaaatcccccactggaccacatatgtatatatatatatatataaatgtgttaaccttattgagctcataattttgtcatcataaccgtagatatgtacaatctcgtccattaactatatcaacataggttcaaaatgatttttgttgtattaatcacaactaaatccatcaatggtcacatatcaacatgtagatcaatcatgataatgtggtatgaaaattacatgcatagnnnnnnnttcatgtcaattttcaattggtcctactttactttatagagatcaaaaccttaacttaatgtacagagtgaaataaattgaatgacataatttctgatcagaaaaaaacaaaaatacacagtggcagacccatgttttaattggaagatggacgtaatttttttttcatatataaaaatattccaaaaaaataagtaaatattaagaaaaacacaattcaatgtttcaatttccaactaaaaatatgttaaatatcaagcactaaaaatctttaaataaaaaaaaaataatctaaaacgatgttcaaaatatataacatactcaatatcttaaaatcttagtaaaatatatcaatttttgagctcatatcttttaagttgtcctcatcgagtttttatattttgaaaataatgaataataagctcgttgtcaatagcattgaatatatcatttttaaaatatactatcaaactatcattcaaccattgatctcctatttttttgcgcatttgattttttacaatgttcatagctgagaatgctctttctactgaagttgttgcagctggaagtgttagtgccaatttaataagcaaatataggggtgagcatcatccaat

SEQ ID NO: 109583 - DNA, 623 bp, Cannabis sativa
ttattacgtattcttattacgacatatcgtttattgcttattaaaagactcattgtcgttggctaaaagcgaaatcaacaagaagcatgactattgtttttcaattagttgtttgatcaatcttacatattagtacagagtattttttttttttttgaaaaaaatccatatttttgtaaatttttccataaaaaattataaaaataaaaattcttagctttttattattcaagtttaaaatataatttttaaaaaatttacgctcataaatttatctttttcttttggagaattttcataaatataggaattgagtgtatagtttacttttttatagcataaataaatataactatagggttatgggtttttttttattattttttaacatttaaatgggttttttttatgccatatttttgtaaaaaaaagtaaaaatctcatatttgtaaaacaacaataagttttgccggaaaaattgtcggcaccgaaaaagtcatcgaaaaagttcgtgtcgccggaaaagctaccggtaaagtcattgaaaaattcaccagaagtaaatgtcttaaatataactaaaaatataaccggttttatgaataaaaactaataactcaaac

SEQ ID NO: 109584 - DNA, 1133 bp, Cannabis sativa
aaaatagttatctcgatacttgatcataaaatagacttgatgataatgtactttcctataaaataatatatacttttttatagtctaagaaaaaaaaaatagtatacttaacatttgttaaaataataaaactaaacaaatatacttaaataaaattaagaatatcaaattaggtaaaatactccaaattgcacataaaattcaaacgaaaaatcttcataaaagaatcaagattaagagaaaaattacgataacttattttaatttttgtatgttaaaatttaaattatatgtataaattactgcaagaaaaatgcatatatatcatctaattattaattaacaaaaattaaaattacaaaatattaatttaaaaatatcactacttcatcacttataaatgatttttttaagaaggaagaagaagaagaaaaacacatataattaatgaactttgaatatacattgaactctaccaatatttttttttttttttaaaaaaagacaataatttaacttttatatataaaagtttaaactatatgtacaaagtgttgtaggaaaattacataaattagttcattaaattattaatttttagaaaatagaaagaatgaaatttacaaaataatatttcaaaaatattaatactattcatcacaaaatatatatataaaaaaaatgggacaaaaatttcaaataaataaataaaaaatatgcctaaataatattaaatatataaatatatatttgctataaatgagagtttttttttccaataattaaaattatttagtaatttaattagtggaagtctataaataccaaaattatacataaaaaaaattaatttggagacataaacaaggtattgaataaatatatatttgctaaatgggagttttctttttttgtaatttcataattaataaaggctattttagtaattcaattagtataagcccataaacattctcatttttattaaggttatagataaaaaaatattggcatatagtgacacgctaggcgcgaatgtataagtatatcctcaaccatttggcgtgtcactatatcataaattaattttttttataaaaaaagtacaactataattaataagtaaataaaaa

SEQ ID NO: 109585 - DNA, 892 bp, Cannabis sativa
  modified_base (861)..(865): a, c, t, g, unknown or other
ccattcgtgatagtattccccaaattgagattgcaaaagattatctcaatgcaatcaaggagaagtacaagaaattctcaaagaatgagaaaaatgaatgcttgactttgttccattggactaattttgctgattcaggtgacattagatctcacattaacaagttgatgggttgttaccaaaagctcgagagcatgggattggatcttggtgaggattacatggtgtgatttgtgatggaaaccattccctctcagtttgattcgatcagatcaagctataatgctcaaaaggagcaatggaccgttgaggagatgactgccattcttgctaatgaagaggaggacttgaaaaagggaaaagcaagaaacatctccatggtaacgaacccaagcaattctcagaagagagagtccacttccaacaactctagtgaccaatagtccacttagtgaagaaaggcagtgacaactcgaagaaggccgaatagttcggaagagtacatggaagacgacactaaagtcagaatagagttttgggattgtttgactacaattaaatacaagatattttcttggaattttgcaagttgttgcttacttgccctctattaggaggaacttgatttttgtatctattttggataaactaggttatagtcttcttttggaattggaaatctgattttgtatcgtgactctatgagggttggtaatggaagtttatgtggaactttatatataagcttgatttatatgatgctatttctgctacttctccctgttgcttttcttcttgttctcttaatgttgttgatggttccaaacgtgcaagattagaattgaaatcttccatgctttnnnnnaaacgtttgggccatatttctagagat

SEQ ID NO: 109586 - DNA, 515 bp, Cannabis sativa
atgagctcctattgttattggaatacaacactgctgatttattgtcacaaaatatcttgagtggtctttccacattctccaaaatacccagcctagtgacaaagtttctcagccatattccctgatttgatgcctcataacatgctacgaattctgctgccatagtggaagaagctataagtgtctatttaacccttttccaagatatagctcctccagctaacagaaaaatatagcctgatgtagaccttctgctatcttggcatccagcgaaatcagaatcagaataccctacgacctccaaaggatttaacttcctgtatgtgagcatgtaatcttttgttctctgaagatacctcataaccctcttgactgttatccaatggttcataccatgattgcttaaatatctagagatattggcggctaaactacctgaactttacggtttgtaacacttaaccacaaaaactaaatttttggcggctaaactacctaaaccctggttctgtttt

SEQ ID NO: 109587 - DNA, 625 bp, Cannabis sativa
  modified_base (146)..(148): a, c, t, g, unknown or other
  modified_base (208)..(224): a, c, t, g, unknown or other
ggctcagatcttgataatactgtgtgacagaaaaagaacaagggttagagatttgagcggaaggagtcattatattcagctgtagtcattttaaggttttctaaacttttatgtgtttaatttcattgttttagagatattcatannnaggatgttaattcaacatactttactttcatggtaatggtaaaatattcccaacaactgnnnnnnnnnnnnnnnnnatgatttactttcatgtaatatggatttaaaatgatgaatatgttaattgtgttgatttagatgtgttcatgttggtttatgtgttatttgattattgtttgtaaattacgaatttttccttaataattatattttcaatttaaaaataatttatttggattccttgtgaaaaattaagcaattttgatttttacggaattcgattccgataaaaattgaaaaagatatgaagatttgaaattggatgcacatggtgtcgagatggtgccaatcgcactagcatctcggacaaggaacacccatgcgtgtgcggatttagacactttttgttgaagcacacgctgatgccccctgctcagacatgtgatgcgcacgtgatgaccctacaaatggcgagccc

SEQ ID NO: 109588 - DNA, 821 bp, Cannabis sativa
tactcaaacgttttctaccgccttgatgagtgtttactccaactgttggatctgtagaattcgaatcgattgccatcctgaccgtacgacggtggttcatcacagttgtctcacacctgttctggcctataaaagccagccttcttacttcatttggttactttcagcactttatcaaattttcttagagttttctcagagagaaaagaagcttcaaacaccatagattacttgcttttattccttcaacgttgccagtctttgttctaccggcgatcaacaccaacccccagccttcaaacttcatgtaagttctttgtatactgtatacttgtttactgttcgtttatatagcatggtttatgatttctgggttggatgtcgaacttctagggatgggtttgcctgagtttctgtatgatgcattaaattcctcttttttgcgtttacatttctccttttcaccacgtttctgttgaggaatcatcttcatcttacgtcataacatctttagggcttagagtagatcttgccttttccgctttgcctttttttccttttatttttttttcttttttgcaatgtcactgcctttgggattcttgcacccgattcttgccaaggaaaacctcttggggttttcttatttggcaagtttccggaggggacctctttccagcggttaggggacccccattccctttttcgaacattagagtttggtttggggcctaactgctggattttctcaattttttcagaaccaacatgtctgctttcgcgtctggttctaagtcttccaagaagggagaggttcaact

SEQ ID NO: 109589 - DNA, 886 bp, Cannabis sativa
  modified_base (362)..(362): a, c, t, g, unknown or other
tcagtgtcggttttggcaaaatttactaccgacgctgataagggcgacgctatagggttgaaaaaaaccgacgctattaagtaccctatggcgtcggttattagctaggaaccaacgccataggggtatgtatggcgtcggttcctagctaataactgacgtcatatagccataaggattattatttttttcagtttatttaatttaatttaaatttaacttagatatttattttttaaaaggtaaattaaatattttttaaattaattttaggattggccaaaatacctaattttatttcatagcagtaataaaatattacacaaatattgtaaacttagtccaagtattaacaagttaanaaatctaactacaagttaacctaaaaaaataagcttgggaagaaaaattcttaggcctttcagcatcaatcgtccaagccgtgaatcaccgccatcagccgttctatccactgtcgctgtattggtaacaattcaatttttggattgtattgcatgcttatctccaaactattaaaaaagtaaaaatttatattagtttatatatatatattatttgttattagaataaatactataatcaataattaaaacttacagttgtttgatcttgtatgtaatggttggggtttacatgcaatgacgtcagtcatgtatttcaaaacataaaaaccacactcttaatttttaggttgtcttggacaatttgctagtgaaattcctagccacgagcaaagaaacgcatttgatgtccctatatatttgtgtactctgtttgaaaaataatattagcattctaattcattagttaattaaataatttattacataaatagtcattgaattattaccttcccaacatttga

SEQ ID NO: 109590 - DNA, 525 bp, Cannabis sativa
  modified_base (118)..(123): a, c, t, g, unknown or other
agcagaggccatcgttgaagaacggtgggagaccacgccaagaaggttgtgggtactagcacttttatgggatcctgcacaatgaaatgttaaaggaacttaattgacaagttggccnnnnnnagtacttaccgagatgttccctatttcagtgtttgggtagaagttctaactttaagttctcgttgtactcgccagacttgtgtacacatttactgttatcttgtaacatggtgtgaaccttttcagtttggtccaaacatgcttgctataggggatttgctaccaaagaatattatttaaggagtaattctcttgcaaaggatttctttcctcgacctgtttattgacgagcctggtaactccttgtgcgcaaccatgctgctttgagttggcttggtcttttcttctttcccttttgtctaggaatcctgctagcaagatattgtgtacctcttggtcattgtagacaagaagtatgagagcagactgctagtggatcaggctggtcagggcaagaccagg

SEQ ID NO: 109591 - DNA, 651 bp, Cannabis sativa
  modified_base (48)..(61): a, c, t, g, unknown or other
gacttaactgattttgtgcatattttaaatatatatattaaaccatannnnnnnnnnnnnnatgttaacataaatcacttcaaaactcctaaaatgataactaatcagattgtaatgggttttatttagggcacaaaacccaacaatatattagtgccaggttgtggcacgggctcacgtaattaagtgatgcaattatatgatatatgggtgcaagttttttgcacgagctctcctgattaagtgatgcagttatacgatatatggtatcaggctatggcacgggctcacctgattaggtgatgtaattatatgatatatgggtgcaagtttttggcacgagctcacctgattaggtgatgctgttatgcgatatatggtgccacgctatggcgcgggcttgcttgattaggcaaggcagtacaggattattagattaaagcatcgacttgcctgattaggcaatgtgatgtaatgaagatggttactgttatcccaaaatttgcactctgacgtggcatcacaagaatggtgataatggcatcaacttagagcaccaggtcggatgaacatgccgagcaggatgcctcgctggcatgtccatgatggaatactcaacgagccgtgtagaatgagcaacacttagcgaat

SEQ ID NO: 109592 - DNA, 529 bp, Cannabis sativa
  modified_base (210)..(211): a, c, t, g, unknown or other
  modified_base (397)..(398): a, c, t, g, unknown or other
ccctttgagctaagagaaaaaagaacataagatattatcacaaagcccgattgaaagaaactcgggtaaatgttggtaggccatgcaatgggccccactagtttcaattttgccatttatttaacaacttatcttttcttttataaataccatattttaattttaaacttttaaatgtcaattctatttattcaataattataattaatnntcaaataaaattgtcatttaacttgtttcttaattagacctttcaaagtctcttaattaacaaataaacgctaaaagctcttttcttctcaattaagccctagtttagtgaaaatttataaataagacatagtctaatttagaatttaaatagctaattaaaaccaattatctgagtctacaagcnnatattatctcaactagtgtggggagcataagtctatataatcaagcttctaataagtagttctagaatttaccgagtaaatttcttaacttattaattcctcttgattccattatagattcagaattacac

SEQ ID NO: 109593 - DNA, 1083 bp, Cannabis sativa
aacaatctcaatagttcgagaggaacttttaacagccaaaaaaattcagggggcacaatttagtacatgtcaaacttcagggagaaaaattactaattagcctaaacaaaaaaagtaaatctcccaatgtagcttttggaagaagagcttttaagcacacaagtctgggcgtgggcgggccatagtattgaagtaaaagctattaatggcattgtttttcactctcacatctcactgtctctcaccttcactaaacaatgtcattccttctatatgatgtttccttttgccgttggtatccgtttatttcattcttcattcattccaacacccatgcatttttcacaccctcaactactcactcaccctttccaccacacacataatccttttccttttatattttcttctcttttaaatgtttcgctattactataacttcaagagaacaaaactaaacacccaaaagattaaaaataaaaaaaacgttccatttgggagaaaatgtaatctctcacagcgtttataaataaaatttggaattttccctcaaaaaaatctttggaattgtggactccattttagaccatctctaccatccgctcgcgctccctttgctatctgagctttaattcccagtggtaagctacttacattcaccgtgttttttggtttatctttttcagtgcatttattttattgctgtaacaattttcttctatttctttccagtgttaaacatttgggtgtccttaaaattgaaacttgggtttccttttgatttgagttttgtgctttctactcctataaagttgaattctaaagttaatggtacgaatgtaaaaagtaatcggttcttgtgtacctgtcaccctcaaattgccttttctaattattcaatttctgataaaatgttatctttgattttgtttaatttttattgttatttttttttaatttttggatgtactgttagatagcgtaactgccttagccaaaacgatccctattttttgtgttgtgttacattaattccaaccaatttgggaaagtattgagaacaccataaagtctagccctgac

SEQ ID NO: 109594 - DNA, 879 bp, Cannabis sativa
  modified_base (207)..(207): a, c, t, g, unknown or other
  modified_base (816)..(830): a, c, t, g, unknown or other
atcgtacatgggaaaaaggcatggtcagtgggcccgtagcttgttatgcgcggatagaacttccgcaagtcaaaggcgtatcccgaactgatgcatcctggtggaaggctcatacccctcgtgggaacaaaaggtcccgtcttctagcatggagagtgttactagcttgcggacatgtaatgaccgcattttagaatatggattagnaaagacaattagcgttaattattagtattttataattattcataaatttaattaattgtgagtcccattattaaaagtgggcattaaagttgtaatttcttaatttcaaagattttattaaacctcagaggtattatttgtgttatatatgaattatgctatttttataatttttgttcgggtatgcgatggatggtcatttgagtcacatgggtaagtttagaaccttttcttagtggaactaatattggaaatagattgaatactgggtttgagcgaggttatggtttttgaccattttatttacgcctaaacattaaattgcttgcttaagttaagtagcaagggtattttggtaatttgccatgtgggacatgtggctgggtatttaggtgacacctagcctctttttcattcagcctaggctaattagtttaggatttatcaaattgaaataaagaaattagagaaaaaaccaaaattaagagtaactcatttctcttcctctctctctttgctcggctcacataaaaccagaaggaactcacccaatttcagcatcctttctggatttcaacaagaatctgttagaatatattttaccaggannnnnnnnnnnnnnnaagtatgtttttaacatcctaatatgaatttctaaaacgatgaaaataa

SEQ ID NO: 109595 - DNA, 1808 bp, Cannabis sativa
taccattcagaagaagatggtagttcgtacccttcatagaggccattatccatttgatgaaccgggaaggaaaatggagagatctaagcaagtcttccacaaactgccaatccatagtatcatataccttgctgaggtctattttcatgaagcatctagctgaaatattcgttctcgaataacctttaaggaggtcttaaaatatcataatattgtgagcctgcagtctatttttgacaaaagcaccttgatttctatgaacaatggtagggagcacttctgaaagtttagaacaaatcatctttgatatgcatttatagattgtgttgcaacaggctataggtctgtagtctttagctattgtcaggttggctactttggggattaaggatataactgtttcattcaaatttttaggcaagatgccatttataaaaaaatccaacactggttttaagacatcattaccaattttgctccacagatccttgtaaaaaccagagccaaagccatctaatccagggctcttagaagagtgaataatgaacatggctttcttaacatcttcctttttgaaaggcgtaatcaatttgacttgttgctccagccttaggcagttaccctgcaaaatacagtcttcatctatcgtgatagtggcagagctcttgctgcccatgaaactcttaaaatgattaataaattgtttgaccacttcctcaaaattatcaacaatagagccccccttcatgtaagtaccgattctattttccaatcttcttttccgcatgacaacatgaaaataactagaatttttgtcattaaacttgatccagttaattttgctttgctgtctaagcatctgagaatacttgtcctttgcaacaaggaaatcctactgcattttcatgactgagttttgcagagaaatatcaagaggattcgaagcagcctcttcttgaatgacacaatagttctttttggctttcttgtattccattgctacatctcccacttcttgtctattgaatttcttcaaggcatgcctgacacaaaacatcttctacaccagaaaattgagaccaacacttgaaataagtttttcctagcactcaatgacagcttgcatataaccaggataggaaggccaatgattgccagacctaaatagttttaccctaattttattgtgctcatggatacgaataagacaaaagccataattcgagattacctcccatttgcaataggcttcagctttgggaaagtcttctaacaaactgttattaacacaaactctatcaagtttggagaaaatcctatcttcaatctcatgtttgttggtccaagtgtaaaaagaactcgaacatctaaattcctcaacttgccccaaagaaagccaagcctgcgcatcctctatttccttagcctgaataggtcttcctcaactcctatctcgataggtgaacattgcattaaaatcaccaaatataacccatgattcattcagctgcccaaaactagcaagcttactccaaaggcttttacgaacctccaaagagttactaccatatacaaccataacaagaaaagatttgttttgaccacataatttgattctgtagtgcaccagctgagattcattgcaaatagcttcaacctgaacatacatggcttgccaaaataaagagaattctccctgaggtgacactacttaaatacaaattccaattaggaaaattattctccataatgtcttgagttttatcatgtttcaccttagtctcaaacaaggctccaaaactaatttt

SEQ ID NO: 109596 - DNA, 582 bp, Cannabis sativa
agtttcttgctactttgttagctccattactccataaaaatatatatatatatatatatatattttatttaaaaactatattcatccacataaatacatcatataataaataatgctcacttttatttgtttgtgctaaagttagtaaaatcattcctattccattaatgtgctatttttttttttttttgaaatggttattattataaatcattatgtaatatttcaatgaaattttgagatgtattttgaaaatgatttacactttatttaacatgtaataatgaaaataaatataaatttatttatgttttcatttgaaattatacgtccttattttattaatgtgtaatttattttttgttacaaatatttatattatatatattggtaatgaaatttatttttccactctattttattaggttatctttttttattattatttttaaattatatttttattttttaatgtgtaatagtatttacgcctctatattaattatgtcatgtttgattcatgagattgaatactatagttcaaatctacatttgaaattttttgaatttcgaagaattgga

SEQ ID NO: 109597 - DNA, 502 bp, Cannabis sativa
actttcattttactttttttttttacacttaatataaaattatttcaaaatttataatattattttcactaatgatattaagtgtaccaaatatacacggttaattgttaattgaataacaccctaaatttactattaattgaatagtttgaatagttttacttttaaaatttaaacttaggattaaatagttaagagtagggatgcacattttcttcacagggctggagcctcgccgggactcgcctttaatggggcagagatttcccgtctaaatggggaacaggacggggacgagattactttttgtccccgaatgttaaacggaacagggatagcgatcacacttctcgccccgacgggaacccgtttagtattttatcttatatttttagtaatttttttgtaatttataatttataattgtattttttttttaatatattagtattttttatgaattttaagttgtgttttgaataattattagtttattgaataa

SEQ ID NO: 109598 - DNA, 1986 bp, Cannabis sativa
aacagtctggaaatatatatatatgtgtgcattataaatagagaatgaaagtaactctcttgggagaaaaaattactataagaaccgctgtttattgatatcaaaagactgggaaaataaaatacatgtcaaaggccagtgagcattaaaactacgaaagtgtaccttattgttaaagttccatctcccattagatggggcaaagccacgatcattaccaaactccaactgtgatgtataataggaaaaatgaaaccaatagtcaatatggatgtagtaacacatttccctccaaacactaacaactatgcaaaataatgcatgtctcaattataaatccaattttccgaatcacctccaaaaaacatggccatacttatgcagacaatcacatgaatttttgtttttacctttgggggatcaaggatgcgaccatcaacttgagtaaattgcttctctatagagatgccacagtcagctagcaatgggtcactatcatagcggtaatttcttactgcctgaaatattaaatcagaaagaaaaaaataagacaatgtttaaatgaaagatattattgattcaggtgaaaataaaacttacatcaacgacaattttcatcttttcctgaggcttttgtcgagatttttccaccagcgatgccctctgcccagaagataatgcttttgtataccgttgaagcgaaacaagtgaacacaactgaaacagaaatagaagagtacagaaaaaaaccacaaaatattattttgcaaaagaattcatcaacacttctaataaatagattgtcaagcatataaacctagcatacctcaagaggtagaaagttaggtttttttggtctgccaacaataaggcatggcaggtaagcagattcacgtagctctataccacagtgtttcataaaatagtcgtacacagatatttcttcagtctcgtctccatttgtatgatcaccatttttcactttcatgttaaaactgagaaaataagacgataaaattatagtttcttcaatagaaaccaactagggtagggaaaaatagagaaagtagcttagaaagataaacacatacaatagatcacggcatggcttgtcagtcaagcctatgattttaaactccatgtggcggtgtcttgttttaatcctcagatttttaagcattcgctttgcctaagtcaccaaaaattatgtttacaacaaattaatgatcatgtctaagcacacattttaacaatttatttaccttcccccaatcaacttgacgaatattttgtacaccctgattagctatcagaaattcaataacagatccaggtctcaaaatcaacgttgtggacacatctagacaaagttgagaggcagcaatgtcaaaaaaaaaggtagcaataacacatcttcatgtctacatcacaatttagaaatcacaattatagaaaaagtgatacccatattgagggacaagccattctgagttgggcgaaagctagcatgtaaccctcgaacaccagttattccacctccaacatcagtgaagttcctcaagtcgtcgtgaaaaaatgactgccttaccaaaaggcatcccctgtaaattggaacaaacatagtttcgacaagacaacattacagcttcaaaaagaaaatggcctgacatataaaccagagagataatgagcaggagagacaatgacatacctgttagctgcttgctgcctaaggatgatatcaagcactctcaatgcatcctgagtgctattatctgcatcaactcctttaagagcaagagcaaccgacctcaaaggtactttggtagcataacttaattctaccttaaaagtctttgagtgataagagcgttttgagcgtttactcttttcactgggattctccctgccaccaggactcccattttccctaccgcacatacccaaataatgtcagtcaccaaaaagaaacagtaaaaagaaaca

SEQ ID NO: 109599 - DNA, 1701 bp, Cannabis sativa
atatcatatgaacggatttaaacaaaaaatccaacaaataaattaggtgggaaattaatgtgtacttgcttacccttcataggcttttattatagcatgttttttcagtggaacagaaatgaattgtatattgtagagtattgattctcattcactcttataaaaatactttataggagcaattttttcagaacattaattaaaaaaaggaagttgaagcttcctaatgaaaaattgacatttagaactgtagctatagagtgtacctagaccttatagagtcggttttttgggtttagtcgtgttgggggttcggaaattttcgaacaagattttaataaccctatcatgtcggttattagaaaataatcaacaacataggcacacgattattttgatatgtgtgtcctatgccgttggttatttcctaataaccgacgggatagggtatatatataacccttcttcgattcatcttcctccctacttcgtcttcttcatcatgttacaaaccacacaactgaaccctgcaaaaactcataattcctcgccaaccaccgcctaaaacacccccatttcacaatttatcaaccatttttactcttttaaaaaaattccaattttcgtactcaaaaacatgtccttggtgtttatcatgttttttttttctttttttacttttggtgtaaaccgagaagagttagttgttgtggtggttgtagctccaaccatcgattttggatacaaaatcgtgaaatctcaacattcattgaggtataaatctaatttctaataattcttaatgtaaattagtttattttttattttataattttttttaggattttctgtattgttgatattaagattgtattgctgtgattttgattttaattatctacattgatttattagttttatagaaaaatagatatgttagaaatattaaatattgtattagtaaaatatgttaaatgttatattgttttctaataaggtatattaaatatattaaatagtgtttgtatattaattattatatacaatatataatatatagttaggttttaaaaataacttttaattcactgactaaagacaaaatatgcatttaagttatttaaaataatttttaattacaactttaaaaattagttacaataataacctataataactttttaaaaaattgttgaaataataagaaataatatttatataataacgtactatgatatttattcaaaataaataattaattaaaaaaattataagtttacaatcactttttaaataaatattattttagcatatttttaaaacatcactaacctcttttcaaaaataatattattttatatatataataaaaatataatttcaaaaataaaatatccatatacttatattatttgaaactaaaataatatatattaaaataataatctatttttgaaaattttattttaattattaaaataaaagataaatgcacattttagattttgaggtatcaaaaatatctcaaattttatttttcaaaaattaataattaataaaagaaattataatgtatgtatatatagtatatatacaatatatacacagaaaatcggtggggctggccattgatggccgtgataagtagtggtggtggttgcaattggtcgggatcaaccatggaaggtcgaaggggaggag

SEQ ID NO: 109600 - DNA, 575 bp, Cannabis sativa
aaagaagctttaaattacttggcagaaagtaatgaagatgccaaaacaaaaagtgatgctgagactttagcaacatataatattcataattttgagttctttgtgagtaaggttatttggtatgatttgttgtttgctgttaatactgctagcaagatcctacaaaatgaagatatgcaaattgatgttgctatcaaagagttaaagattctactttcatttttcaaaagtatagagaaactggttttgagaatgctgctttgactaaagctactgagattgcaagtgtgatggaagttgaacctgtgtttattgaaaaacaaaaaatttacaggaaaaagcattttgatgaaagtgtcaatgaaggggtgacacaatcagcagcagagtcatttaaaattgattattttctttgcattattgatcaagctatttcatcatttaaaaccaggcatgcatacttttatagtgcttaatttaaaattatatttcacttcctaccataataactaataaaaataattattgttcaactaggttcgaacaattttagaattttgaggagaattttggac

SEQ ID NO: 109601 - DNA, 603 bp, Cannabis sativa
agcaagcctttgagctctatccttaagagcaagtgtgaagggtgggcggtgatatacaaggatctgttggaaccgattgtaggtggtgcccatgctttccaccatgaaatactcgtcaacaaaatgcccaattttgttgatggcctcatggccgggcccgttaactacttgtagtctggctgagagaaatataccccgacctgccatgcttgggggtagactttaagtcaaaaggaccagctaacctcatggggagagggcatgtcccacttctgggaggcgtaaagaatgaacagggcagacaaatacttgatgcccttgggagtgaattgggtcggacagaggcggaagaagtctgccaccttcctaaagtatgggtgcaaaggcaacaatgccccttgctttgcatgagcacccgaccaggcacacatccccctctcagggtttgtggctcagtgaccttggacgaagggcttacccacctagcaaccaggacatcagcgtcagcgtcaacttgctccgcagcctcattgtatcccccaaagtttgggggtgcagcctcctcctcctcttcttcctcctcggaaggactaccaggatgga

SEQ ID NO: 109602 - DNA, 578 bp, Cannabis sativa
ttataaattattctcttatattgtaactaaaaggtaaaggtagtagtcacaaaaattaaaatttgttgtgactaaatgtatttttagtcataatatttgttgtgactaaaactaaattatagacaacttttgcctaaatggtatgttgaggattgctacggaaaccctcttttcactctcgtttacactttcttcttaattgagtgacatgtgtaaccttttaaattatatttaaaaatagttacaagtatacccttatttagttattattaatgataattaaaatgagtcatctcatttactttttttttaattattttttaaaattaataattaatttatttatttttagtgataatcaaaatgtgtgattctatttacttgcttatttgttttttagacaataaaaaaaaaacataattaaattatatttttttatttattaaaatttcttttttttaatagataaaaataaaccataatgaatcattattttaatttcttttataataaatattggctatttactttataaggaatggaaaaatatttcttttcataaattttgcaccattttt

SEQ ID NO: 109603 - DNA, 685 bp, Cannabis sativa
tacgaaactttatatatagaaaatctaattttcaactatgttttaaatctcaggatctcgacctataaggttatataattatattataataagattaatttttgttaagtaagtttttaaatacgggtgttacatctcttgtgttttatggctttagtgggttgttgtaaattaattaagtgtgtattgttttataacttagggaaaaagctagaaacacattgatgttactacacccactttctctttctttctctctctcgaattccctaaggaatcagctagggttggattttctcagcttcaattgagagattattgtaggtttttagtgttatagtgcaaggtaaatcccttttagcctttctttctttgatttcctttagcttaagatgagttttaatggttgaatttgagtactagttggttgtgttgtcaagtagtgtttaattttgtggactgaagtttaattgaggttgtttatgttgtattgagttggttttgttggttatagtgatgtttgagcaaggtttgagtttaagaactcaaatcgttccctctaatgctggattgagtttctgtgtttaatgatgaggtttattgattgattttggtttattaaggtatatacaggtactctggagattttgggagagtttggggttaatttgaggtgttagggttg

SEQ ID NO: 109604 - DNA, 866 bp, Cannabis sativa
aaccagacccaagccaagactcggacctagacctagacccggaccgaaaccccaacccagaccaagacccagactcaaacttggacctagagccagaatcgtaccaaaaatcagacttgaacccaggactcagactcaaacctgggaattggacctagactgagatcaagatcgggacccagaccgagactaggactgagccctaaacttggattgggactagaaccagaattgggactgggacccaagacctgggacccaagactcggacctgggacttgagaaccgaaccgtgacctagatgggggacttgggccccaaaccccaacctagacccaaacctaaaccaaggatctcgacctagatgggggacttagacccgaaactaggccccagcaccgggacctagacccaaaacttgaccccagactcatgacacataacctgcccttggacccagaacctaggacctaactaccgggacccaaccccataactagaacaagataaggatccaagaccgagatcctaatatggacctgaggctgcgaccatacccatagtcagtgtttgaatccaggacccgaacccagatccgcacccaaaacccggaccaaaactgggatctagacttgattccagacaaagaatctatttagcattgggataggaacccagacctgggactgtaagaggacccaaactcaaaccaaaatccatactaggacttggacctggactgagatctctgacctgggacataaaccgcgactgtaacctagaccaagaccgggacctaaccccaaacccagactcaaaaatcgagatcaaacccaggaccgaagaaccaaactcggacctgggac

SEQ ID NO: 109605 - DNA, 701 bp, Cannabis sativa
ttgtatatatctcttttctcaaattatatctaccaaaaaataaattttttttggtcgatataagtatttggataatgtttcagtagagatattaaaaatgactttatatagagtcattttttttaaataggtgtcgttgtttcattttatgtccatatttaattttatttctttttttatttattttttataattatttgtcaaaaatacttatatccaccaaaaaaaaattattttttggtacatataatttgagagaagagatatatacaaattttttcattgttctttgacttcaccattatagaatttttgagtctcaactgatttatttttcttttaaaaaaatatcaaagtttttagttttagttatagtttaggttctttgataagtaacttttaagaacttttagagaaaaagatgaaggagaagaagaaagaagtgaatgatagtttttttctttttttttttctaaaaaaaaaaaagaaaataatattatttttaacaaataattatatatgtgaaaaaaattaaataaggaaataatattcaatgggcataaaataaaataatgacacatattaaaaaaaatgactcttcataagtcgtttttaatacctttactcaagcattatcctaagtatttttgacaaataattataaaaaataaataaagaaagaaataaaattaaatatggac

SEQ ID NO: 109606 - DNA, 3145 bp, Cannabis sativa
ttattatattgtaacaaaaataaataaatatattagatcattaaatatttataactgtatttgatatatcatatcattgaaaattaatatactatagtaataaaattatataccacaaagaaattataacaatactaaattaacactcaaaaaatatacatatcatgctaataaaattatatatactactattaaaatatgtatacatgcaaaaaaatttatatataataaaataaaaactaaatataatcttaaataaatgatatactatagacaacaaaaaccatataccatacaacaaaacatatatacctacaataaaaaataaattaaaataatataatattatttaaaatatatatatataccatattaaaaaaaattagagagaaaaacaagaaaatacaaaaaaggtaaaaaaaaaaaacattactaaaataaagtgggccggccatttcaataattatgcaacccacaaacaaaaaattacaaaaataccacctcctctaaaccttcagtcgcatgaaacagaacgatcactaacaaaaaacttcgatcgttgaaaccaaattaggagaaagaccaccattaatttaagaaaattcactaaaaagaagacaagaatcgatcgaacctgaaattgacaaaaataagagcacaaaaattgggtcgaaacttaaattcaacactatatttcagttttattcgaacaaaacaacttattcttatatcaatgttcagattcatataatgtagatctctaacaaatagatcttgagttcccatcaatcaaaaataggtatgatccgaatacaagaaaaaaagcatcaataatagatctaaggtatatccgggtgcattgtcgttgatttttcagattttcaatattgaaaataaaatttataaacaaaaaaagaaaagaaaattcgaatgaatcttcagccacgtacgtagaagtatgcttcagtttttttaggttcctttatagttgcattataattttataatgttatttatcaaaattgtaggtatttcaattgacagcgaaaaagagaaatcacttcaaaaatacttctacaaaatagttagttatatgaaattattcaactggatgataattagttgcatgttagttttattgtagttgcacaacagttgtgattcaaacaaaaaataatataaaatacaaggttcagaattggcaatacacgacttgaacagaagaaagccgatagaagtaagtttatttttacttcatacagataattttaatttttattttttaagtttttataaaaaatgtttggaatcattcatatcaaaaggatttacagatttaatatagttttagaatagttgacttgcaataataataatttcaaaatctccggaaaaagacaaaatttcattcctagtcttctacaatggacaatttgatgatcgaatgaattatgcaaattatgaagttagtgggtgatatatctcaatgattgtaaatatgatgaactaatacacaagctgaaagaagtcctagaatgtaaccaagaaaatactagcctgcaactgaaataccaagtgaaagaagtatactaaccgttgaggataaaagacgatcaaagcctatatttttatatataactaaaactgaaggaacctgacttcacaacatatccattgcgtgtgaacgtgattagcaacacaataacaaccaacaatccattattcttggaaatgagcaactcattagttgcacaaacaaatgcaatagaaataatggaaaacaatgcactaccaacagaagaatcaacaactcaacaacatacaatgcaaggcacactgttgaaagatggtgaaacaatgttcgacttcatggactatgcaaaacttgtggcagaggaaatagttgagcaactcgaaaacaacctagacagagaggcaaaaatcacagattatgacgaactactaatcacagatccgcaacatcctaaaatagaagaagtacaaatatacaaggacaaaaaaacaatacaaagtgtgcttagtttctatgaaattagaaataacttctaatacaaggtcaaaagtcttgcgcaagaacatacaaaattagtttcttggatccaaaatgcaagtgggcactcacggcatctaaaaatggaccaaccaagtcttttataattcgtaaaaatgacagaaaggcgatatatacttgtgatctaaatataagatttcctgacaaaagtcaggctacaacaaagttgattggaaactacatcaatccacggtttaccaacataaaaataactcaaatgccacaagacatcaaaagaaaaatgaaacataagtatggcataagaataaactacatgaaagcatggagaagtaaagagaaagaagaattacacgacaaaggcaaacaaatcatacaaactgctaccaagtttcttgcacatgctacagaaaactaatctaggaacaattgtacacgtgcaaacagaagaagataacagcttcaagtacttgtttgtggcactagatgcttcaataaaaggatggaagaagtgcaaacccataatcgttgttgatggaactttccttaaatcaacatatggagggacactactctcagcttgtacacaagatgcaaatagacaaatttttctcctagctttttctgttgtggattcaaaaaacaactcatggcaatagttttttacaaaattaagggaaacatatggggtcagagaagaacagtgcttgatctcagacaaacatgaaagcataattaaggtaactactcatgtagttttagaaataatgcatggctactgtgtataccacctatgaagcaacctgaaagcaaccttcaagaagaatgcaagcaagctcgataaaccattctttgcagcagcaaaaacatacacaaagagaaaatttgaataccgtatgagtaagcttgacagcttggacaatcgtgttagaccttatttacaacaagtttgctaccacaaatggtcaaggtaccacaacaaacacagtaggtatacaactatgacttctaacattgctgaatctctaaactcaggaaacttagtagctagagaactaccaatcacaacactaacgtaaagaccgcttagtttaa

SEQ ID NO: 109607 - DNA, 959 bp, Cannabis sativa
catggtcagacaaacatgccaaattgtgtaattacctccaattacacacaaattcaattacattgtggctttccaaacacacccttaataatttttttaaatatatccgacttgaaaacaattcataatacgaacagatatagaaaatataatcagttttgtcataacacctctcaatcgaattattataaaattttattttgacaaaaaattaattcagggtcctatttgtaacattttagaaaatataaggttcattttgtcatttactaaaatagaaggtccaattaataatttttataaaatataggatttaaaataatatttactctattatagatataagatagagaaaaatgatttttatgtattttaacaaagttaaaaataaatatatttttttttagagaagactgatttttataccatttttattattatgattattattttgagctcaatttttaatattttttttttaatataaccaacttgaagacaattttttaataggaacagattttgaaaatataatcagttttgttataacacctctcaattgaattattattaagttttattttgacaaaaaattagttcaatgtttgtaacattttagaaaatataagattcattttatcaattaccaaaacagatgttttctatttaatataacttttttataaaatataagatccaaaataatatttaatctattatatatatataaggtagagaaaaataatttttatgtattttaacaaagttataaataaaattttttttagagaaagactgatttttataccattattattattattattattatataaatacatatacaaattttgagagtgtgggcattcgatacagtgcgacgattgggttattttattctggggacgactgacaaattctaactgcttgcacactcttaggcagtgccgcaaacgtct

SEQ ID NO: 109608 - DNA, 683 bp, Cannabis sativa
ccgatccaccagcactacctccacttccgcagaatctgggggataacgcgagggctgataatgctaatcctcctgctgactggtagcagatgttctgagaaatgcgaagtttcatacttcgtcaagaggaagagttgcaacatttaaggcaacaggctgccccagtttatcaagggttaccaccagcacctgtgccagtcgtgggtaaccaagggtatatcatgccgcaccgggactctgtgttcgagcggtttgtgaagctgcaacctctgacttttctgggaggtattgatattattaaggccgatcagtggatgagcactgttacctgtatcctcgataatatgggggtgatgggaactgagagggtgaattgtgcgaccttcatgtttcaagaccatgcccgcgtctggtgggatatagtgagttagacctgtgatgtcagtgtaatgacatgggaagaattcaagaaactttttgaagaaaagttttataatgttgctgtgagaacttcacatcatgaagattttgtgaagttgactcagggaatctgtggccgagtatactctggagtttgatcgattgtcaaaattcgctggtgatctggtgcctacagatttcaccagaaaacagaagtatgttcgaggactgaatgctataatcattcgggacttgaaaattac

SEQ ID NO: 109609 - DNA, 617 bp, Cannabis sativa
aagacaaagacccaaactcgaatcgagactaggactcaaacccaaacctagactgggacccaatcccagaccagaattgggacctggacccaaaatcaggttagggacctaggcaacagaactaggaccgaaacctagtacctgaccccagacctggacttgaacctaggacccagtacatgacatggcacctaaaatggaaccagaccaggacccaagatcgagatctggaactagagccagggcttggatcgaacccatagtcagtttataaatctgggacacaaccccagacccgaacccagaccagcacccgaaccaaaactcagatctaaacacaatcctagacccaaacctggacacgaaaatgtaccttgtgacccgaaattggaaccgaaattgaaagttgaccttgacccagaaatgggaccagaaccaggatttggacctggaaccgtaactgaacctggacctagacccaaaactataactggaccaagacccagactcaaacttagacctagacccaaacggggacctgaacccagatccccacctagacctggactcgggacccgaaccctgacccaaactcagacccaaacatggaaccagac

SEQ ID NO: 109610 - DNA, 501 bp, Cannabis sativa
gtagaccggaggtggtcggggtagaaatccccaaaacccctgtggaagcggtggaggccgcggttctgctccgagaggtggccaagaggatccacctcaggctctagctgattgggagcaaaggtttgctgagatgcaagccagaattgtgcagcaagaagatgagatccggagactcaggcaacgggatgctcctgttgagcttccctcgccaccgccttctgcggttcctgcagctcctgcggtgccagcagaacagtattttgctggtaaccgtatggagcctttatatgagagattcaggaagcaagcacctctagtgtttctgggaggccctgttgtgcttaaggctgagcagtggttgactgttattgaaagaatattgaatttcatgggagggatcggaaatgacagggtggcatgtgccacgtttcaatttcaagaggatgccttggtgtggtgggagatggtatccctcaccaaggatgttactagaatgac

SEQ ID NO: 109611 - DNA, 711 bp, Cannabis sativa
  modified_base (532)..(538): a, c, t, g, unknown or other
gaactaaagctcctagttttggcactgctaatggtacggccaaggctaaggcaaacatagccctgcttcgagacccagcaacaagaagaattggaagaatagtaaaaagccttaaagctatgaaaacagttaaaaagaaaaaggctgctaatcccgagggaaaaccaaaaggaaaatgcttctattgcaatcaaaagggccactggaaaccccaatgccctaagtttctagcaaagaaacaaggtatttctttctatggtataaactcatgtgttgtagagaattattatccccttggattattaattctggatctactaaccatgtttgttttctacttatttcagctccaggctccagctgcttaaacttggattgctatcctagcgagttgagttggatggttgaacagaagaatggagattgtccaagattgaagatgaagctcggaatctttttttttttaatttttgaattaattgttttaatttatgaacaatttaatttcaattattggtttgggattttattnnnnnnntcatatttatgcagacaattcattttttttttgagaatattgataaagttttctcatttaattatgaaatgcatttatgaattgagcttcatttttttatcttgtgtttgccaataccaattatatttatatgtttatcatgtttgtatgtgtttgtgttttattattgatac

SEQ ID NO: 109612 - DNA, 727 bp, Cannabis sativa
tattaggggcgacaataatcgcccctaaaaccataaaatatcgcccctaatcagtattagaggcgacttgtcgcccctaaaaaatcgcctctaataattcgcgcctaaaaatactattaggggcgacaaaaaagtcgcctcaaaataagggcgacatttgtcgcccctaatacccctaaaagtcgcccataaaaagacgtgtcagtattctatttttgacttttaggggcgacaaagtcgcccctaaaggtttttacataaaaaaaaattaattttttgtaatattagacatattaatatttaatatataaaaaataattataataataattaaaataaatattaacataaaacataaacttttttatattaaaaaatagcacaataacataataaaaataaatagttcttatattagttactaattagacaaatacaatattagttcttgattctataactaaaaaataaaattatctaatctctcgctctcattaaactctagctaaaagaagcggtggctggtgttgtgatgtctacaatagctgtagcggcagtgatgtatgactttagcgggcagcggtgaaacaagacggtaattcaagaactaattcacaaaaaaaaaaatcaaattaaataataaacatacatatatatatacaaaaatatacaatataacataaacacacacatacatacactatatatacacatactcacatacaca

SEQ ID NO: 109613 - DNA, 1175 bp, Cannabis sativa
  modified_base (355)..(362): a, c, t, g, unknown or other
agtttagaattataggtccatggtccccgaatcgccaccttaaaacactgtcaaaggaatggataaatagtagtataaattttttcgaaaaaatttattttgaattcacaaaataataattatttatttttataataaatagataatttttcaaattaattaaatacgaaaaagacaaaaattattaagataaaatttttcaagacaatatttgttgagacaaaagttatcaagacaaaagacaccatccttgtcctaaacaagacatggtaggctccctttgaatttgtctttttgggttaattaattagttaattcaattagataaatatttaaatttaaaaagtaattatannnnnnnnaaagttgttgagatattctctcaagtagttgcaagactccctcatgaatattagtatccgaattcgattataaatatttatttatttaaataattaaatataatttaattaaagaattttaactactataaatataagcatgatttgagaaatcagacttacacactattttggaaatagagagagtaagaaaataaattatttttctctcaattatttcttgctcatgtgttgagaactcaacaagaacaacattatacactttatcctaatatccctaactattccttgtgtgtggtggatctatttagaagaccctagtgcaagttcaattgcatcatcctcatcatctagattaagagatacaacgtacaaaaagtttttaagataccatgatagtcttcaagaaatatatattttaaacttattattttatgttttgagtgtacacatctgaagatcctttgggatatgatacaatgataatcagataatacgaaactctttcgttacgtacctgatttagtaccctaagagtaataattggtatcaagagcaattccatgaatgtgtatacattaaatgttgtctagattttatgtatttatatatatatgatatgtatgtgaatgcatggttatattattgtgaatgtacgaagaggtgatgaatcgttaattatgtggtataattgagtgtaggattttgttgtttttattttttttagaaaataatgtaagccattatagggcatatgaatttttatgtaattttatttttaaataattttttgaaattattacatgaaaaata

SEQ ID NO: 109614 - DNA, 701 bp, Cannabis sativa
  modified_base (58)..(64): a, c, t, g, unknown or other
  modified_base (257)..(266): a, c, t, g, unknown or other
  modified_base (483)..(488): a, c, t, g, unknown or other
ggcgtaaactaggtatacgaccatatcataattctaaaggtgtcttagggactgattnnnnnnnaacaacatttaaaatgtcagttgccatttgaaaagcatatccttagaaggatgcaggtagagtttagtagctaagcatggacctaacgatttccaaaagtgtgcgatttcttctttctgcaactccattttcttgtggagtgctaggggcagtcaattgggattcaagtccaagttcaattaaatgatctttnnnnnnnnnntccatatattctccacccctattagttcgcaagatctttacagttttacccaatttgttttgagccaatgctagaaattcctgaaacttctcaaacatttcagatttcttatgcataaggtaaatatgaccatatctagagtaatcgtcgatgaaaaagacaaagtactcataaccacctctagctttaacattcagtggtccacaaagatctgaannnnnnatgcctagtggttctttggcacgctctccctttgaagagaaagaacgttttgtcattttgcttgctaggcaagattcacaaactgctaattcacctaaggttatatttttcaacggaccacctttcgttaacctgtgaagtctatcatagcctatatgaccaagacgcaagtgccatagatatgtttcgtcttcattatcgatattttgcttt

SEQ ID NO: 109615 - DNA, 1213 bp, Cannabis sativa
tgtcgacactaccatattcaatttatccacaaaaaaaatagacaattcaattatatacagactcaactagaatgaaaagtgcaaaatacaaaaattacactattgtctctatcgaagccaaggaagattaaaatccatccatgagtatcattatttttcttatctacaacttttaaattgatgttatctttaattatcaacaatttagagattgatttttaattttcttttttatcttacacacatttaagttgtgtttccttaagtatttgaacatcaatttttaatttatttttggattatcttaagaagatgcttaagaacatatttaaattatcaagctttcttaaacactaatatattgcatccagtatttaattttaatttttaaaaattataaattatattatttagatatacataataataatctcacctaataactaataataatttttctttttttcttttgatttaagcgtttatatattacaacatgcataacctgtgactcgaacccaggacctctaacacacgcactccttatggccacttgagctagtctcaagtgaataataatttttctttaatttttaagtgtatcacttttaaataaaaatataaaataagtaacatagaagttagtatacgtgcctcgtagcattttactagttaataatatacactgatatatattgttctgtgtgggataatatatttgtttttatcatatatattttagtacgcttggaaattggtttcaatgttatttacttgtagtgaatttcttattttttatatgaaaatttgattatgaagttgtttactctattctaattagtgttatcatattttaattttagtatgttatacatgaaagaggattgtcatcccagaatactagagctaattttaccatttaaaaatattacttttaaatattagttactctttttctttaaatattaaaaactgaattattttgttatagtataaatagaagcagctcacactgtactgtattttttggtctagttcttacaattttaaaattttaaagtcttacaacgcaattgcaatttgaaaaattagaagaattagtttggttaatttgaaaaaaacaaataaatctacaccagtgcaaacacacatagaaagaaatgtgtagaatggagataaagctgattcgtattagatttgttttttttttttt

SEQ ID NO: 109616 - DNA, 797 bp, Cannabis sativa
  modified_base (633)..(640): a, c, t, g, unknown or other
agtggcatctctttggcacagaccctgtcatttccggtgacacccataaagttcaggattctagtaattactgatagccattgcttgactttcatgatgtcaggacctcctagaaaaactggaggtgcttgcttgcggaaccgttcatacaggggttccatccgattcactgccaccactggttcggcccgaacagcaggggcaggtgccactagaatttctagagcaggcattgcaggagcaccctgctgacgtaaacgttgaatttcattatcctgttcctcaattcgggcttgcattgctgcaaacctattttcccaattttgggcatcctgagcaccttgggcagcttgggcaacctgtggcgggttaacgccacctcggccacgtgccctgcccctgggacctctacctcggccacggacatttgggggattttgagctccctgaccaacattagatccaactgaattgccctggctcctggtatttcgcctggcgtccatactagtctgaacaacctgcgtaaccaagagctagtcttgtcagattgttgtcaaagagaaacatactaatgccgcttatttgaaaatagaaaaaaaaataaataaaaaaaaacatgcgcctattctnnnnnnnngctactaacatgcttcctaacatgcttttcttaaatcatgcttattaaaataaactattaaagcaataaaagcttactggtgacgatcttcggaagacaaccttgcggctctgataccatttgtaatgtcccggcttcaagcctccattaggtcctt

SEQ ID NO: 109617 - DNA, 784 bp, Cannabis sativa
  modified_base (552)..(556): a, c, t, g, unknown or other
ttttattccaaggactatcaaccttaccagattgttgtgccaatctcaccaactgagttgttttttctacacgtgccaacttcacttcaaccaatagtttttcaaaggattatcaatctctttggattgttgaagtatttttaagtctatttttatgcatttttggagtctattttagtgtgttttttaaaatattttattggtttatttctcagatttatgcttgttatttatttttgtgtatttttcaagagaaatatttggagatctccgtttttacttatttcggtaatcttcaagtctttctaagataaagatggttaattatgagaaaaaaaggaaacttcaagatttaaataatgcttagttgggattctaatagcctaaaattggtcaaatttttacaccacatattgaaatttctaacttttttacttttttactgtggggtggaatttttttcaaaaataccgtgtaagttttatactatgtactatgttaagtttttcactgttgttccacggttgttttttagttgttccattgttgttnnnnntgttctgttttgttgttttacaattattttataaaaagacagtatttttgtaaaaaaatcgtatgacagtaaaattgtaaacttttgcacaaaatctagtatttttgtcaaaatccccttatatgtttagctttaaaattcatggtccaaagtcatgattgtcaatatccaaaaataaatagaaagagatgagaagggggaaagagagggagacatgatagggtggct

SEQ ID NO: 109618 - DNA, 568 bp, Cannabis sativa
gtcagggtggttaaagaatttctcaacatgtttctcgaggagttcctgggattaccgccgcaatgagaaattgactttgtgattgatctagcacctggagccgaacctgtttgtaaagctccatatagaatggctccagcagaactcaaggagcttaagttacaacttcacgggatgcttgatattgagtttacccaacccagtgtatcgccctggggagctctagttctgtttgtgaaaagaaagatggttccctcagaatttgtattgattatcgggagctaaacaagttgacaattaagaacaagtacccgttacccagaaccaatgatttgttcgatcaacttcagggaaagacagtgttttcgaagattgatctacgatctagttatcatcaactcagaatccgggaagaggacataccaaagactgcgtttcgaatcagatatgggcactacgagtttctggtaatgtcatttaaattgactaatactcctgcaaccttaatggatctcatgaatagggtattcaaggatttgctcgataactgcgttatagtgtttatcga

SEQ ID NO: 109619 - DNA, 764 bp, Cannabis sativa
attgacgataaactggtttaaagggttctgggattgtatattctgggataaattgggacatgattaaaataataatgccccaattcttggaaaaatagagcacaaataaaacccaaaactctgtgaatcgtataaccttaaaatttttctagccctagaattattcaaatattcaaaaataaatcacccaagcaacaaaacagtgcatacaagaaacacataccacgaaattgaaactgaaagcatgaaggaaaaatcaacaaagagaaatgccacttactggtttgatgagatgttctgtgtaaaaaaggacttcgcgatgaagattttggtgatcgaaaagttggattgtgatgattttgaagaaaaagagcataatcagatgagatctggaagaagaatgtgagagacagagagggcatgcaaattcaaaagaggggtggttgagatttttttgaagcttgaaggtttgtgggctgaaaaatggcaaaaattttgcacaatttcaattttatacctaaaaggtggccaccgtacgatcaaaataaatctaatccaacggatgggaactatacacgaaaagaacagtcgaagcattaaatgagaaataatatgcctcaaagttttgaactgccaaattctaagcatgcaaattttaaatggaaaaatacgataatacccttgaagacatttgaaaagtcctttttaattaaaaaatactttttagggggtaattattatacccgaaatttggctatcaacca

SEQ ID NO: 109620 - DNA, 704 bp, Cannabis sativa
tttgtaaacgggatcccaaaatattttgtatgtaacactataagtttttaattaaataagcaaattttaatcgatcacgatttccattaacatcgttgattagcaacgagctgcacagtatgtttgaaaacacgttaacacgcctatgctagttagggtgttacacccaaaatgatataaatcctcaatcttagaatctcctatttgtatatgcttactttaggcaaattaaacttagagttagattaatagtggtggtccaagctagaataaaactcattgtatattaagtacaaatttaagtctttgacttcaaatttcagattccaaatggaaatttttatttcaatttccagaatacaatacagttcaactttcacaagttattaatatcaattttctatcaatggatccaaactgtatgtttatgtatggaatatgagtttagtattttgtgactagaatccacttggactattctaagaactctttattgtaactagacgtaaattatcaaaagaccacaactacattcttatatatctatggcatttgcatcttgtccacagtggtttcatcaagatcattctctgtaatgagtcaatatgcctatatctacttgaaagtaagatcatctatatccgaatatggatgtacattgaggggtggatatgagttatcattaaattcttaagacgatcact

SEQ ID NO: 109621 - DNA, 649 bp, Cannabis sativa
  modified_base (477)..(483): a, c, t, g, unknown or other
ggatgcctttggtgggaatctcacaacaatctggaagtaaaaatcttttttgctctgagtttgtttggcagagaaatcattaaaagtaaagttatgaggaagactcaaccttatttataggcaatgtgttgaaaaaggtaatcatttcaaaatgcctttagacgcttcgattccctcccaaaagaaaatattgggaaatcaaatgtaatcaagtgtaaccgtcaaaacgtgatgagaaaaaccgggtttcaagacactaagtaagtcagagcaataattagtcgaaaactgaagagacgcctggtcagcctcacatcgaatcatccacagatgcacctaacacgtgtcacccattcaaagtgcaaaggcagctcggataaagtctacacgcaacttcgaaagtcccgtacagacttggagggaaaatgttatcccaattttggcactctgacgtggcatcccacaatggtgacacgnnnnnnnaacttcacatatctgttcgcaagagatatgccgaaccgaacaccacatatatttgcacagacgaagcattctcaaccaggcaaaggacaacccgagcagcatgccaacacttagcagtttcaacacttgcatcgtgaatcacagaagcaatccctataattttggg

SEQ ID NO: 109622 - DNA, 773 bp, Cannabis sativa
  modified_base (734)..(743): a, c, t, g, unknown or other
ttaggagaatgacttaatggtttgcccctagtggcattttcgtaaagacaagtttgtaaccagtctgaggtttttcttatcgtaaatgccttgtattgtttgtatgcaaacttaatacaactgtattttcttgcgttattattcacaatgtaaacaattatattttgatcaaatatacagtactttaagtaaacatgccattacattttcaaattctgtaccaatcaccgattcaatattttaacattcaaaaattgttgacaaacacttaaccaatcacattttcagaaacatgtttccaattacaaaattcaaatttgtatttaagaatatcaaatttttaaaatatagttttcaagatgagatttttaacaatctcattactagcattttgtactaaaaaaaatctaccacaataccaaatcggtcaaaaaaaaataatttctactctaaatgattgtacttcaaagttattcttctgacaaataataaataaaaaaattgtcattattatattttaaatatatttacacttattttttttttaaaaaaaactaaaataataaattccatttgctcacattattttataaatatgtatcacgcgtatttgtaaaaaaaaatgtgcaaatttttatttttccaagatgataagacataaattaattaaattaatagttaggtggtcaaattttgattttcgaagattgcaaatgtaacaccctaactagcannnnnnnnnnacgtgatttttaaacgtattgtgcagctcg

SEQ ID NO: 109623 - DNA, 830 bp, Cannabis sativa
ttctctcactttcttacagctcaatattataatcatattttagtagttgccgaaaatctcggtcaacacttgtaaaataaataattcgaactatattttaaattattttaaatatattttttcaaaattttataaaatatctaaaataactataatatgttatattattactgaataatataatatatagattaaatatatgtaataaataaattatatgtaacatatgataatatataagaaatttggggcgaaacctctttatgttttaatttttatacacttaacctctttattttttttttgtggaaaaagtcccgtatgttttaatttttatacacttaacccccttatcttttgttttgtggcaaaaccccccttatgttttaatttttgtacaattaatcccccttatcttttttttttttgctagcaaaactcccttatatttatttttctttacaaatttgatacgtcagttaaatattaccgttaaatatcaactggatgaccactatatacacttgtgtatgtaacagtaaaacctcgaagtcgatacagtagtaattcagttagcatttaacggtaatatcaaactaaaactttaaatttgcaaagaaaagtaaacttaagggggtttcgccaccaaaatataatataaagaggttaagcgtataaaaattaaaacataagagtgttttgccacaaaagtaaaataaaataaagggggttaagtgtataaaaactaaaatataaggaagtttttccaccaaaaaaaagataaaggggttaagtgtataaaaattaaaagatcggaagagcggttcagc

SEQ ID NO: 109624 - DNA, 696 bp, Cannabis sativa
tttttatcccactgccatatatcccggtttttattttagcgaaaaccgggataaaaggccttaaaaaccgggattaaagacctttgtttgtagtagtgttttgtctcctgtgccacgccatggaagtgcgcgtacgcaccctcaaatatgcttttggcccaaaggcctacttagagagtattttgcaaaggagagacctttgcgtgatgtgtgtcctagttcgtacaaaaactctcacaagcagctgtacaccgctcgatgaagaaggttcttaccagcaaacggtcagatcatcctttagcagtattggccttagtggcgtgtgtagtacgaaactctaggtaggtaaagggtatgccctttaccccatatgtgcctataaatactcccattttttctttaaagaggaggaggaaaaattttacttgcagacactctacaaaaactccaagaaagctctctctctttcaagaggagtgaaagaaatagagtaaaccctactgtaaccattttgtaatctctaaatacttgcccaaagaggccgatacatttgagtaatccactaaggatcattaacacctgaaccacgtaaaaaatctatttatttattgcttcttattatttcttatttctttaagctctaaatatatttgatttttgagaaactcggtaaatattttagtgcttccattgaga

SEQ ID NO: 109625 - DNA, 1814 bp, Cannabis sativa
tcttttttaagttatcaacattactcttttcaacaatagttatattactaagagaaaaataacataagattaaaccttccaacaaacaaaataatatttttacattactattctctgcgaatattaatctattccgaacagtcaattaaaacattgaaacacatcccttaagttggtggattgtgtgggggagtttatagtagaaaaaagagagcccattactcaagaaacagttaaaaaagaaaaagtagggaatagacaaaatagtaacatgtttatatagttatatagctgtgatgtgaagataggataggaagtgacaaatcggtaaagcaatgacttttctttcttttttccttattttgttgaaatgaaatagtagttaatatagtgtccaaaggacccatcaaacagagaaagaaatatagtgaagaaaaaaaaaatcttcaaaactaactatatatggattttagggtagagattatatatcaaatgtcttttcactttctattacttggtggggttcaaggatctttgtctttggagggtcaaacctatctttttcttaagtctctctctcgccaattaagatttgagtattaaatatactaataattaattgttaattaatctataaacttcttcaacaaaagcatacgtatagtagggtaattctatagtaaattacttaaaagatcagttctttctataattttttatttgttttgatatttatgaaaaaatttaagttaatttttttttataattgcatttgattatttaaaattacttgtaaatttaaaaaaaaaataataataatttaaatatattattgaacgtgtatattttttttatacgtatgtaataagtatttaaactttaaactttattttttaatattgtaaactcataaaactaaaaaattagactaagataatcttttttgattgtcaaataaaattcaagatgtatcgaaacaccaaaagaattacggattgttatgaatttttgccttatggtaataaatgtaaataagagtataaaatgcaagttgtacgtagtagatttatatacgacagaaaggcaatttgtccaaagtaaatatacttttccattatctttagaggtaataataataataaattgagagttgtgaagtattttttttctatttttttaaatttttggagtggaatttaagtacttgtgaagtgggcttgactaaaattggctataaaaagtgataataggcaccgacaaataatgttaatattaattaaaattgcacagcttttgatttagtggtattctgccaaaaacaagggtttgattgattacgtcaaattcgttgtagaaacggtttgaaaataaattaggttttggattggcctgcgtaaggaataaatatttttatacttatatatggataaattataaaatatatatcccaattgagataaaacaatttcccacctctcatcaactcaaattttaatatttgtgcatgcatgcatgcgcaagcaaaactgttgttatttaatatagctgcttttttttttctataagaaaaatagtacgaaaaaaaatattaaaagaaaagacccaaaaactataattaataagtagttttggtctgttagataattattttaaaatgtaaaggaaaatttccaagaacatgtacgacaaatattttaaaaaggaaataggtagataagtatactagctatagatagcttgctagcgtgtcaagaaaattctcagccattactcatttcatttggatataataatgaattttattatggctaaat

SEQ ID NO: 109626 - DNA, 1264 bp, Cannabis sativa
  modified_base (191)..(192): a, c, t, g, unknown or other
  modified_base (878)..(880): a, c, t, g, unknown or other
gatcggggtccagaccaggacacatacccggacacagactcggactcgaactcaaacccacacctagaatcagagcgaaagctagacttggagacggacccaaactcgaacccagagaaaaatcaaaacaaaggacttagacccagaactgaatccatactcagatcggtattggaacttgggactcgaanncaacctagaccaagacccaggagacgaacccacacccggagcctgatatgaccctagactgaaatctggacccgaacccaaactcagaccaggactcgaactccaacccgaactcaaccccaaactcgaactcagaatcacaaatggaactagcaccgaacaaggactaggactaggacaaagacctaaactcaaagccgaacctagatcaaaacctagagagagacctaaaccagaaccttgactaggactcgaacccaaacctacacagggaccaaatccaaaacaataaccgagaccttgacccagaatcaggatagggacttgggaaacagaactaggaacagaacgtagttcccgatccagacctgaacttgaacgtagcacccagctcgtgacccgacaccagattgtaaccagattcggacccgagatttgtatctgaatcttgatcgggggcttggacaaaacccggagtcagcgtctggatttgggacccagcccagtacccaaacccttacaacgacccgaacccacacccggaccttaacctagtccgaaatccaaaagtggacccgaacccctaccctgtgaccaaaaattggaacctaaaccggaaattgatcgggactggaactaggacttggtcttggaatcataactgaaattggacctagattcaaaannntaaccggaccaggacccggactccaaattagacctagacccgaattgggaaccggacccggatcccaacccaaacatagactcaggacctgaaccaaacctgaactcatacctaatcatggaaccagactaaggacagagaaccagtgtcgggacctagaaccgcaccacagtctcgatcaagaacccgaactcaaaaatgggacttgggacctgaaccagaacaataccgagacccgtgaaagttatccagatcttcactcaggattcgggtaaaggggactgcaacaaactagaagtcagttcctagatttcggactcagactaggacaagaaccaagaggaagaaacaaactcgaacccagacctagacctgggacccaaa

SEQ ID NO: 109627 - DNA, 553 bp, Cannabis sativa
  modified_base (457)..(474): a, c, t, g, unknown or other
  modified_base (523)..(527): a, c, t, g, unknown or other
ttcctctcttttgacccttgtgtgagagttagaagaccaatagaagtgggtacgacatactggactcagtcctccctcacatgaacaactccaactgtgaagacacatttgccttatttaaataattgtattagactaattatattagtttaacctaattagaatagattagcaacataattaattttaaaataaatgaaaattaatttttttttcattggattattttcaaactaatttagaaaaaaagaaaatattttagataaaaaattttagtaactaattatattttctaatatatatttaagttaaaaaattaattttagaccaacttaaattagaatattttttatatattaaattagaattaataattaagatgatttattcaagatacttaattatttatttctatgtcaataaatttaattgatagaaaatatatttaagttgaaannnnnnnnnnnnnnnnnntttagaccaacttaaattagaattttttttttcttagatattaaattannnnnaataattaagttgattttattcaaga

SEQ ID NO: 109628 - DNA, 779 bp, Cannabis sativa
catcaagactaatcataattgtcaaatacattaatcaccataccatattaatagattattttatttgagacttctaaatttttctttaattatttaatttctccctatactacattaattctttcatgtatatacatatatcccatttagctaatttcacgctaaaaaaatacagagataagaattcttcttttggtaattaacatgtctttggtggaggtcactttctaactaattggagctagtaagtatgaagataataatgataaatgttaaaattaagatgagtttatattgttatgtatgttttggtatagatgggggttttgttcaataattttggatatttgatgtataaattttggatgttgcaatcatgtaatatatataaatttattgaatatttttttcatgctgctctccagtagaggagttctctatgtttttcatattgaaataatgtaatttagtttaaataaaataattacactaatatgtgcttgcttaatttgtatatacataataagtaaaaatactgcataaactattattttttccttttttttaagcatgtcttattgtttctaataatattattaatagttttttattttggtttttttttacttcatacgtatttgacttgatcagaggtgattcactttaaaagtataactctcatcatacactcaattagaatgctcttattattttccttactttatgcatatggaatatatatattgatatatagttaacatcattattatttttatttt

SEQ ID NO: 109629 - DNA, 896 bp, Cannabis sativa
tatggaaaatggcgtggtttctattagagaatccggccaacccaagacccaaacctgcgctagaagatctttgtgcaaacctctttctagtatcgagggatttcctaagcctggaaaaaagatctcggcttcaggaaatgggatcttctgatgatgaggggaattaggtctgtacagagatcaaggctctctacatgtagccgctctttctcaagctatgtgtagtcagtctttctctgagctacgtgtagacggtctttctcgagttcatcaacttcccctctcatccttggtttaggaagatgacttaatggtttgcccctagtggcatttttgtaaagacaaagttgtaaccagttttaggttttttcttatcttaaatgccttgtactgttttcatttgaacttaataaaattgtgtttgcttgcgtttttattcacaatgtaaacaactatattttgaccaaatatacagtacttttgggtttctccattgctcgtaatattcttggttcaagtagtaagtaatctaccaaactttttgatttttgagcagttgtcaaatctgcctcgctatagcagttataatctgccttaagcaaacttaaatattcttttaagaattttatcactttgtatattttaattttctcgtatgaaaagttatattatctattcattttctaggttgaagaacttttataaaggcctcgtgatgcctcgttttgtactttcctagctcgcgagaaccgttagtagtattattcagtagttttttatacgacgtgagttataacttttgattttcgtttcccgtaggataggttataaataaaaattatagttgtttgatcccttcttcgtcaaaaaggtttgatcaaggtgttataacgatt

SEQ ID NO: 109630 - DNA, 684 bp, Cannabis sativa
tggacggtttttggcagtttttgggcggtttattgcgattttggcagttttttggtttaaccatttttttatttcaaaaatcgaaactgggccaaaaaactgaaaccgaaaccgaccgccaaattcggtgatgacgtggaaccgaaaattcgattacggtctggtcggtttgatggtcggttttggtttatcgatttttatgaacacccataacatgtaccaaatcatgctgcttgaacatttcagagtattaaaattctctcagaactattaatattattggattcaagcatggacgaatccacacagatcaagcagggccgggggtggggggaatcgctcccatgaaaaaaatcaagaaaaaaaatgtgtacgtattttaattagttacaccatatatttataattaaaagtgatattaatgaacatgatataagctttgttatatcagttaattactctacatatatattggaggtcaatatgatttcaaatcccattaaaagcatgtttattgtttagtatttttaagttttttttttttgaacatttacttttaagacttgttagtaacttaatcattgaaatcaacttttttattgttactttttcgttactttaaactatatttaactaggaaacaaatccacgcttcgcgcggtttgtgacagtacaatgacaatt

SEQ ID NO: 109631 - DNA, 683 bp, Cannabis sativa
ttccatggaagatgtcgtcctcactcttacctggcctgaacccggtggctctctgacaccgtaactttatattactggcatgcaccaccgatgtcggccaagatcggattgcgattccttttttgaatgctctgtcttaggttcccttttctagagttaatcttcaattatgattgtagttttaggggttggattgtgaattctagggttctgatttttcatatgtttggaaatggacgaattggaaatttgtgtagcttgtttttagtaatgttttggtatttttgtttgttcgttataattttttattgttaatttgtattttgatatggcattagattctagatttagcaataatgtttttaggagtttgtgtttggctcacaaaattcttgaattttgaagctgatatgttgttttttcattggaattacataatgtgttactagtgtctaatgagcatttagctgtagaaggtcggacggttggggttctatttctggggttggacagtcgggggttgacgacttgggctggacggttggggttctatttttaggggtttgatttctagataaaaaaaacgaagaagaagaggaagaagaagaaagatgaagaaaaagaaaggaagaagaagaagaaaaaaaaataattatttgtttaattattttttttctattttt

SEQ ID NO: 109632 - DNA, 504 bp, Cannabis sativa
aaaataccgtctgacagtatttttataaaaaaataacaaaaattagtatactatgtaaatttcccaaaaaaaaatctatattgtactaaaaaaagggtgtttcactgcacactctttctatttcggcatttagagaattctaaactccaaatatattttattatcttgtatgatagttattattaagactaattataaatttttaaaaacttataatagtttacaatattaaaaatatagtttaagtattttattgtgattgtatgttataagtatttgataaataagttacatataattctataaatatatttatttgtcacatgttgttttgtgcatttgctacatctttttatgcatttgatataatgattataccaaccgccaagattacaacagtgtggttcttgttaggttatttttagtatattttagaaaaagtgtatattttagtatattttagtatattttagtattaattttagattaagtttagtatatttt

SEQ ID NO: 109633 - DNA, 525 bp, Cannabis sativa
tccaggttctggaaagtacatagagatgccgcctttcggttaccttttcaaaggaatggacaaagcagaagcaagttacttatcttctctacgggctccagttaaaagatccaaatcgacaacttagtttgttttcttgtaaaatattagatcagctgaccaagaaaagaaaaggcaacaatgacaagaaagaaccaattatttgaaatgttggaatgtctcatataattagcctaaataataagttaataaggttggagattatgtatagatacgtgttcatatcaataaattagatccatctcttgcattttgtgattaaacaatacatatttgtgtgtatagtttttttttttctttttttaatttaaatatgtatcaaacgaatttcaaagttaaattatagtgaatatgtatgtagttatattgcacacaaaagagaattatagaaagggaaatttgataaattatgctaaaacattagattatgtgtttaattatacccaattatcacacataaaaaaa

SEQ ID NO: 109634 - DNA, 792 bp, Cannabis sativa
  modified_base (111)..(117): a, c, t, g, unknown or other
gatttgagcggaaggagtcatttaattctgctacaaccaatgtaaggtttctcatacctttaatgtgttttattttacatcgttttataagttcatatttaggatgttaannnnnnncttgttagtaaatttaggtcctggtaaaataaattccaacaattaatcgcccaaaacataagttgtaataatcatcttctctgaaaaactttaacaagtgaattaaagaacttaatgaacacaaataggagtttatgtatactcaagatttagattgatctactaatgatgatcgttgtgatatgaattatacacagaacctttatcacatgtctatccatatatgtgatctgaattaaaatcatacacactaaagtataacgtatagtaaaccgtacttggtaattccatattaaagattccttactttaatacactactgacttattttattcatattgtataatcttaattctcttatatgaccttacaagattataccaactctatattaataagaaattttcaaatatttattaattatacttcaataattaatgtatttatttatcttataataatatttcatatatctataatatattatcaattaaatacttgcttttatggcataaatttccacatatctattgcctcactagtccgctgaactaactgaggatccgaatactttttttctccagttacatcccaatgaattggagaatgacaattcctaccatataacatctcatagagagtcatacctattgtactctaataattgttgttgta

SEQ ID NO: 109635 - DNA, 558 bp, Cannabis sativa
aaataaaacatggaaagttgtgccacgacttccacacatgcatgttgttgacaacaagtggatatttcgcataaaatataatgcagatggctcggtcaatcgattaaaggctcgccttgtcgccaaaggctttcaacaacaactgggcattgatttctttgaaacatttagccccgtggtcaaatcatccaccattcgagttgtgctctctctagctgtctcccacaattgggacatccaacaaattgatgtcaacaacgccttcctaaatggaacccttcaagaagaagtgttcatggagcaaccggccggttttgttgatcctcaaaatccaactgcagtttgtaaacttgagaaagccctgtatggactgaaacaagcgccacgagcatggtttgataaactcaaaacaactctacttgctctcggttttaccaattctgtagctgacacttcactgttctttttcaacaaaaatgatgctctgctctttgtccttgtgtatgtagacgacatccttttgacagggaacaatgccactcaagttcaacacataat

SEQ ID NO: 109636 - DNA, 711 bp, Cannabis sativa
aatttcagggggggccacggccacggttaggccatatgtggctctgcccttggatagagggattggagaattcttttgtttggcaagagggagagaagaagggagaggagagatggaaggagagagtctccctccaaacacattatttttaatccctcttaacatgggagaattcaagtaaaagacaaaaaaaattatacaaaatatctattctacccttaaaaaaaataatatataattgtattaaaaataataaaaatagtaattttaatatttattttactctccatgcttccacatatactcttaacaccaaacaacacaaaggagaacacatattctctccatccctcctactccccatcctttctatactctccatccatcctactctctctccttcctactaaacatagcctgagtgacttttttttttaccaatatttaacatttatacttgctttctctctgttttttttttttttatatatatttttacattttaaaattttctctaatactattataaagtttactaattataattatacgaaaagagttattttttttttcttcctcctctattcacatatatcaatttgaagtggtagccatctccacccttccatctcacacccagcccctcttgtctccatccctctcgtctccagcccttcttgccatgtagaacctcttcttaaccttcctatg

SEQ ID NO: 109637 - DNA, 970 bp, Cannabis sativa
ttcttgagaagtcaatggttataagcatggtttgaatttttggcaactcaacgtcacgccctttcatcgtcaatgtgcttatttcataataggtagttgtccctaatatgttttgcatgtaggttaattcatcagtattggcattcatcattcccacgaaattcttgaaaaacttttgcggcaaatggccagtgaattcattgccactgaaatccacaattctcaaattttggaagggatatcttgcattgggattgcctattggaccttgaaatctattagatctcaagataacaacttgaagcattggaagagattccaaccaccaaggatatgatccacttatcttgttgtttccaatatctaaaagttctaactcctgacaattgactaatgattttggcaatgacccttccaattgattttcattaacattcaaaacccttagtatacttccccattcaaaaactggaggaatgattccatcaaacttattctttctcaaatctagcacttcgagagagcttgaatttcctaggcatggaggaatgctcccactcaaattgttaatggacaaatcaagtcctctaagcaaagtgagattgcaaatggctggtgatatttccccaacaaatgaattatttgagattgaaataaatattgaattaggtggtaggactggaagatgaccttgaagtcggttgaaggcgagattaatgtatcctagattcttccatggaatctgatctatttgtgtcaaagagttgtgagaaatatctaggaataccaatgaatccttacccacattccataaccattggggaacactgccttcaatttgattgttggagagatctaagtattctaaagtttgcaagcttcttaggaagtaggggaactcacttataccacatgaagacaaatacaataaagaaagagtattgggaaaagtatcattattataattatt

SEQ ID NO: 109638 - DNA, 1553 bp, Cannabis sativa
gtgtgactttaaatcttacgaagccattgaagagacatatatccaatactcaaagtacatttctacaacgccgcttaatctcagataacatcatgattgcctatgagattattcatcatttaaagagaaaacgaagagggagggatggttatatggcacttaaacttgatgttagcaaagcatatgataagcttgatcggggttacctccgtgctatgatggtaaggatggactttgatggtcgttggattaacttagttatgcaatgtgtttcttctatttcctataccatttcacacggagggaaggagttggggcctattgttgctcaaagaggattacgtcaaggtgatcctttatcaccatatctgtttattctttgtgttgaaggtttctctagtttgttgcgtagttatgaacaaagtggtttactcacgggatgtaaaattgctcgaggtgcaccggtaatctctcatatgctctttgttgatgatagctatatttattgtaaagccactcaggaggaagcgtacaatgtgaaggagttgttgcatacttatgaggtggcttcgggtcaaagaattaatttcactcagccttttgtgttttatagcaataatactggtagtgaggtgcgggattctatctgtgctatgcaggaaatttatgaggctgatgaaaatggctattacctgggccttccttgttcggttgggaggaataagaatgttatccttggctttcttaaggataagcttcggaagagaattcaaggttgggaagggcgtattttgtctcgtgcaggaaatgaggtattgctgaaatctattgctcaagcattgccgaattatgctatgaatgtatttctcttgcctttagacacttgtaaggagttagagcagcttatggctaagttttagtggcattcggattcaagcagtggtaaaggtattaataggatgagttgggagcggttgtgtcgtcataaacatgcaataggactgggttttcgaagcttgagagactttcatttggctcttttgggaaacaatattggtgattgttggttaatgatgactctttggttagtaggctctataaggcaaaatataatgctcatggtaacttattttctgctgaattgggagataatcctaatttcatctggcgaagtattcttgaagctaaagatctagtacattcatgtgctcaaagaacaatcgctaatagggaaaatgtatccattcttgcagatccttggcttccacatagttctaacagctatgtcgttacaaggcaccctgctcttgtgaacaaatcggccagctgcctctttcaagttgacactcgcgcttgggatgaggatgttgtgagagacttgtttgtttcacgtgatcaggaccttattttgtccattcagcttagtgattcggctgtaaatgatggttggaactgaagacttgagacttgtgggaattattcaattaaaagtgcctataaatttttgcaagaatctaaaggtgcttggtgccgtgatgctaatactgattttt

SEQ ID NO: 109639 - DNA, 653 bp, Cannabis sativa
gccgatcactccatcacgaggtatttgtcaaggtgatcctttgtcaccttatatttttattctgtgtgcggaaggtttatcaactttgattaaaagatatgaggatatgggtctcattcacgggtgtaaagtggctaatggtgcaccaaaagtgtctcatatgctattcgctgacgacagttatttgtattgtaaagccactctacaagaagctaatcggaatcgagaacttcttcatcaatttgaatgtgcttcaggatagaaagttaacttggggaaatcattaattttctatagtactaatactgtgaatcatggtgagggaggatattaactctttgttacaaatgccacaagcagatgaaaggagtatgtacctgggcctcccaagtactatgggaaggaataagtcggctgtgttgggtttcttgaaagatagagtgaggaaaaagcttcaaggttgggattcaaaagttctttctcgcgctggtaaagaagtgttaattaagtcagttccacaagctctccctagctttgctatgaatgtgtttttgcttcctttggagattagcagagatattgaaagtaccatggcgagattttggtggaagagttcgtcgaaggaaaacaaaggtattccttggatgtcatgg

SEQ ID NO: 109640 - DNA, 576 bp, Cannabis sativa
cattgcaatggactttctaactggattgcctagaaccacaagaatgtatgattcagtgagggtcatagtggacagattcacaaaatcagctcactttctgccagtgaaaattacatattgagtggatcattatgctgaactgtatgtaaaggagatagttcgtctccatagagcgcctaaatctattgtttcagacagagatccaaagtttacttcaaagttttgggtgagtcttcagaaggctatgggtaccaacttaaagtttagcacagcctttcaccctcagactgatggtcagtcagaaagaacgattcagatattggaagacttattgcgagcctgtgtcatggactttgagggttcgtggagtaagtacttgcctctaattgaattctcctataacaatagctaccagaatacaatagggatggctccttatgagatgttatacggtaggaaatgtcgctcccctattcattgggacgagactggagaaaggaagtacttgggtccagaattggttcagaggaccagtgaggctattgataagatcaaggctcggatgcttgcttctca

SEQ ID NO: 109641 - DNA, 3395 bp, Cannabis sativa
tttttgtatttttatgaaattccacaaagaaacccttatagcaactaacggagccacctaaaccgcaactaaaatccgtatagcaactcacatagaaattaccggagcaacccaaatcgtaaatttcaaaaaaataaaataaaaaatagtatatgaagtaattcctctttttttattgggtatatataaatagtgttttataattgttaactaacatttttgacaactaataaataaataatattagagaagttaaaagggagttttatttttaaagaagttaaagattaagagcttgtttggccgtgttttcagtttttaatttttagaattgtgttttcaaaaatgagaatagaaaatagttttttttcattataaaaatttaatggtgtttggcataaattttttaaaactattttttagattttttcttactaaaaaaattaatattttaacaccataccatgacataaatctatccatgtccgggttcggatttagttttgggtctaagatccgagtatgtgagcaaaaatataaaatataatatagacaaaaaaaaatatatatatatatatttttgaaaattgaaaacaacatattgatattatctgtttttactttttcaaaactcaatttttaaaaaaactgattttaaacaattttgtcaaatgactattagtttttaaaaattatttttagttttaaaaaacagaaaatagtttttgatgttaagaagccaaacaacttttaaatttttttatagaaattgggggtgttttaatctacgagttactatattaaaattgttcaagcttacaataatagaagttctagaatttcaaatatgtttttgttttaagaactaaaaattggatcccctagaatgagattataaaatcaaatatacaaaaaatctacaacacattcaaaatgattattttggtacacatcctatatgtttcaactttcaatttacaatcccaataaaaaaatttaatattttataacatgttgattaattcacataataaataattattttaattttattttcgaccccataaaatttataaaattttgaaaatttaatttaccaataggcatttacctatagtcattttgaaagaaaaaaaaataagaaggctccgaggaaagaataaccatgggttccgagatctgaaaaaggatatattacctttaaagggtggtgagttgaccttacgcaatgtaacctttttttgtttaaaagtcacatatttattcaccttaaggcataaactgcaggtatacacatgcaatcgttagagaaaattcatcaagaacaaagataaggataagcaagggctgctgctataacaaatgacttaatactatttttgcttaaaactcagttaaccatccccatccctattacaatttgaattttagaactcattctgtaacatttgatttggaattatccaagaactttgatgttaataagatactcaattaagaacactgatttttttttttttacaactaaatttaaatacatcccactaactgcctagtccgccctgccagtatgcaaatctgcttgcttcaagtaaaggtgttctaattttgtttaggatttctgaccacgttcccttggataaggatgaattttcgccagttcacgaactctgcgtatcagagacttcggcaatggacgcaaagcatgcaactgcttttcttcagcctgtatcaaccatattataagaacaattttcctaaatcttccaaatgatgcctaaccagagaactgaaaatgtatataaataaaatgatacctctttcttcttcagtttctgcacagagctggctctcagaagatttcgccatttgtcctgcagagaaaaacaagtatcaacaacttaagactatgttaggaaagaagcaccgtatttaaaatgtgggaactggagtcataccctgagatctatgggtgtgcgatacacagaagttgtaaaaagaaatcttttgatgtcggtccatcgtccaactccatattcagcaataccatctaccaacttggttacctctgtaatagtccacatcctttgatgcttcctacgatcatgcttttcagatcttttctttttcttcacccgatcatcatcagagtcggatgtaaagacttcttcctttggtttggttacctacatgggaagtaatgattaattggacatgttgaacacaattatggaaattataatgttaaacaagctcaagctcgctcaatacaggagaacatgtaattaagtcaccctcaggaagaaataaatagatattcccaatgatttcaaggaatcaaaaaagacaaaaggagcatctgcaattctacttttttttttatcactacacaaattaaccaatctgatgaacaagcaaatcatttaaatcaagttcgattatgcataaagaaagagactattttttttttggggattaaaggtggtataaagctgatgaataaaattaacagtggatgaacaaacacaaaagagtcgtaatttcctaccaaaactgaaacctgtttctttggacgtcctctgcgagcccgaacctcagggaccacctgaattgtagtttcactaggcaattcctcctcaggaactgatgacaatgttccagtcaccagatgaagttcatcaggagatctaatcttcaattgtctgttctttgtaacagcagaaaattttccttgtcccttgagatgtttagacttcttatctgaaaattcttcaatgtacctctgagtaggcttacgcaatcttttctctctacgaggagcaccacttttacttgtgtcacctaacttcctcccatttttatttaataacatggaacttaataaaggatcttcatcgtcgtcctcatctgacagattaggattccgaaactcaagtgaaacaggcttttcacaccttctcctgtacttgagagctggtaactcgtgattttctgacttgagaagagagtagtcattcttaaagtccgattcttgaatcgttacagatgatgattcagacatcccaacagcactattactacttccgcttaatcctggagactgactcgcaggacttacatttcttgttagtgatccccagcagggaggaccataatccattccagaaggttttccagtgaaaccaatctctgtcaataacaaataagcgtaagtaacagggagaaggagaaacggatgaagctgttatagaattcaagttttagaagtgataacacggaatacaaaggaatcctccagtacaagaaggaagtgcattgttacaattaaaacaaaatggtcgctgaaatctgaaaaaaaaaaaaaaaaaaaccagtttaaaaaaaaaaaaaaaaaa

SEQ ID NO: 109642 - DNA, 718 bp, Cannabis sativa
tgatgacgtgtcacggtatatggatggattgtttttatataacgttttttttgtaatattaatgcatataatgtatatatataaaaatttctccaaattttatataagaattttaattgtaaatattatttattttttttcaattaatatgtaaagtgaaacctaatattttttttttcttttcgatcaatataatagtagagtgaaacttaataatttttatgattttatcgatcaatatatttcatataatttttaaaggtacaagatcttgaaatataatattaaaatcgaaagtattttaagtcaaactatatttataaggtaagtcaaatttcatatattataattatatgaagtattaattattgataggagacatatatacactaatgttgctgcaatagtaaaaaaaatcttaaaatttaaaatctcaaatctcattttaaaaataaaaaaatattatttaattaaaaaaattaaacatacatatattgcacttaacatcacctaataaaatctaattaaaaagaaaactaattatacttgcattgcacgtaacattaatctagtatatatataaatacagatacacaggaatatatgaatatacataggggtgttcatccaatccaatccgcattattttgctcgtagtgcatccgatccgcactaagtgcgaatttcattttttggatccaatccaatccaatccgca

SEQ ID NO: 109643 - DNA, 840 bp, Cannabis sativa
gatcaagaaccaaaatctgtctctaaatgtcaaaatagaaatgattgggataaatggaaagatgctatgcaagttgagttagagtcattaaacaaaagaaatatttttggacctattattctcacacatgaaaatatgaaaccagtaggattcaaatgggtcttcattcgaaaacgaaacgagaaaaatgaaattgtaagatacaaagctaggcttgttgctcaggatttttctcaaagacccaaaattgattatgaagaaacatactctcctgtaatggatgcaatcacatttcaatatttgatcagtctaacagtttctaaaaacttaaaaatacatcttatggatgtagtgacaacttacttgtacgaatcgcttgataacgatatttatatgaaaattcctgaagattttaagatgcctgaagcatcaacctttaagcccaaagagatatgtttaataaagttacagagatccctttagggttaaaacaatctggacgcatgtggtacaactgcttaagtaaatatttattaaagaagggatacattaataatccagtttgtccatgtgttttcattaagaaaacaaaattaggatatgtaattattgttgtctatgttgatgatttaaatatcattggattgataaagagttacacgaggcaatattgtacttgaagaatgaatttgaaatgaaagatttggggaaaaccaaatattgtcttggcttacaaatcgaacatacccacaataagataatgttgcatcaatcaaactacattgaaaaggtgttgaaacgctttactatggataaagtgaaccctttaagtaacccaat

SEQ ID NO: 109644 - DNA, 562 bp, Cannabis sativa
ctaaagtatattatattttaattaaaaaattaataattagtttatgaattatctagatagatattttttaggtagacttttggtatttttctagatatatttattaaacatagaaaactaatatttaagttgattttattcaagacacttaaatatttgatatttttcttaaaaatttaattaaataagaaaattatatttatgttaaaaattaatgttaattaattttagaccaacataaattaaaataatttttcgagttttattttattttattatttttgatgaatttcgaaaatgtatttatttttttaatacatgggatttcaaattccaatatatttttatagaaaaattaaattttagttgaaaattaatttaaattaattttgaatcaacttaaattaaataattttcataatatttattggaaaatttatactatataaaataaattttatttttcaaattttcctaaagtataattttataaatgttaaattaatatttatatttagagttgtctaaattagtaattttaattcaatatatatatatatat

SEQ ID NO: 109645 - DNA, 1475 bp, Cannabis sativa
aggcaaaaactgtcgctaaaaaaaataaaatttataattgaactgaaaattttactataagcgacgggttaaaactgtgcctataacactataggcgacagttttaaaatgtggcctatactttaggccacggttttaaactgtagcctaaactataggtcacggtttaaaactgtcgcctatagtggacactataggtgacgattttaaaccgtggcctatagtattttcttgacggtttaaaatcgtcgtctattctacccagtatccgcgatgctcgtataggcgacggttttatggactgtcgagaattttttggcgtgtaaaaccgacgggaatttgacgttttttagtagtggctaagaagatcgcccataggaagttgttaggaaccacaactgatgtgaaaaggcaaacaagatgtcaacctcggtgtccagtacttgtactggacccagattgagccttgggatgtccatgtgacatcctcaacttcatagttcatcgttttagagtcattatggcctatttgttgatgaataatacctagaaacaacttcgatggatcttggtgcttacctaggtgcctccatcgtgtaggcaacattgccatatcttggaatgtaggcttggaggttgtttccttcgtatcatgtgtcaaaaatagtgtccacattgtcaagccaactttttgagtaaatgcacattccattgtatattttaatattgaccaaggagtgccattctgccaataatattagcgtggtatggaattaacaagaaaatttaaaataaatttacctttttagttatatattactaataagaatgaattttttaaattttaaattacagatgtagtgttgaagtgacaataaaagattattcacaataacatttagttagttacatatgatcaaaaccccacttaaaagtttgtaatttgttttatttttttgaatttttttttttgttgttttaaatttataaatttgtagcatcttacataatatataattatatatatatatttaagatattaaatttaaaaagaattgaataaaaaagatgtagttgataagaaattgatttataaaataggatatcatgatttttctagtgcattaacaaaatgaggtgtttgttaaaaaataaagattatttattgtaaaaaaatatcaattttaagaaccaatattttttagaaagaaattttttatatcaaataaattggaatgtcaaatatatatggaagaaatcttgctggctatatcaatagcacgttatttaatattcagaaatagaataaattaatagagaaatataatgaaataaataaagaataatcgtaattaatatttgtaatatgttacttagaaatggaatgatagtgatttatcttgtttactttatcaggaaacgtaatcaaagtgcttaaattgactaaattacccttttgagttaaactatattat

SEQ ID NO: 109646 - DNA, 651 bp, Cannabis sativa
  modified_base (27)..(35): a, c, t, g, unknown or other
aaatattttttctattttttaaaatannnnnnnnngattccttgtgaaaaattaagtaattttgttttttatggaaatcgattccgataaaaattgaaaaagttatgaatttgagacaattgggattcaaggctgtcgagtcctggaagcggcagacttagcccgagagtaagtgtaggccaacttcagaccggcctgcacaaagaaaaaactttagtatttgagctaattacagaagagtaaagcgaagtgttcagaaagacttaccctggtgaactccttcaagactccgcccaccagcagctccaaagaagagtcattgtcagcaccagccagttgctcactgacctcaggaaccagccgattcatgtagtgggcaagaatctctttgcccttcttggcctctggaagcaccaacaaaggcggagtaggtgcccgcacctgttcatgttcactcttgaccagctcagacccacccttcggtggttcagacctttccaagcttcctccccgagactccttggacttagtattttttggggtagagggctttgtagcagttagctcctcggaaagatcgacgacctcaccagcaggcctcttttcctttgaagaggacccctcaccgcccttagacttcttggctggagg

SEQ ID NO: 109647 - DNA, 656 bp, Cannabis sativa
  modified_base (335)..(339): a, c, t, g, unknown or other
aagaatatccttctcttgaaggaggattagcacgaagacgagggtggacttcgtgcagaagttgaagcagcccctggtcggtttgatgctcgagctccgaagactcacctgggttcatctacaaaagacaacacgcaagatgagtgttggacggagtatcaagcgaaaaaataagcaaatataccgaccaggagtacccaacagattaaagaccgatcatgttcaaagaaaagtctaaactcaagaagtcagagagtttttctttagttagggcaaaaaagttcatgaagcttggaaaaaagcagaatggaaaacagacgcaatgcagttctaannnnngccttacggctgaaagctaacacaatgacatggaaaagaagagtcgcagaagtttcaaaccctagggtttcctacagtgttctttctacaacaaagttacattcaaagcataagcatgcaaaagaaaaacataaagggaatcagaaacttactcaaagattcaagtgtccgggttcaagcaagccagaaatcgtctgtaaacttttcagcaactttgtagccagaaaagctctctctttttgctctgaagtttgcttaacaacgaagggtgatgaaatgaggtaatgtgccactactccaagtatttataggcaaaa

SEQ ID NO: 109648 - DNA, 865 bp, Cannabis sativa
cttttctcacaccgatcagtccaaacaaacttcaggttctttcgagtcagctcccttaagggtaccacaatctttgaaaaaccctcaacgaatcgatgatgatacccagctaaacccagaaagcatctaacttcagtagctgattctggtgtcggccaatcccaaacagcttcaattctggccagatccaccatgatcccatctttatctacaatatgccccaagaataagacacaagataaccagaattcacactttttgaacttagcataaagcttatgatcccgcaattattgcaaaactgctctgagatgcaactcatgctcttcattatctgattcagattacaccaagatgtcatcgataaacacgatcacacatctattcacgtaatcctggaacgtccgattcatataatctatatcaaatatactacgtagccttggcccaccatttatcctgatggtgattcttgcatttcggacattcaagatatgacttgaaagaggatccatgaccttgacggccacctcaatttccccgatgctttctattaccccctgatactctgaaagcctcaaccttccgtttgtaatcagggctaccactgtcggttcccttactgacgttaccactagtaggcggattcgatgccgtgacggcatcctttgcggtttactcttttactacatattgctcagcctcctcagcatttaaggctagctctatcactatcttgtacaaagtgtcttgtgaagtggtaaccttcaagtcccaactaattgtggcattcaatcctctcttcatcctctgctcggcctttaatatgtcaatacctccgagaaaagtcgaaggttgcagcttc

SEQ ID NO: 109649 - DNA, 1224 bp, Cannabis sativa
aagcaaatcgatgaacttcatactagcagagaaagatttccctgtttatcaggccctggtttctagaatcaagttttgcatctcatctcatcaaataaaaagaattaggtcagcattttgtaatactgtatttataagtgcccctactaattcttctgatgtgaaatatcattaatctaagcaaattgtggaggacagaaagaatcaatttcacatatctagtattagtgtgtcaattcatccaaccgatgaatgaacaaagcatcacttaaagaagagaaaagcacaattaataaggatctcctcacctactctgcgattagtcagggcatcagatagccgcaagggatgttgacgttcttccttcttaaatttcaaattcacttgttctcgtgtttgatttggaaaaagtttttgtataatggtataatctgtccaaatttgtccagaaacctgaaccacgagaaactcaggccgcacacacaacacatacagtcaagtcaatcagcccaagacctagttgggtctttatcccatttgaacaatagacatccaatgtccaatgtattcattgcatgtaggctttgacggtgttgcagggaccgagggacccttaaatgtacaagggatgcaagtacaacattgactcaaagtcgatttgcatggctgggtcgtcgacggtatggaggaggggatgttacccttagcccattgtggcttccatcttgtgcatggctggagaaaaatccttgagctcacatgcaactgacatcaaactgtgtaatttttcagtaaaataaaattacataaaaaatttcgatgtcccataatgacatacattatttattaggaaaaatattacaaaaccttcacccaactatataattaaaaattcatcacctctcatacattctgttaactctaaaattaaatgctcttatttttgggattattcacctaaaggaaaaaaaaatacacgcgagcaagcccccgtgagggtttcggggcaaattgagcctgaagtgcataaaggtggcacaaaagtgtgaaggctcgcatgcgagcccattgtgagcttgcatgcgagccatatgtgcaatgcatggttggttgcgtggtgtgtgagcatgggggctcgcatgcgagccgtgtgtgcaactgtcaggattttatgccataaataatatcaattttaatataatctgatttgttatcaataaaaga

SEQ ID NO: 109650 - DNA, 1420 bp, Cannabis sativa
  modified_base (699)..(716): a, c, t, g, unknown or other
tcacatttcaggcaggggaacatgttttcctgcgggtttcaccaataaagggtattaggcgcttcaggaagaaaggtaagttgagcccaagtttcatcgggccatttcagatacttgagaaggtcgggtaggtagcatatcagctagccttaccaccagcattgtcggctgttcatgatgtattccatatttctatgttgaggaaatatgtttcagacccgactcatatcttgatttatgaaacccttaaactgcaatcagacttatcctatgaagagcaacttgttcagattcttgacagaaaagaaaaggttcttcagaacaagaccattgctttggttaaagtgctctggagaaacagtaaggtggaggaagccacctgagagttggagtctgatatgaggactcaacatccatagctattcaagttagatttcgaggacgaaatcctgttaacgggggataattgtaatgactgctttagtaattgggattagcaaaagcaattagcactaatttctgacatttttataattatttatgaattcaattatctgtgggcctcattgttagaaatgggcattagacttataacttctcaattctggagattttattaaactctaggagtattatttgatttatatgtgaaatttgttttttttgtaatttttcctcggcgacaacggaaaatgcgannnnnnnnnnnnnnnnnnacatgggtaagtttagaaccttatttcttagtgggaaatattttggagaaaataaaataccgggattgcgcggggttatggtttttgaccattttacccctacccttaaaaatgcttaagttgtaggttaaaaggcatttcggtctttttgttaatagagagttaggtggctgcctagacatgtgacacctagcaattaaaatatttagcaaggttaattcatttaaccttagttttattttagaaaaaatataaggacattgaggaaaatatcagaagaaacccttgctccttctccctttctcttcgagcagcaccaaaccaagaagaaaccatctgatctttagctgtttttctggaaatgcagtagagattcaagggttcttgaagccaaggtaagccctagtaacaccctcctttagtttttgaattttatggttgattgagtatgtgattttgttaattggtggctgttaggtttagaaatgtttagggtttgaattttaaggatcatttgagttggctttagcttcttgtagcttatttggtggtgttgtgtttgttttatgcaagtttgagctttgagctcaaagctttgctctttaatggcacatttgtttatattgagtttttctgggaaatactggttggattatgttgtatatgcattgtataggtgttctggaaggtttggttacatttgg

SEQ ID NO: 109651 - DNA, 577 bp, Cannabis sativa
aaaaaataatttaactttttttttgtgatcgcgaacattgtagttatctaagaacacttgtaaattttcataaattctaaatagtttaccgtgctgaaaattaggtttaaatagttacttacaacacatataaaaaaatagttgtgtgtgttacaaaatacgtaaatcttatttttcagcattgtaaattatttaaaattttaaaaaaaaattttataaaagtttctaaataattataacgtacacgatcatgaaaaaaaattagttaaaaaactcttttgtatatcgaaatagataggaaatttactgaaccatctctttaagggatgaactgcaaacttacttaataatatatgtatttgaaaaatacattaataaaattactacaaggtactctactgttattaataatttgcaaatagtattgtctaatattgtagttatttaagattatctttaaattttttgaaaattttaaataatttataatactaaaataagattcaattcaaacaattacttatcacgtgtataataaaaaaattttaccttattatttcggtattataaattattt

SEQ ID NO: 109652 - DNA, 658 bp, Cannabis sativa
acatagaatgggaagtttttggccaatgtgtgtttctaacatccatatatcaaatacaagttagaaaagtcacccaaagctccataattattactatatatatatatatttaaaaaaaaacagaaaaaaagtttctaaccgtataaaaaatgtttgagaaaatagtaataattttttttgcacatattttatacttaattaatataaagtatacaaaattgtaaattgccctagaaataataacatatttttttttttttataaaaagtaactcattgatatcttcttggcataatgataaggaaccaatttttataataatattatttataaattttattaataactatgtagtaattttcttataagatatttttttaataatttatcaaaattactctataaagttgacttatttaaaatactacattgtaacttttagatctaaaataataaaacactttctactaactttaagaattggtggtattgtaaactttgtttaagacatttagttaccttttagatactaacacaaaaatatatgctttacacatattaaaatgatcatcttcaaaaattgatcatgctagtacttttttgagctaaaataattagtggtacaactagaattattttttgaaaaatctattctaaa

SEQ ID NO: 109653 - DNA, 555 bp, Cannabis sativa
  modified_base (132)..(158): a, c, t, g, unknown or other
  modified_base (269)..(269): a, c, t, g, unknown or other
  modified_base (385)..(394): a, c, t, g, unknown or other
aattcacatgtaattatcacttgatatttaaatactacaaaaatttttacttttagtcacagcaaaacttgtgactaaaagtgaaaaaattgtgactaattatagatcatgattcttatgttgtgactaaannnnnnnnnnnnnnnnnnnnnnnnnnnaaaaattacaatttgttgtgagtaaatgtatttttagtcacgatacttgttgtgactaaaattaaattagtgacaacttgtaactaaattctatgttttagtcacaagtancattttgttgtgactaaaagttatctttagtcacaaaaaatagggtgaaattcggtctgttatggtcggttttttacaattttatatccgaccggtcggttacagtttttattttnnnnnnnnnntaaccgaccgtttagaaattataaccatataaaaccgatcgtacgatttttggtagttttttgatttggcggttttggacgatttttggcggttttaggcacttttgggcagtttattggggtttttggcgattttggcgattttttggtttaaccatttt

SEQ ID NO: 109654 - DNA, 557 bp, Cannabis sativa
ttgaacaggtaacttttctgttactatcccctctcttcattctttgttggtgttgttatcttttctttcatctgttattatttttatttcatttccatttgagattagtgaaaaggggttattgtttattaagagtttgttcccagtcaagctttgtgacctgtagtttacgacaatgtttcgggatgtttgtgcattggcgcaaatgctgtatatgttacttttgttttcttttgattgtctctctcacacacactcatgcaggtattaagatatgtagcgtgtaagctaaattataagcactttattctctctctctctcacacacacacacagcatgcaagggtaagatcagttgtagacactgaaagcagattagagataagcttctgaatcacttagcaaactcaagagtcatgtttgaaactgtagtccactgttaatttgttttacatggctttgtacttaggcaaataaatttttcagataactatttgtcatttggacatgaatgactgatgtaaactttgtgttattcattcccccccccccccccc

SEQ ID NO: 109655 - DNA, 6027 bp, Cannabis sativa
gcatatcaaataccataaaaaaacctaaaaataaaaaaataccgtataaattagtcaaacttaaatgtgtcatatttatcataaaaacttttaaaatcctacactaagtataatttcctctaatacactaagtatttatctataactactaacaaaacacatagctattttcaccgcaaattactctaatatttacaactagagacccttgttcaggacagggattgtactgtagatgaatatcgcaaaaaattggggttcgaaacaccggtggaaggatctgaatttattttcaatttaaagctcatattctctctgtcaatcaggggggatttcataagaaacgatggcggaaaaaggaaaaccagatgaacaattgtttcagcttctctctggtctactccatcaggtaccataatcgctcttatttgtatgtataaaggattttcgggattgtgctgcataaatatgagctttttcttgttagtgatatgctggttcattcaagacttttgacattgatgtgagaattgcaaattcatgtacctgtgtaaaatcttaagagtgaatatttttgtccaagagttttctcatttccaattccaaagattattacaggagcaactattgaaaagaaaatatgctaaattgaataagaatgcaacagttccctagtttgtagattagattagatggtatgggaccaaatattattcacgtctagagcaaaaggaaattttatggatactttgtttttgttcaaatttgtatgctttctttttgttcaaatttgtatgccttgttttctcaaaatgtaagagaacgtgtatatatagatatataaaattgtcaatggtgtctggtttagtttgtactatgcataattcagttctgggcttctgtgtttggcatcacattgttgtcttgtcattgtcttcttctgttcctggaaatgctgtaaaatgtacccattattgttcttcagttgttttctatttttttacaaaactatagcctatatacttttttcactaagggatatgggcaacaagtacattttttgggatgactcaatgatatgtccattgaagaaatcgtccactgtttgagtactagcagcaatgcgtacgtgaaactggaaagtttttacatttttttaccccttctatctgctccgaaaatccttctcttttttttttccttctcagatggacagagtttctgtacttttctgagaaatcgttttttcttaccaaataaatgaaaatgtttgagtagtattatgtttgtagttgtctcaaacaattccagcccctctactattttcacacttgtagtgaaatctgaccttgaatcttgtactattttcgttaaaaaaaaaaaaaagatttgactgtttcattccatctgcaatttctttgaaattgaaatggtaatactccttcgcactttcccataagctaccttggctttgtgtcctaacaaattcttttatttattctaagaagagctatatattcatcataagaatagaaagtaagtatttgtattatgttgtaaacgcctattctcaaatacaatatgattgcttgctacagttgaagtggttatatttttagtctctctgcaaaacgtttttttttttaaattatttcgcatttcggcctacacaactggtcaaatttttaaagagaagttattatgcaaaaaactatcaaaactaggtcaaacagcaaaatgacttcaaaaaaataagccattttgccaattattttctttttatctatcttataatgaactcttctgttcaacagtatattgagatcctacttcctaataatggatgcggcggttgaagaattgatgattagtagtttggtttatgacaaattcaatattaaattggcctctcactatgaacaaagaaaaaaagacgcgtttaggagcatattgacgatactttgagaaaggcattttaaagtaatttgctctgtttttttcattcctttttccccgttagattatagaaatgggaatccagccaacactaaggaaattatatacgctcataaaaaaatgttacttctgtcctggctgcgtatatggggggttgtacaaccaattatgctctgcagattttgtaaatttcagcacaaaaaatttgtattaaatattaatctgatattggatgtttcatattcccaagttgtctttttatttgatcccaaatagaaattctcatcaacttgattttgttcaggtggaatcattgagcaaccaagaggaagttgaactgcgttccaaaatcgaagcacttggactagaggttaccaaagttccctcaaagtcaacacagcatcttgatgaggtaactattgtttcctgtcacagccatttttaatgtgaaaacctttttcaatttagcaatcatctttggcataacattttgtggcattaaactatcaattctgtaacagctggaaatagccaaggagttggacaaattgtcagccaagttagatgatgtagatgagatgatatcttcagcaataactacagatcctcaagtgcattccctcttgagcggcacagcagatgtatggatgccggtaatcacagcatctgctgatgagcgtcgtaatttcactgcatctattgaaattgacagctcagatgatgctcaattgaaaggttcttctgactaattgtagtcatcccctctgctccagggtttttcttttagattattctttttatgtatgtttgccttgtcttaatacaataaaacaatattttcttggtttgtttttactgaatgtgaatgattattcagtatataatatataaatgtcaagcattcgtttgtatgcgtgataacaaaaaatagttacaatgctggaaatagatcatcatgtttttttccttttgttgatagattttatttatacacatatcattaatagatcatcaagtactaattggttaaaaagacatgcataaatggagacaaagtaggcttattcagtatgagtattaacatgaaagtagtgcccgtgttctggcaccctactttggaaggaaattggcaataagactaattagccatattaaaattgatccaataacccaacatacactacaaaagaccactattccagcaacgatggtaaggaagggaggacctttggcggcattgctcgtcttttcacccgatctttcttcaatggaaccaccacctgaagggtttgagtttgatgcataggcaatcggtagcctttgcctcatttgacatcttaacgccccttcggctctgtgtacgagtcattatttagcacatcaaattttaaggacatatcaaactgaaattgcattactctctagagtgcttgatcatacaatatcagtaatgaaagatggaaacaatagcacgtaaccatatagaaggctattcacaaaaaggaaagacaaattacaaattgaatacaattgtttcaaccgacaatcatgttgcatcgcaattaaaggaagaattctttcaaaaacatataagaaataaaaaataaataaagaataaatagcattttcacacttgaactaacactttaagggttcgtttggtatgccgtattacaccatattgtataatattatattgaattttatttcatacaatatttttatgtaaaactatatgtggtatgggcacataaatatataatatgttactataaattaaagtttaatatagtattatataaaaatatgatatataatccaatttaatataatacagtacgatacctaatacaatgtaccaaacgagccctaaaatcacactctcaaaattttcacattgttaactattagcacaaccaaatcgaaccagcttgtccaaaagaactgacgtagtaagataacccccctaaagtatagtcactgtagggttgtgcgagcgctctgaattactataccattgtaaagttgtgccaccaaactaatatattattaaaaagaatattaacatttttcaacaattaaagaatacttacaatataatagtgtgtcttctatgagttacattgttttatagtagaagtgaaacaataattctttcatgtagaaagagacttggaaggtgcttatgaatttgagcaacaaaaacaaatttaagacatttccagaattgattatcaattttgttagtttacattttgttgtctaattatataaagttggtgcaatgtagaccaacaccaagctggaatgggttacaacaagctttcctaatgaacgaaagttcaaaggggattgcttataagtgaaagggcggaaaaaacagattaacaagagaaagaaccccagctatcccatctggatttcacatattttcactggtgatcgaagaatacaactcaagagtttaggactaacacaacgtaccaaaaaaaaattatcaaaaaacttttatgaccaagaaagatatagctaattaaagaatttccttcagacacaaacttaaattccgtattcaaaacattacaagttacaacagtagtttttaccatcctgaatatgtactatattttcttggttcttttatattgaatgagggtatcagcatgtatcctagctatccaatgccactaccatttaccttgtcactagtcaaacttcagagttagactcctgagttcagtgatacaattaccttctcaatagtcgacattcacggttaaacatcattgtatctgttgtgaagtggtctagccacttgttctgatttgacagatggcagactatgtttggttactactcaaccttcagttaagtctgttactcaaagcttgcctataaaattaaatagctatctgattagggtatcagaaaagtcttagacttttcttagaatgaatctttgtgtgagattctcttgggagtttcttgtgtaatcgagttgttaaaatatatgatatgagtgtaaaatattgtttccttaaatacaatttattatacgaagacgcttcatcatatccattagctttaaagcttaaaccctaaacacatcagctgtttccactatttatctctcacaaaatctcatccatataaacagtgttttctttctttcattatcttacttctctactcatgaaatcaacaacctaggaagggttgctctactcttcagggcttagatttagaccaaccctttatgtactagaagagcctgcatctttaccctccctccatatatacatacaataccatttcttcactctgaactttggtgatgtctattttcttttgtgtcattctgtataagttaaaagagatatttaccatttcacagtaactacactccccatttactccactacatccttcaatttatgtttcttactaatccagatattcataatttttttgacaaagaaaagaagttagatttaaatgaatgttttaggcaaccgaaattgaaaagatacgaagactactactgtattttgagtattaacaaaacccaataaatttgtagatatacctgaaagtgagactccgaaagtttggattaagtttaggaagagtctgagttgtttcagtggggcgatgaaacccaggaaatgctggggccgttggtcgaggtgtagaccgaacagcgcagccatgggctgcgactagaagaggaagggatgccattgctatttcaactacaagacctgtagccttacagacacacaactccgataaacattagatattatgtatgccatttgtttttttcccatctttaaactgaagtacttttgcttaagagtgttccataattgaaaaaaaatgctcacatagaaaataaaataaaataaataaaaactggttgtcaaggaaattgaccaatgacttctcatagaattactcattttttagtgtgaaaattcactttttttaaaaagaataaagtcacaccgaaataataaagcagcaattttgtaaggaaaatttgattttctatacttacatatacctaat

SEQ ID NO: 109656 - DNA, 829 bp, Cannabis sativa
  modified_base (360)..(381): a, c, t, g, unknown or other
  modified_base (427)..(447): a, c, t, g, unknown or other
  modified_base (494)..(508): a, c, t, g, unknown or other
  modified_base (612)..(612): a, c, t, g, unknown or other
ttactctaatcactctagggtttcagttttgaagagagaaagagagagaggatttcgaaataggtagagagaaggtcctttgagaccatcactacctatttatagaataaaatgttagatttatttagcattaaaataaagaaaaaataaaatggtaaattgctccccaagtgcccggccatggatagtgggccccactttgcaattttgccatttttccaattattcatcttattttctcaaaaatggcattttttttccaatttaaccacttaaatgccaaatttaattataaaattaattattaaataaaattatcatttaatatatttattagttagacttaataaagtctcttannnnnnnnnnnnnnnnnnnnnnctatttttttcacaattaagccctagctttgtgaaaattcataaannnnnnnnnnnnnnnnnnnnnaattataattaattaattaaaatcaattaactgagtctttcaagcannnnnnnnnnnnnnngtatggggaccacgggcctatatatccaagcttttaataaggagatatggaatttaccaagtaaatccactaacttatgaattcctcattgcatccaccatagnacttggaattgcactatcagttatatagaatgctctatttgtttcacgatatagatgcgctattagttatccattgttataatcccaataaacaatgatcctctatagatgatttacattgcatgtggattaatttaatgttacacccttcaatgtatgagcactcaaccgtttatctctgtttagccaagctcgaaggaaatcatcatttaacttc

SEQ ID NO: 109657 - DNA, 537 bp, Cannabis sativa
gtgtgcaactttgttcatacctatatagaactattttaggaattcaattataatcaaatgtcttatgtctaatttctcttgggagtctcttttagagcaccgttttcatcacggttatcatttttaaatcatcaatacgttataatattaaggtatctccacgagtacctctagatttaacaacttcaggacaaattaaatgaacatttattaataatttttatattgttcatttacgcttcaggcgttttcaactcattctaactcaactttaaataatattgatttgcagttggtatatattattttgaactatatcgttcttatatactttgtgcaaggatcatttttaaaaaatcatcatcgatcccaactgcttctctccccctgattgagagaatttttaaaaattgtgatatctaataatattaatacacctgtagggatttcaatatatcataataaatcaatattggtttaaactcatatatactatatgacgttaaacttcaaattctataaacttcaggtttaagt

SEQ ID NO: 109658 - DNA, 1127 bp, Cannabis sativa
tctactcgaactgtttgtttcctcacatgatattgaagaatgggacacacttatctgtttattttgaaacaaatctgctgagtgcggcgatccgaccagtcaaacttggtgacatcatatccaggagggcttgaatcttctctggattggcttcaattcctcaggcattgacgatgaagcccagaaactttctcgagctgactcgaaaggaacactttgagggatttagtttcatattgtactttatgaggaccttgaagcattcctccaggtcgtctatgtgccccccagccttcctggatttgacgagcatgtcatccacatatacttccatatttcgcccaatttagtctttaaacattttgtttaccaatctttggtacgttgctccagcgttttttagaccgaatagcattactctgtagcaatatagacccatatctgttcgaaagcttgtatgttcttagtctggtggatgcattttgatttgattgtagcctgaataagtatccatgaagcttaatatttcatgccctgtcgttgcatccacgagctgatcgatcctcagaagtggaaaacagtctttggggcatgctttgttgaggtctgtgaaatcaatacagactcgccatttcttattcggcttgggcactaataggggatttgcgacccaagctgggtagaaagcttcaattataaaattgttgttgcgtagtttttctacttcttctttcagggctaatgctcgctctttgtctagtagccttcgcttttgttgtactagctagaaattgcgatctatattcagaatgtgcaaagtgataaaaggatcaatttcgaccatacccgcatgtgaccaggcaaaaacgtctaggtttgctctaagaaattttatcaattttgattttacttcgagcaacaaaccctttccgatcttcaactttctggtcgggatatccgtatcgatctcgatctcttctaattcttccataggtgcaacattgctgcttgggtccccaagtttaggatccatatcttcatcccgccttgggaagttccctacttggaaatgttttttcctttgtctgtgctctggctggaggatacttccttcttagccttggtta

SEQ ID NO: 109659 - DNA, 1875 bp, Cannabis sativa
cattaggataagaatctttttttttttgaaagaacacactcttcattaagtaagaaaagtgatgggaatcacaaggggattaccctccccttgatacaaaacagccatctcgctagaaattctagcttttttggctaaaccatccgccaaagaatttagagtacgactaataaaatagaacttacaagctaggaaaagcttagaaacattaattatagagtaaaaaatattagaaagcttccaatcagggcaggagcctgaggaagttaaagcatgaaccgccaccttttaatccgaaaggataatcgcttctctccaaccttgatcaattgcccaagacatggccaggaatatagctctaaattcaccttcaagagctgactgcgcctgcaatctttgtgacttaacaaaccagtttcctgcagcaatgtcaacagaaatagctgcaataccagtttctcctcctacccaagaagcatccgtaaaaagtatatggcgagccagagaattggttgagagaaaggcctcttctccaacaaccgaaccactattgggttgcgtttctatgatttggtctcccctactgaagtgagacgctttctgcaactccaggaactccttttcaacccttgccaaagccaccaaaggattgacaggaacattgttaatgaagagttcattccgctgatgccaaattgcagagaggacacaacctaagtaattaatgacctcgactctattcccaccataagataaatttgagaaatgaagcaccagattttccaacacaccagataaagagtcaccaaggatatccccaatcctaatgggtttactacctccaaaccatatggagttagcaaaactacacctacaaaacagatgcagtggattcttgatgccagcatcacacaaatcacactctttatctggaagaaagtgtaatcttctcttggttgggatatcatcatttataattctccaaagaaaaacagagttcctagggtgaataccagttctccatatccactttcaaagttctttaactggatcgaatctccaagattgatccacaatgtaagctgccttcacagagaaatgaacatcttgagattgtttccaaaaaatctagtcttggaatggagcaggaatccttggtatagcaagaatacggcttcccaactctataccaaaaatttgtagaatcagttccggattccagtcgttgtctgaagaaatatctgctaaagttttgattgtgtatcctctattcctcatgtcatgcattagagtcataaactcttgtgtttccatccaagggatccaaggttgttgccaaaaattgattgaaaccccagaagcagctacagaaattgagcccttaataattgtagatcgtgtatccaaaatgcatttccaaaggtaggagttactactcttactctttacctcacagaaagattcgtatttgtagtatttttttagcaagcaagtgacccgcggtttatcttcttttgttgccaaactccaagccaacttagttaacaaagctttattcatgtcttcacatcttcttaagcccaaacctccagatgcttttggttggcaaatcttatcccaagcctttagggcgagataccgatccttatccacccttccagatcaccagaacttcctcatcaatgcatcaagctctcggcagctagctaaaggaactttggatgtggacatagcataaattggcatagccgaagtcactgacttgatcaaggttaaccggccagcataagagataagttgttgggttttgtgccctaaataaaacccttttacaatttgattacttatcaatataagaaatttgaagtgatttat

SEQ ID NO: 109660 - DNA, 540 bp, Cannabis sativa
  modified_base (163)..(163): a, c, t, g, unknown or other
  modified_base (209)..(229): a, c, t, g, unknown or other
actttgccaatgtcctagaaagaacataacacttttcaaatgtgtaagtatactttattgctgactatcacatcagtgtaaatccagtgcagtgctgaatcaatggaaattatcttttgaagcatataatcacaattaacttccactgtgttgacatcactgnaattgtgaataactatatgttggacttaacagattttgtacacatnnnnnnnnnnnnnnnnnnnnnacatgtaaacataaatgatttctaatcttctattgataaaaaattagattacattgaaatggattttattttgggcataaaatcccaacataaggatagttaacgccggaaccatgtaaaatctctaatttgttattttgctatatactccattattactttcttaagctctaaaaatatttagttgctgaaaaacttggtaaacatttttatgctttcattgagagctgaggaaagaaacatgcacggtggtcgccggtgcaagccagaaaaaggaagagtttgtgcgaagaaagaagaaggaaggccac

SEQ ID NO: 109661 - DNA, 606 bp, Cannabis sativa
tttcaacgtgaaccatttaggtctgatatgtccttttctaccacaaaaatgacaagtaggaacaaatctttttacctgtgatcttactcttttcgtacattctagagattttacggtagtagaaacagcttctgctacaacaggttgtgagactgttgcagcacacttcacatttgaagcctcaggaagattcgttggaacaatagattttacaaactttgtgattccagaactttccataccattcgatccaatgccaacaaaacctctttgacccgcattctgagctttttcaaaaatagaagatccaggattaagcatttgaacatttttctaaaaattttcaagttccttctttaagagagtgaatttttcatctttagcacaaaaatctatctcatactcttttatttttagttcacacatttcaatttgaagacaattttttattcaatttattcaactctctattctcagaagtaaccagaatccatttttcatacatgactttgtatgattcagcaagagactcttcacagatctcagactcatctgaatctgattcctcttgtttagtggtattattcaaacataccaatctagctt

SEQ ID NO: 109662 - DNA, 1214 bp, Cannabis sativa
ataccccaattttatagctttgttcacacacaatttgccacaaatataaaagcaattcgttgtgataatgctaaagaattgaacatgtcatccttttatgctcaaaaaggtatccaaacaaataattcatgtgtggaaacacctcaacaaaattcagtagttgagagaaagcaccaacacatactaaatgttgcaagagctctcgcttttcaatcttcccttgcactttcttattggccatattttataaaaactgctgtgtatctgataaacagaacacctacaccccacttacatcacaaaacacctcatgagttgctctataaaacaccccctgcttatgaccatctccgaacatttggatgcttggcctatgcatcatccttaccaagtaagagacataaattctctcctagagctcatgcttccattttcattggttatcccaatggaatgaaagcttacactcttcttgatatagccactaacaccattttccattctagagatgtgattttctatgaaaatgttttccctctcaagggatcggcaactcacgatctggacacatttttctctcaacataatgtcacaccagcagtctctaaatcacagcagtgtcttgatcctcttgatgcaacaacaccatccaaaaggataccagttgtgtctcaatccatgccatgccctgatgctcctgctgccaatataaaaccagcagtatccaaggcctctcaggcacaaaatggtctcattcctccagatattgagcctggaatatcacaccagcaacattccaaatctgttgagcttacagaaccatctaaccccattcaaatccctgctgccactacaactaaaaaaggcagacacatacataaaccaggtcatctcaaggactatgtgtgtcaacactccactgcacaccccccttgaccaatacttatcctacactagacttcacaaaaattttcgaaatgctatccttcaagcatacatcgaacttgaaccaacttcatatagtcaggccaagcaatactctcaatggctcaaagctatggacaatgagttctttgccctcaagaaaaacaatacatggacaattgtatctcttcctcctggatgccatgtaattggaaacaaatgggtatacaaaataaaatataactccaaaggtgaagttgaaagacataaagcgcgcttagttgcaaaag

SEQ ID NO: 109663 - DNA, 789 bp, Cannabis sativa
  modified_base (488)..(499): a, c, t, g, unknown or other
tcaaattgagtgtctagccattccttgatgtcagtcattttcttgacattgttgcgaatgatcaaaatgtcgtcaacataaaggaccaggattactacaacttgttcttccttgagttgataaacatgtaacaccctaactagcataggcgtgttagcgtgatttttaacgtatggtgcagctcgttgctaatcaacgaggttattggaaaaacgtgaataattaaaaattttctttttaattaaaacataacatattatacttataaaattttgggatctcctttacaaaatacaattacgaaagtttaatattcatttacaaaagattagtcgcccagcgacttaacaacagaagccctgatgtccagaggatcgtacgctccagacctaaccgcctcgacatgtacaatcttcacctactcgctctcacggctcctcagctttagccttgcccttacctaaacatagcaatagcactgtgagtcnnnnnnnnnnnnaagaaaagcataacataaacatactaaaatctcaggttatcttcaggggcccatacacctaaccataaccctaactgaatcaggatcgatcttgacaaagtatgactaaccgcgaatacagcctatactcagtactctaaccgcactaatgtggtaacggttaatccatactatctgacagcctaggatatatttgatagcatctcggtgcagctctatgtacacctcactgttgccctgatatgctaatctgacggctatataaaatttgcctaacatatgtctaatat

SEQ ID NO: 109664 - DNA, 527 bp, Cannabis sativa
gaatattattatttatacgcaatcgtaatcaaaccattacgcattattcataagatgaaatctaaattactactgacatctgccatgaataaggatcaatatacaaatatcttgtagtacaaaatcattataccaataataggaatcatattcatttaataatataaattatatatatgttaccttataaggtaaccatcttcattacatcacattgtctaatctggcaagtcaatgctttaatctgataatcttgtattgcattgcctaattaggcaagcccgtgccatagcctggcacccacatatcacataattgcatcacctaatcaggtgagcctgtgccaaaaacctgcacccatatagcatataattgtatcaccgaaccaggtaagcctgtgccataacttggcactaatatatcgcacagtgtaatcagacgcccccgtatctacactcggtacataattgcatcacctaatcaggtgagcccgtgccacaatctggcaccaatatatcgcatcgtct

SEQ ID NO: 109665 - DNA, 663 bp, Cannabis sativa
gttttggatattttaaagactaatcatgcatttagagtcatttggagggatgttagcatattttggtagaaaattgtggaagtaagcgagctcagttttataaatggagcttaattgtaaattttgacgaccttagaaggagaaatggacttgaagtttgacatgaaagttttagatctcgttcttatctttctggaacatcttgaatcgtctgattccgagttgtattgaagaagtgatggccaaaatactaatcagtagcctcctacttatctttttttttttaaaaaaaaaaaatcttaattttaaggggattcatatatcttttcaagcactataaatataaccttttaggatgcaaaatttaaaaccctagagctaccaaattgagagagaaacttagagagagagcaaggaagagatgtagatcgcagcttcgaagtattcttcattctagttcttttcttctccttaaactcttactaattattatgattgtcgttataatgcctagttctgagtagtttccttttagttaagggttatgtcaaaacccgagatgttaattcttaatttccttattgaatgttaatttctagtttctattatatatcaaattgtttcttttcttctatgttcaatgtcatgattattgttttaatc

SEQ ID NO: 109666 - DNA, 624 bp, Cannabis sativa
  modified_base (292)..(292): a, c, t, g, unknown or other
  modified_base (348)..(349): a, c, t, g, unknown or other
  modified_base (420)..(423): a, c, t, g, unknown or other
aaaaaaattgtatataccatataaataaaattatatatcaactttatatataataaaataaaaactaaacatgaatgatgtaatgaccgctttagtaatttggattagtaaaggcaattagcactaattttggacattttgatgattatttatgaaattaattatttgtggatcccaatattagaatgagtattagagttataatttctcaattccgtagattttattaaattctaggggtattatttgtcctatatgtgaattatccaatttttgtaatttttgctcggcnacaacggaaaatgcgatggatggttagtttcatcacatgggtaagtttagaacctnntttcttagtggaaaatattttagagaaaataaaatattgggattaagtggggttatggaatttgaccattnnnnccctagctttagaaataccctaattttaagtcaaatggcaatttagtcaatttttcaagtggaggttgaggtggctgcctagcttagtgacaccttgttaaactaatttcagaaagagattgattaatctcttttcatttgaagcaattaaggaaattaaaaagaaaacctaaaattgaaggaaacctctcttcccttcct

SEQ ID NO: 109667 - DNA, 1857 bp, Cannabis sativa
  modified_base (27)..(29): a, c, t, g, unknown or other
actaatcagattgtaaagagttttatnnngggcataaaacctaacaattcattggatcacatccaacaaatttggacccaaccgatccaatctaattatttattggatattgaattttgtcatccgatccaatccaatcgaattgaggcatccgatccaatccgatcaaatagatgtattggattggatcgtttccaaccattagatgcattgactgatttgcagacttatttttctacactttttataatctccacatttctctaagctactaataagagatataaaatagatctcttcaaaaaataaataaaaaataaagaaatttcaaagatagatataaattattttggggttttttcatttttacactttaaaatagtttttttttttttttgcatttttacggaattaggcatatagaaatccctattgcaactagcgctgcaacataaattacaacaaaaaagcgtacagaaacctctattgcaactagcgctgcaaccattttagaaacccaaatcgtaaatttgaaaaaaaaaattaaaaaaataacatatggggtaattccccaattatttgggattttatttgtaacagatatataaactaagttttgaaataatatcctaacaactaaaggagggaatttttaaatatgtatatttcatttacattgaaaattgtatatattacacatccaaccaatgatatgatattcatgaatgtgtcacaagtccatgatcttcatttataccttccaccacgaaaataaaatagtcttattatatctagctattttcaatgaaatctaccagtacaagaacaaaaaatctaacaaacaatgaaaggaaaaaatgagaaagcaaaaaatcaaaaaacattctacaattgatctcgaacaatcaatgtagtgtcctagcctgttgcagttgatcccttagcagaccaaaagaaaaacaaatgcctctccaatcaacgttgagaatgtcacatttttataaaataaggtgtgctcatttcaacttcaaaagataaatataaagcacctaatataaacaattcattttttatgtataacataaacataaacataaacattcaggtaactatagaagttccagaattataacttagatattattactgcaagaaattaaacttaagtatttattgtaactgaaaattaaacctaaatatttataccgtaaattactcaaaacttaaaaatatgatatgtataattctcagtttaattctcaattgtaaaaatataacataaattacaaaattttaaaaaatctttaaaaaaaaaaaaaaaaaacttaaaattccataaaaaatataaatttttgattgttttttgggtatttctacaataatcatataaaaagaaaattttcagttgcaataaatacttaagtttaattttttgtggtaataatacataagttataattttgaaacttctgtacttacttgactgttaagtgttaagtaaattgtcatatggtaatccttaattggttcatgtcatggatttttttaaaaaaaaataattttaatataccaataaaaaaatgacacgtggataatgacttcacatttaacacttacagaatttcagaaatataacttatgtattatcaccgcaaaaaattaaacttaaatatttacttacaactgataattaaacttaagtatttatgccgtaaattattcataaaaaaaattattaagcataatagatatgggaaatttgaatttccatgcttaaataacccatatattattcccctaaactaaaactatatataattaattttatatgacactttttgtatttttcccataata

SEQ ID NO: 109668 - DNA, 1280 bp, Cannabis sativa
aagccacaatttaaatttcaatccatttcaaaaataaacaacaacagttcaatcaatattttggctcaattatcaacgcatgaaacttaaacaaaagcataaacttaaaaatttaaatcccccccccaaactaaagatgcacattgtccccaatgtgagataatattctaggtgagagagacttacctgaaccctcatcagaaggggtttggtggaggcggctggtcataaggataaaaacggggtggatttactaagtaatcaggctcctcaagaccaacattaatccttgttatcagtgaattcagctgctgcacttgattctcgtcaaagatactcctctgcgccatataagtttgtatgtgaatgttctgctgaataagataattcaactgatcatgtgtgtactgcatggctgggtcaagagggccagcaacacgttgtggtccttcttcaagatgctcctcttcgcgtttaggaggatttgcggctccttgctgtggtggagctggtggttgaccatgtggatgtggtgctttaaatctaaacaccgttcccatgtcaatcatgcgatgtggaacaaccttattatcataggagtattgtggcaccccatatgcctcacacaaatcagtgataatatcagcgagaccaagcccacccccacaggctccttcgaccatcaaggtaaagctatgcctaataatatgccccacattgataataaatcccttcataatggcatagacatatcttagcctatccatctgagcatcaaaaaagtgcttgttgggtatcaacctagcactcacaaaatacaaccacgctttagccaccgggttcaactcacaacggtacaactgataaggttcctgattatactcatgaaaccttaatcctaggaaacccaaagtctcagccatatcaacataatctagcttcccttcttcatcaagcatttttgggcgtatctcttcacgggtaaaagtttgcaagtcatagatggcagctctagtggaggccggaacatcaacacccctaactttcacttagtcattcttcctttcgggccagttagcaaaaaattctagggctaaggtttggttcactctctcactaacatccaaaaatttcacccatccccggtttatcacttgttctcttattggctcaaatataggatgaatgccgattcttggatttctaaggtcgccaatgtcaatacccctattgtcaatgaatggcctattcttcaattctagatagcgctcttgtgcttc

SEQ ID NO: 109669 - DNA, 520 bp, Cannabis sativa
tttctatgctaatggctagggatctattacatagtggatgtgtaggatttttagcagtggtgatagactccagcagacccaaaacatttgggcctgaggtagtcagagtagttaaagactttctcgacaggtttcccgaggagtttgcaggattaccgctgcagcgagaaattgattttgtgattgatttggcacctagagtcgaacctgcttctaaagctccatatagaatggctccaacagaactcaaggagcttaagcaacagcttcaggggatgcttgatattgggtttacccgacctagtgtatcgccctggggagctccggttctgtttatgaaaaagaaagatggttcccccagaatttgtattgactatctggaactaaaaaaggttacaattaagaacaagtacccattactcagaatcgatgatttgtttgattagcttcaaggaaagactgtattttcgaagatcgacctacgatccggttatcatcaacttagaatccgggaagaaga

SEQ ID NO: 109670 - DNA, 540 bp, Cannabis sativa
gcagtcaaagatcctgactgttttgtttagtaatattttcttgcattttcccaggaaccaaacacacttattcaaacatcataaacccagaaaaaattcaaaaagccacatatatatacaatcacacacacacacacacacacatacatatacagtcactcacactacaaaaatcataaaagtactgtcaaaaaagaaaataaaaaaatcaaacaaccatatacatatattcttacctttcgaatctctgtttggagaggacaatcagaaggggttcgagtggccgatttcgaaggggacgagaggccgattttggagaagacgaccgagaggatcgaggttagttttcggagaacattggccggattcgaaggggacaatcggaagggacgagggtggtttcgccagagcattcgaagagggggttttggatgtgtatgaacagtggtggtgtgtgtttgtgttttaggaaatttattaaatttatatttgtttatattcctcacaaattttgcgtcggttttaaaccctcgaaaaaaa

SEQ ID NO: 109671 - DNA, 629 bp, Cannabis sativa
  modified_base (46)..(56): a, c, t, g, unknown or other
  modified_base (198)..(199): a, c, t, g, unknown or other
  modified_base (566)..(566): a, c, t, g, unknown or other
ttaatactcaaaaaaatatatatcatgctaacaaaattatatgtannnnnnnnnnnatatgaatacataccaaaaaatttatatataataaaatagaaactaaatatcgtattaaataaataatacattataaacaacaaaaatcatataccatacaataaaacgtatatacttacaataaaaaataaaacaaaatannataatattattaaaaaaaattataaatatcatattaacaaaattataaatcacctttatgtatactaaaataaaaactaaacatgcactatctaaaataaaatgatatactatacaataaaacttatataccatataacataaaatatataccttacaatagaaatatatataataataacaacaaataaaaataaaaatatgtaggatgttaattaaattatatataatgtcaacaaaagtataataaaaaataaaacttaaatattatttaaaaaaattatatatcgtatgacaaaaatacatatatacaaaaaataataataataaaaatatagattactaatatatatatatatgggtatgcncttaatgggtattacccatatatgggtattttattcttaaccatcggatcaaatatctaatgg

SEQ ID NO: 109672 - DNA, 1238 bp, Cannabis sativa
ttttttttttttttaaaaaagaagccaaaaaaaaaaaaaaaaaggaaaaagttaaattctatttaaaaaaaaaagagtaaattttaatattccactatcaacaggttttatataaaatatcatcacattttatatttattataggaccaccaacgtcattttaaatgattattattattattattattattattattaaaatcttaatgacatttgaatattcctaaatcaattcaaattaatggcagggtggtttcctactcctataagagatagattagttaagtaattaaatttgtagctatatatagaaaaaggtctgtttaagctgagacccaaaaagcaattgagagaacgtgaacaaaataataatcaattaattaattaatgatgttttttttcagtaaaaaaatggtgaaggaaagtacactgagagaaagtctacttgaaaagggtgagtggggccaatggagtagtcttcatggtgatcagttgcctcctcgtccatcgcctcatcatcactattgtgacgattgtcaacaatatcataaaaagatttatccaggttatggttatatctccttctctgatgatgatgacgacgacgacgaagatgtaactactgttcaatttcaatcagcaataaacaatagcataaatcatgtcaactaccagagaaatggcaatgaagatgcaggttgcgcttgcttcgagttcctaaaaactaattatgttatctggaagatacgtaatttcgtacttggtttattttttcataagttataaagtttctaatatagctaccttaatatagggtttgattttgatttgggcaagtggatgaatatatattattactattattattaataattaattgttgtatcggattttcttcaattgtcaaaatttttggacactttttttttattttgtaactaaccctaataaatattaatttaaattttttagtattattatttattttttcttgaaagaagtgttctatattaaatcgagcaatcgctcacaagaatagacatgagatctgaaggaacactattaatagaaaacatactttcagctaaagaaatagaatgtcggacaacaaaatacgcagcacgaaggcttaacaaattttttagtattataataaatagttatttaaaaatataatattatttaatatataataaaattataaatatattattttatttcatattattattaataat

SEQ ID NO: 109673 - DNA, 504 bp, Cannabis sativa
  modified_base (43)..(56): a, c, t, g, unknown or other
tcaaatatttaagtatcataaataaaatcaacttaaatattannnnnnnnnnnnnntaaatataactagaaaaatacttcaagcaaacagaaaataactatctttatttttactaactaattactttattttctaattaaaatatgatattttttagtctatttattttactcaatcattaatgaaaaatttatttgatttaagtttatctaaaattaattttcaactttaatctatttttttttttaaaaaaagttcaaaattatctccatttaaataatgcaattttgaaattttgggaaaaaatgattaataaaatattataaaatatattttgaaaattattttaatttaaattgttctgaaattaaaatttccaacttaaatataattttctatctgattaaatattctaaaaattaaataatatttaagtgtctagaataaaatcaacttaaatttttaatttttaatttaattaaatgtattaaataaaagaatcaa

SEQ ID NO: 109674 - DNA, 1096 bp, Cannabis sativa
  modified_base (418)..(427): a, c, t, g, unknown or other
atatatatattcctattataaataccattagtcttatttaattaacaaacctatacgtataaaacaatatactaattttatctatattcctatctatataaatatataaaggaatgttttaaggagtttaggtggcactctatttgaagtttcttccatattctttattttctaaatttttgtcaattatttaattttttaattatttttcagttagaaatttattatatgctattattaatagagtaacttacatacatattaatttattattaatggagtaacttaagactacacaataattatatgcaactaatttacattatattggtattctttaatacaaaatatttaatctattttaaattatgtccattaaaattccatattcaattctaattctaataataataataannnnnnnnnnaataataataataatattatgttatatatctatatatctaaataaaggaaagcacaaacacggtgatgtggcagtctccatgaacatcttcactatttctaagcattctaatttttctttttttttttaataaaaaaaaatattttttatgtattatatttatcatcatttattgctaatttattatttttttttgaataattgctaatttattatttaaaaatgaaactcctaatatttttttcttttcatctttccgcctgttggtctttccctctcataacaacatggtatttattcaatcataagaatgtcttcaataagacccctatttttttattattttctacaactatctctctcaattaaactctcattcgtcttctttatatagataaatatatcaataagggaatatgcaaccaaaaattgaagaacgatatggagaaatactattattctctcgcttggaaagttgaagttatagagaggaatttctattgtcctctatggccctcaaaattgaatcaacaggtgtcattcatttttaaggtgctgtctttttgttttctctattttaagtcatttattcctttttcaattttgtaattttgacagaaggtttttctgtttttttttttacccttagtttctatgatgattttcttg

SEQ ID NO: 109675 - DNA, 673 bp, Cannabis sativa
  modified_base (93)..(94): a, c, t, g, unknown or other
gagcctcacaaaatgtgataatctcacaaaaaaaaaaaaatgaaagcagaaaaggaagagatatgaagacaagggattttttacgtggttttnnagttaaaattctgcatagtcaacgagtcaatcttattagatttctgatagttttctcagggcctttcttgtatgatttttccgtcccttttttgatcttacttgccactatttataatcacatagttggcagttaattacaaggttgactgtaatctttttacaacgattatcccctgaaatcatagggtttgattacatatcacgtagtgtaaatgcggttattattggaaaatcatatagctgtgactttctcgcttttactgggtcaaaatgatcgtgtgttttaacacgtctttaattgttacgtccgagtatctctcgacaggagcttagttccagtgaccataatagcgacttggagcctttttccttatccttccgaggtcgacaatgtacgccttgttgcttatttgtttaaaagcttatcgatttaatcgaagttctcattaacaaagagtttctcaaaagctcatttgaatgttagcttttaactcgttaggattgtaaatctcactgagaagatgtttgaagttaactgggggaagttacaggaatgtgccttcccatagcgagattg

SEQ ID NO: 109676 - DNA, 1943 bp, Cannabis sativa
atgtcgaactgagatttctttcctcattatttgttcacggacaaagtgtaagtcaatctctatatgtttgcatatggcatgaaaaataggactggttgcaagagcagttgcaccttgattatcaacccaaataattggaacatcttaaggtgtaatatgcaactcagaaagtagagaaagaagccatttgatctctgctgcagcattggccagagccctaaactcaaaatctgtggatgatcaagcaaccacctactgctttttagcagaccaagagattaaatttggtccaaaaaagactgcataaccaccagtagagcgcctgtcatcaagtgaacttgcccaattagcatcgaagtaaacttgcaaagagagtctagaggctagtttgagtaataatccctcatttattgtcccttttaagtatctgagtaaacgcttacatgcttcccaatgcacactagttggagcaagaataaattgtgatagtttgttgataatgaaggccacatcaggcttggtaagagtcaaatattgtaaagcaagtaaggcacttctgtataaggtttgatcctcaaaagatatcccttcatatagagaaagtttatgtgcactgctagtgcgattcgaacaaagtttggcttcttcaagatgaaccttgacaagcaaatttgatatatatttgctttgagacaaatatattccttctttggtcatgtgaacttcaacaccaaggaaataataaatagcaccaagatcttttagttcaaagcagtggttaagatcagatattaatttggtaatgagagtagtattaggtccagtaatgggtatatcatccacatatactaaaaagattatcaagctttgtcctgagccatagacaaacagagacgaatctgctcttgatgcagtgaatccccaattaattagagtagtctttagtttgtcattccaagcccgaggggcttgtttaaggccatagatggctttgtgtaaatgaaaaatatgatctagtttatttgggtcttcaaagcctcttggttgtagcatatagactgtctcttccagtacaccattgagaaaagcattagagacatctaattgcttggcttcccattgaaatgaaatagcaagagttagcaccattctaacagggctgaaagtttcagcataatctatctctggtgctttttgataacccttggcaactagtcgagatttgaacatgtccacactgccatttgagttcaatttgattcgatgaacccatttattatctacgagatgcatatgaggttgataaggtacaagtgtccatgtacgatttttcttaagagcagtaacttccttatgcatagctgcattctaagcaggatcataaagagcagatttaagagacttaggttctcgagggagaagagattcgagaaatttatgctttgttgccatgtatgccttgggtttataaatgccatgttaagatcttgttgtcatggcatgtgtcctttgaggtgcagcagttgaaggaggcatactttgtataggttcaggtgaggcagtgtgatgagatacagaggaagcactgctaggataagatggaacagatgatgaaccagtggaaatactagcagcatttgagggtgacagggtctggtgtaatggtgtagtgtgtccactggaggaattatctgaggtcaagggagcagtagatgattgaacagaatcattgtgctcaatgacagcaacagatggaatattagtgtgaggtaaatactgttcagattgagtaaaaatttaagcaataggaaaagagagaagcattggaatttacctgtgttgtgttgttggtgtgaaatgcaggaaaatgagattcattgaacaccacatttcgagccacaaagatcctaccatctttattttcacacaaatagcctttatgt

SEQ ID NO: 109677 - DNA, 614 bp, Cannabis sativa
attttacactcaaggtggtgagtttacagtatcgtattttactgtgtctaagctcatctttttttatctctggttatcattgtgtgtctttcataccgatttcatgccattaaaagaaggcaagcttgcatttacaactaaattagggtaacagaatctgttctccaactgtaatatctcgatatacctaatggtaaataattagggtttttaattatattatgggttaattagaaaataagtgggatcatggtcctactaatttagttcaatataaattttaaatttgctataagtggattaataaacgtaatttataaattacggagatttgtatggtatatgtgaatgtaatatgagttattggtgtaataaaaatattttcaggtttgacaaccttggagactcgatcaggagccaaaaatgtcataacgggtttaattgatcgaattattggaaatattgtgataaattgataatataggtattagagtaattaaaagtatggaatttggcttagtgtcctcaaagtatgcaatcaaatcctacgattttagggatgattgttgtaaacatattccgttcaactttgtaattaagtgtccactatgtaa

SEQ ID NO: 109678 - DNA, 671 bp, Cannabis sativa
tacaaggtatatatatatatatatctctgttctgatgctctggggtcacaattgtgatgctggggggatgtggggcttggggttttggtccaatgctggtggtcatggtgggttcatgaaattagaaactaagaattgaagatatacaaattaacgttttatcgaagaattggagcttgctcttcttcttcttcactggactattgtttcgattttaaaattcttcttcactgtttcattttattttttaattaatttgttcaattatggatatgtgaagattatatattcttggtagagagaaaattggaaatggaaggtgtgatataatttatctcttaattatgttatttttttttttctaattgattagtttgtaattttaatttggtctgagattgtgtaaatactgtgtttaaattaagtaaatgagcattgtgttcaaaattgataatgtaggaagacaaccgaggatttttaaattgttctgtgaattgttgctgggtttattgattatgtttgaaaaaggaatccatggtatttggtacttaatcactctagaaatgaaataagcaattgtatcaataccttgtccataacttgtgtctaaaagattttcctttacatcaattatcctcaagatactgatcagagaattgatgacaaagatg

SEQ ID NO: 109679 - DNA, 790 bp, Cannabis sativa
  modified_base (60)..(64): a, c, t, g, unknown or other
tgtccacaaaagcgcacaacacattgtgaacatcgagttggtcgaactatctctcgttgnnnnnccattattccacaactcctttaattcgtccaccaacaatcttaaaaatacatccatgtctttacctggagattttgcaccaggaataaggagggatagcaaaaaataattgtctttcatacataaccaaggtggttgattataattagccaaaaccactggacacatactgtatgcaagagtcatgttgccaaatggattaaatccatcagcagctaaccccagtcgaacatttcttgggtcgcttgcaaactcaggatgctttgcatcaaagtctttccaagcacgaccatcgaccgggtatcgcatcaccccatcatcttttgatttaccagtataacgccatatcatgctcttcactgtaatcctcaaactatataatcttttgagtcgaggtgtcagcagaaagtatcgcatgactttgtaaggaacttttttttctttaccgttctcagaagtaacccaacgactaattctgcaaattggacaagcctccttagatgcattctccttataaaataagcaacaattatacgaatagacatggatatagtcataatccaagcctaatttcttcaatctctttttcgcctcgtagtacgttgctggaatattattttctttcagaaatgaaaattttaacaacttcaacaattcatcaaagatgttgttagggatttttcctctaacttttaaatgcaatagctttgctaaaaatttgagagac

SEQ ID NO: 109680 - DNA, 526 bp, Cannabis sativa
acttaaaaatatggaaatatttttccatacaactaacttaaattgtaaaaaagccataagttaagtaaatctctaatttttccatatctatgaaatttaaggaaaaaatgctatattctacgtaatttcctgttttaaaaaaatatgggaaaaattatacgaaacttacaaaatactggaatttgagttaatttttacaaaaaatactgtcacacggaattttttttcaaaaatactatatttttataaaacagtataacacaaaatagaacaactaaaaataatagtggaacaactaaaaaataaacgtagaacaacagtgaaaacttaacacaagtacacagtataaaacttacacagtatttttttaaaaaaaaattccaccctacagtataaaagtaaaaaagttgaaaatttcaataggtggtgtaattattcaaaaattattaacgttatgataaatatgacataaaaagtaaatgccactaaatatggcattatctcaccaatcaaactaaaaatatga

SEQ ID NO: 109681 - DNA, 1102 bp, Cannabis sativa
ttttttttttgttattttgaaagaaaagcctattatttttttttcattttttttcttttatatatacataaataaaaaatttagaagtgaaaatttatgaaggaatctttaaaaaaaggttagtaataatagaattgtagtcttaatgtataagggttttttttaaaagccaaattttaaaattttgcacaagactctcaaaatgcttgagaaagccctgtttatagccctagtattattttaaatttaaaaaattacatatatatatatatacaatataagaaatattacttttactagcgcatttcgcaaactgcattggcaaaaaggtcaaagattcaccagtacacatttgcagtggctaaaatctaacttttactagcgcatttacgcgttgggaaaaattatttttaatagcgcttttcattttatgctttaaaaagttctaatatcaacgttgatcatttgccaattctttttgccaacatattagaggtaaattttattttactagtgcaatatcaaactttagcaaaagtgacatttttttgtagtgataacataaataattaaggcttttaggtcttggtcaaaatatatatgttatatatataaaaaaaataattatgttgaaggttctcttaatatggctgaatatatgaaaatctagtttagtttctatctgggtccaaaatgtttggtattgattagacccttgtattcaaaaaagagtaatatgtttgtgagaaaagaaaaaaaaacattattattccttgtttttaattttaagacaattcatttgcaaagacaaaagaactataagttaattaattaacaccaaacaaagaacaacataccacttaataaagtgaaagttttgaatctctcattatctttctatacaattttattgttctcacttaaaaaattataactataacttttttatatagagtgcttatttgtaaattgcttataatagatatatttaatttgttttcgacgattttagaataatctatactataggttttgaacatttagtgacatgtgtgcgattttttttttctgtacaaataattgttttgaagtttgatatcat

SEQ ID NO: 109682 - DNA, 718 bp, Cannabis sativa
catatttcatgtaatttttacaatttacatagattactaacttttctcattttcttacaattatactgtgacacgcggatattaacttttttactgttttttttttctatttggcagtatactgccttttgtgtacacaatttttttgttttttttttcttttgactgattgggacatgggctgtcacaaaagtgacaagttctttattttttttttattttaatggatgtaaaaattattatttattatttttaatatttaataattattatattatcttttgattaaaatgatgatgggatgtgggttgtcacaaaagtgacatgttttttgctttttcttttaatttaaatagaattaaaaatcccacccccatgttctactattcatcttcttcttctagttttttttttcacgcacttattgtgaagtgggtggattctatttttttttttccaatttgtagagtttttttatttttcatcttaaacttccctatacatttcccacttttttttgttagaattcttctataaatattctttttcctcattaacaatggttgttaaccgatttcctcccctgttgccaaaaagtctccaaaacaaccccagaaaaataaaacacgaggatcaatggacaagaagagtttgaaagataatcctccaactcatacttcctctaatatccgcttccttggttaattaattttttttt

SEQ ID NO: 109683 - DNA, 922 bp, Cannabis sativa
aacagtattacttgatcaatttcattacaattaagcctcaagagcactcataataatatattttttttatattttatttttttaagctatatattgtatttgattcattaattatatgttatcttctcctttttgataggttaaataagggtcatggaatgagtaattaaaaaaagaagaaaaaaatacatattaatctatatgtaagaatattggatagttgctctgtagattgaactacatcaatgatatagtacaaattagggaaaacacatatatgatcatgattttagcataactgaagcaagaaaacatagagtcacaacaaattggttaaaatgcttgattggtttaggtattttacaagtttcatcagatccttaagagatgcaaataatgttcaatactatactcctagtacacgaagaattttacattcattataaagtatatataagattaatttgaataagaactctgctctgtttaaaaaaattaaaccaaatagcgactccttagaaatttcataatagatatagaatagctaaagtcaaacaaaactacaagttgggcaagcagctggcaaaccagaaaaactatctataaatattaataaaagtaaaaaccctaatcggtatcaagtcaaaatacaacaaaataattacagtatatgtcccataatttaaaaaattgatgtaatcaattacaaaaatgatacagtaattggaaaatatttaaatcaaaatctgaacaaaagaaattatttaagatatgcgaagatgatagatgaaaagataaaaaaggaatatttgactaattaattctttaaacttatacttatcactattgaaaatatggatatacaaatgttttagggaaattttcacaaatatacgtaaaacataaaataattacaaaaata

SEQ ID NO: 109684 - DNA, 565 bp, Cannabis sativa
  modified_base (279)..(289): a, c, t, g, unknown or other
  modified_base (394)..(396): a, c, t, g, unknown or other
tttaatatatataaatgtaattggattggatcggtttttaattgaattttgagattgacatccaataaccgatccaatccaattagaatccaaattttaacatccaccccactccaattgtaattggatatctaactttttgtaattggattggattggatgatgcccattcctataaacaggtatatacaatagtcatccagttgatatttaatggtaatatttaatgacgtgtcaaatttgcaaagaaaaataaaaaaagataagggggttaagtgnnnnnnnnnnnaaacataagggggttttgccacaaaaaaaaagataagggggttaagtgtatataaataaaaatataagggggttttgccaccaaaaaaaagataagggggttaannntataaaaattaaaatataaggggatttggacaaaaaaaaaagggggttaagtgtataaagcctgtccttaatttattcaacggtcgaagcaaaactctctcaatcgacaaaagatgaaattctcttcaacacaagggtcggtaattatggctgagattcttcatcaaaa

SEQ ID NO: 109685 - DNA, 1589 bp, Cannabis sativa
  modified_base (318)..(318): a, c, t, g, unknown or other
aaaattactaattagcttaaaattatacacatataatttcgtaatttaaattttattatactcgtaatcttaatttaaaattattacacttaattatttaatttttttaaataaatatttaaaaagtaaaaaatgaaataagttgaaggattttctagaaaaaaaaggctacactcgttgaagaattaaatatttaaagtagctcgcgacttcttcccttttctcagaatctacaaaagcgcctatagtgtgcatgtcatcaggtacataacaactctattttagaattattttgcaacttattgcttgttctaattngtcgtatgatctttttatttgtgttcataaacatctaataaaatattttgtgatagtcatggagttggtggataatttttaaatattcaaaggagtatttgcactctataaaaagttgtcactttctttttagagtgttctcatagtcttgtagagggaatagtttattgttgggcaaagtcctttgagacttgtctgggccttgagttgtctggcaaaatcctttgagaattgaagcctttacgcatatattttgaaaaaatgtcaaccacagcttcacaaaagttttactccagaatatgtcaataagtagtatttaaaaaaataactaacaaacttttctagcaagatgcaaatcttgaatcaaatcaagtacactatattgagaaaatgtctttataataagattatgtatttcaatatatgtttgagataatcttattaaagttagcagcatgtgaagaaaaaaataataatgtgagagtgatggttcaactatattgtgtttagaagagattttgtctagacatatgatgtgagaaagaaaaatatactcaataatttttaaataaataaataaattcaaagtaatatcatttcaaagtactttggtaaattatggtcaagtaaaaatttgacaaatctttcaaactgtaaaaaatttagtaagaataacatctagctagggagactatttacttatcgagaataattgtagagtatgttatgttttaatgtttagagttattcactcacatcaaaacacgtatttttcttcaaaaataaaaatagaaattactttaaggaggttttattttttgagaattttaaggaattgttctcatgcaattacaatgttttaaattattatttttattgtattaataattttttttctattatattttaaagagtaactgcgcgaagagcaagtatatgttacctagtaagaataatatattggaaaaattactggtatgtactcccttacaaaattttattatgttgagtggttaataaaaacggcatgatgttaagttttagaaaatattgagtattgatttcttgtattgctttatatagaatctcaaaacaagcataagatgcagcctcaatttaccacagactacagtgagatgacatgggaaccgccacctatgagaactctcaagctaaatgttgatggtgcagtttctagccgctggaataaaacaggaggtgggctctagttcgtgactcgactggaagagtaattgcagcgagggccttca

SEQ ID NO: 109686 - DNA, 742 bp, Cannabis sativa
tcgcactcaccgaaacactaccaaaacttatccaaatcactccacatctcacagggcacatatataccataaatattaccatccttgcataacaaaaattaaaattgagcccttaaatgaaaaacgccattaacgttcggactaagctttaaaatatttaaaactcgatttctaactcaaactcacctcaaattcaacaagtaaacatcgatactagtcccataggtaccaaagaacaattctatgaagtcaaaatctcattaactattctaattcacaaaactcctatacgaaatcaattgttgttttaacttaaaacgaaattaaaccataccttaagcttttcctcttaagggatttactatcctgctactaccagagcttagatcgctaagttttggattgaaaatcaagaaaaatgggtatagggagagaaggttttatcgaaaaagagagaacgatagttcgttcgttccttcgttccttctttctttcactgttatattatatttattaattaatatatatataatcaatttttttccaaacgaaactgataaagtttcgtatatataataataataataataatatataatattaataataaaataatatataataatattaataaaaattttatgattagtagttaccttattatttcttaactactaagaaatctctatttttagggtatttggccaacttcgagtaccttaaaataccccgatatttctaa

SEQ ID NO: 109687 - DNA, 627 bp, Cannabis sativa
tggtaaaatatttccaacacctaagacaacccacgaccaccgcaccacttccggcgaaacctagtcgcttgttttcagtattttttttttttctggtttttgacgatatcgcgaaacatcgctaaatgtcgtgaaacatttagcgacatgtaaaccaaaccaaacacttgaatgatctttctttaggaatagcaattttattcctacattcattcattcatgtaaactaaacactatctaataaggggttttattaggcttattggactaatgagtataattagtggtagactataatttaatgggcccattatagttttagggtgctctcatgtgcttctaatatattttttaattattaaccatcccattatagttgttgacaattattgggcacatagttaataattgtatttatggtattaaacctatcgttatattagtccacaatattaattctaacatgttgtacttcaaattttctgggttcttataactcaacaacagcagaagctttttctttgaaattgctcttgaatggtgtgtagtagttcagctgcctattactaaagttgaaatgatgtgtaacaccctaactaccaaaggcgtattacgtgagttttaaac

SEQ ID NO: 109688 - DNA, 906 bp, Cannabis sativa
gtacatgttgttatttcctgttagattacattgatagcagtaatagtatacatagagttgtactgattactgatagatgtatgttggctaaaatactgaacaatgctgtcacatcaatacgactagagtatgactagcatattgagtataggttaaaattatggtcgatagtattgccttatgaatattctagactcattaccgtgtgggacacggggattaaggttatgatcgggcatatggtcgccagattataacccggcttacttgtatgtttatgttatgctttttttactgagtctgtcgactcacagtgctatgtttattggtaggtaagggcaaggctaaagttgaggagtcgtgagatgaagattgtacatgttgaggttaggcctggagcgtacgatctttggggacattgaggcttttactgtagagtcgctgggcgataaacttttgtatatgtgtatagcaaacttttaaaagtattttataaatgggatcccggatttttatatgtgtaataccttaagtttttaattaaataagcaaattttaattattcacgtttttcattaacctcgttgattagcaacgagttgcacagtacgttaaaaatcacgctaacacacctacgctagttagggtgtttcgatttggtatcaaagccgccaggttgtcttctgaagatcgtcatgacatgtacaatcatcatcagcggtcagctcattccacggttcactaagctttttttgcttagtagtttattttcaatagtatgatttaaggaaagtctgttaggaagcatgttagtagcctgatagtagaatgggcgcatgtttttaatttccaaataagtagcagtagtaagttccctttgatcacaatctgaccagactagctctt

SEQ ID NO: 109689 - DNA, 5150 bp, Cannabis sativa
ctgtgtcaattttaattatggatttgattatgtatgttatgaactaaactcctattttggaagatcatgaatgttgattgacattatctttagttaattataattccaatttctcctttcttgattctgaaatttatccatatttgtgtttaattacatgtttaagattgatcacattttgcatgccttatgatcccaattcaacatctgaaaagggagaattgggaatgataaaattggttaaactaggttttgatgtgaaatgaaagtatttacatcgcctttgtgacatttagattattgcttaatgttgattacatgttagtctaattcaaagatgattagataacatgtgatttaggacccaaaagatctgacaagagttaggttaatttttataatctgtcattcacattaagaaagagagtagtaattagcattaataattgggtagttaaatcaacaagattcttttccctaatttgtcatctttgattaaatctttttattgttggattttattttcttgttaatctttatgtttaatcataaaattatttgtttgcaaaatagaaatataagtctaatttagtggtattcatttcaattccctgtcagatcaacctcacctatgggagtactacttgattatgtgaacttgctactttttcgtaacaagtttttggcgtagttgtcggaaaattgtttaaaaattgatattacaaaggattagattaaaatctactttggttaattccttttgcttgtttctaatctggttcttttaaaattatcttattttatttcaggaatcgaaggtgcatgcgtcatctaggacaaagtgtaatactgccggttgatcctaaaattgacaaagacttgtagaagagacagaagaaacaaactgcaagaaagaagcgcaacaagagttgaaacagaagaagtcataactgataacgctaatggtggtaaggatggcggcaacaacgataataatagagctgtcgtagaagaccaagctaacagtcgtattccacccgaccatagtttgagagactatgttcttccaacattgatgggggttcagtcttgtataagacaacttgtcgtggagtccaataactttgagataaagccagccatactccaaatggtgcagtcttcagtcgagtttggtggcctaccttctaaagatccaaatttgcatttgtccaatttcatggagctatgtcagactttcaagacaaacagagttagcgatgatgccatccgcctgagactattcccattctcgctgagggaacgagccagaagttggttgatctccttgtcacccaacaccattgctacatggactgatttggcaacaaagttcttgtccaagtttttttctccagcaaaagctgccaagctgcgaggagagattaatattttttgtcaactggacaatgaatcttgttatgaggcttgggagaggttcaaggatttcatcagaaaatgtccacatcatgggatcgaaaagtggatgttggttcataatttctacaatgggctgattggtaacaccagaacaattatatatgtcgcagttggtggggcatttatgacaaaaagtgcaaatgaggcttatgatttgcttgaagaaatggccatgaataaccaacaatgaccagctgaaagaagccaaataaagaaggtagctggtatgcacgaggtagacgccatcaccaaattaacaacccaagtcgaggccctaacgaagttgaaggttgtgcaatcgaaacatgctcaagtcgcttgtgagctctattggggtcctcacacctatgaccaatgccccatagatgtgaatagtttgtcgatggatcaagtaaaagccatcgggaattatcctcaaaataataactatgggtacaatcaaggagggggtcaatgacaaaatgtacaagggcagtcctctaatcaggaacaacaggagttctattagtagagaaatcagccccaacaaattcaagagcaaccacagcaacaaggttctaaaggagggtacagtctacaaatagatttgcaactacagtttatggcagagactagatcatccattaaagctcttgagaatcagatgcggcaattggcgactcaaatatatacctgacctcaaggtaacttgcctagcagagcggaggttaacccaaaagaaaactgtaaggcaatcaccttgagaaatgggaagaagtttaaggggcctaatgagagacaattagtggcaaaagaggtttaggatcaatcgactcttacaccagcaaagaagaagactactgagggtctcacaccaaagaaagcttctccacctatcagcattgaccaccatgtaaagattccttacccacagaggcttcgatcccctttgctacagccttggaacaaatgccaagctatgtgaagttcatgaaagaaatcctgtccaagaagagcaaaatggaggactatgaaacagtggcattgactgagaagtgtagtgcgatattgcagaagaaactccctcccaaacttagagatcctggagtttcaccataccttgtaccatcgagagaatagaggggatgaatgcactgtgtgatttgggagcaatcatcaatttgatgcctctatcagtaaagcctactacagtaaccttgcagttggctgatcgatcgttggctcatccaaggggggtcatcgaagatgttctagtcaaagtggataaatttatcttcccaacagatttaatagttctagacatggaagaagacatcaatgtcccaattattcttgggagacaattcttggcaacaggccaagcgttgattgatgttcagaagggaaaattgaagctgggggtgcaatggcaagaagtggtctttaatgctctcaaggcgatgacttttctaaaggcaagtgacaactgtttctttgtggatctcgtgaacactatagtggagaagaaaaagttgatggaagattcattggaagtgagtttgactaaagaggacctgaatgagcaagatggaattgaggttttggaatttgcaaaatggcttgactcctatgggtcgttaaatagaaaatactttgaagagttgggggtcgttccaaagaagcctgtgccatctgtagaaaagccactagaacttgagttgaaggtgcttcctgatcatttactgtattgaatttttaggcaatgataagacgctgccagtcatagtgtcagcttcactttctgatgtaaagactgataagttgttaagagtactcaaagcacacactaaggccattgggtggacattggctgatatcaagggaataagtccctcaatagttattaattgaattattattgaggaaggaaccaaaccaactattgattcacaacaaagactaaatccaccaatgaaagaagttgtgagaaaggaagtggtcaagtggttagatgctggggtggcctacctaatttcagacagtaaatgggtcagcctagtacaagtagtgccaaagaaaggggggatgattctgattaagaatgaaaagaatgagttgatccctataagagttgttacttgttggcgaatctgcattgactagaggaagcttaacaaggcaaccagaaaagaccattttcctttgccattcattaaccagatgctagaccggtttgctagataggagtattattgttttctagatggctattctggttatcatcgaatagccatagcaccgcaggactaggagaagacaacttttacatgcccgtatggcacttttgcttttaggaaaatgccatttggactatgtaacgctccagcaacatttcagaggtgcatgatggcaatattttttgatttcatagaaggttgtataaagatctttatggatgacttctcaattttcagttcgtcttttaacgattgtttgaggaacttggaaaaagtactaattaggtgtgaggagtcaaacttggtacttaactaggaaatgtgtcattttatggtgaaagaggcgactgtattgggacacaagatctcaaggggaggcaccgaggtggatagggccaaggtttctacaattgaaaatctaccccctatagtttctgtaaaaggagttaagagttttctaggccatgcatgattctaccgaagatttattaaggacttctcaaagatctccaagtcattgtccaatttgcatgttaacggggtaccttttgagtttagaaaggaatgcttggaagcctttcaagcttttaaggagaagttaatctcggcacccatagtcacttcaccaaattgggagttgccattcgaattgatgtgtgatgcaagtgactacgccattggagttgtcttgggtcaataagttgacaagctgtttcataccatctactatgctagtagaaccctgaatgatgctcaactgaactatgccacttcggaaaaagaaatgctagctattgtgttcacgtgtgacaagttttggacaaatctaattgggaataaggtgatagttcatatgaatcattctgcaataaactacctcatgaccaagagggatgcaaagccaagattgattcggtgggtacttcttcttcaagagttcgacattgagataaaagacaagaaggggactataaacctagttgttgatcacttgtcaaggcttgaattggaagagagtcaaattgcaaaagaggtgcagataaatgaagagtttcgtgatgagcaactctttagtttaagggaaagcttgattgtactttggttcgtagactatgtgaatttcttggctgcaaatgttacacctcctaagatgtctcgtcaacaactaaaaaagttctttttagaggtgaagcactactactggaaaaagccaatcctctacaagcactgtgctgatcaagtaataagaagatgcgtgcgtgaagaggagatatattatattttgaacaactttcatgccttacaatgtaggggcattttagaggcacaagaactgctgtcaaggttcttcaaagcgggttttactggcctactcttttcaaggatgctaatgactttgtgaaggcatgtgatcgttgtcagggaacatggaacatttcaaggagaaacgaaatg

SEQ ID NO: 109690 - DNA, 939 bp, Cannabis sativa
atccttgggcttatggtttatattggctaaaattattttttatcaaatcctcttccacttttctaactctgatatggaccataaaaactcacaatttgtatcaagagctatcttcataattatatagattaaatactatgttggttatttatgaatttatatatatattgatatattgtcaatggatgaaattattttttatgtatgaatatgaatcattaattatatggtaatattagattagaaattttacagttttttattaaaaaaattgtgcaccataattgtgctataggtttttgatgtaatatatttgtaatctttatttttaaattatgtaaattcaaaatcaacaaattcctccattgatgagtgagtttgggtttaaggtgtaaaccctggcctaatcgaggcgacattatatgaacctcgaacgacgagcaacgaaagtcaaagtgttgcggcttcaagccgtgatgctcattaggatgacccacgtatttttccatgtgtgcacgcatgacatgcatagccatgcacaactggaacacgtgaaagagaggaagagaacttgattggcttcgggttgcatggaaaaccaccgaagggactcgactggtcctgtgacagtctcacggtggttaactagtccttttgcaccactggtcgacgtcaaccatgatggtggaggaggtggacgatgaaggtcccgagccttttggctccgtcgtgcatgaaatggggtctcacgacctatttggccccgttaggctttgttctcgccagcaccggtcgtgatggcttctcaaatgctggccgactgactcttcctccctctccaactgtagtggtcatcccgactgcacacgcaagtgtacgtatcgtttacaagtaataaactcacaaagagtgagatcgatcccatagggattgtagtta

SEQ ID NO: 109691 - DNA, 823 bp, Cannabis sativa
  modified_base (426)..(427): a, c, t, g, unknown or other
tcactattgttcaaccttagctttacccttacctacacatgcaaacaatatctgtgagtcaacaaattcagtaagaaaagcataatcataatcataaacataatctggattacaattaagcgctcatacacccaactgtaatcatatccccgcaccctaggcggtactgagtctagaacgttcatacgataatactatcgaccataatatcagcctatactcgataatctagtcatactctagttgtaacgatgtgatagtgtcgatagtatctgaaccaaacatacatctatcggtattcaatataactctacgtatattgataccgctatcgatgtaatctaacatgcttaacaaacatgtacgctaaacatgtaaacacatatgcatattattatactaatcttatctcaattctgaattcanntgtgtcggttaacctgagtggaactgctgctcgacggtttacaggcctctaaatcacaatattcgtaaaactgataagtgatacgctaaatcactttctgtggactttaaactcaaaactaaaggctttcctattgatttctagcaatacaaagtcctaagcatcgaggaaacacgagaaaatcatcgaaatagggaacctgcctgaaaaacggtaagccgtttctaaaaaatggtagactatttttctagatgctgcactaggaaaaatggtaggccgcttcagaaaaaacagattgccgtttttcactgtagaaaaaaaaactccccctttttaaatcaaaactaccccaaaacttccaataagctctagaatacctatacatgttataatgaa

SEQ ID NO: 109692 - DNA, 555 bp, Cannabis sativa
gaacgttttaaattttttaattagggggtcatttgatccaaatttaacgcaaaatcgatcttgaaatttacatcttagtagtatgaaatcattgtgactataggggaaaaatatttttaggtgggtccgagccacatttcacaaaggggtgccattatcagaaatgtgagattttcactattttgattaagatgattgttagtgtttaaaaactactttttctctgaccgtttcctatagaaaagtgattcacaacgctcttagtttcatccttgtaaaatttcacaattttttaagatgtgtaggaagagatatttagaaaacactaatgagtgtatgagtaaggtaaaatttgtaaaaagttaccttgaaaagtagaacctttaaattttttaattagtaggtcattttaataaaatttaatggaaaaacaatcttaatattgacgtcttagtagtatgaaatcattgtgactagagggaaaaaatattttgaggagggtccgagccacatttcacaaatgggtaccaatataagaaatgtgagatttttact

SEQ ID NO: 109693 - DNA, 842 bp, Cannabis sativa
aatcttaaaattatgggtaaaaataatcacattattttgtaagtggtaatgtgagtttgatattttaatttttttgagaaaattaaaaatatcaaatgttattttttaaggtggccttaaaaattcatttcaagaggaaatacacaaaagtgatatttaatatacactttatgctagaaatgtgggggtgagccacaaatttaatcaaaatgtgttgagatattgttgattaattcatttgattttaaattctaattctaaatcaagtttctctatgtgcataagtataaatattgacataattggtgtcaaattttggtcaaaataatttgaagaaggaaattaaatttaagagaaattatagagaccgagtggtctttaatattttaaaatcaagatattatcttgataatgaaatgtaaaagtgtggtgatgatattccaacgtgaaaagtttaagacatgtttgttgtcttaaaataaaatgtaatttagacatgtttggtgtctaaattagtgtttaattttgatatgcttggtattaaaattattgagaatttgagttgtgtgaaaattaatttttttatgattgaattttcaaagcttaagtacttaaggagaatagtggtcacaaagtgaacactatattttggcatgcatgattcacatggaatcaatagtgagaggttataacaaatcgcttaatctctgtacaagattaaagcatgaatattcgagggatgagacctaaactcccttcgtattttggtcattgagggtaacctatcttaacactagtaaaaatctagtgttaagttcaataggtaataacaagtcaataga

SEQ ID NO: 109694 - DNA, 1867 bp, Cannabis sativa
  modified_base (114)..(126): a, c, t, g, unknown or other
  modified_base (1793)..(1794): a, c, t, g, unknown or other
gattgtgcgtccttggtctaaggatctaaactcaattcgcttaattcgatctgtccccttatagatacgtctccatggccttggtctttagtattggggcaacaattgcctcannnnnnnnnnnnntacaattgggaagccattgatgatggataaatttactaaggaaagaactggaattcagtttgcaagagttcttgtagagatggacatagctgataatcctcctcggtttattcagtatctcaatgagtatgggcaattggtcgagtaagaagttgactatgagtggctcctcgtcaaatgtaaaacatgttcgggttatggccatcttatggtggattgtcaaaaagttgagaagagtcaagagggtaaggagatgaaacaaaggaaggaggttacagggactattaggaaagaaaaggaagttcctattgctattgtgtagcaggtaggaaaaccagtggaaaaatcagcagcttcggttgctgtgcggaacaaaaaagaagtgaaggataaatggattaccccgaagaaaatagcacacaagcagagagaattgggtggttcagatcttcaggtggataaaaacagtcacaacctgttcgacatccttgatgttcagacagaaaatttggaatgtgagagggtgaaatagtttgaataaacaggttgatgtttttaaatttttgtaatatgaataaaggtggtgttggagcttttttggagactaaaatgaaggggaacaaaataaaaggcatggtgaaaatgaggtttcaaaactgggattactattccatctgagttactgaaggcggaatttcagttgtgtggaggagtaaatttgctcgagttatagtgaccaaggagacaagtcaatttgttcactattatgtcaaagtggcaggttttcctactgctattagtgtcacatttgtttatggcctgaatacaatagaagaaaggaaagtaatgtggtattatcttgctgggctgactttgccaactaagtcgtggcttatgcttggcgatttcaattttgtctttcatattgattatagacaaggtgggaactcggtttcttctggagatcttttagactccaataactggttatctctccagttaatggatactttgaaaagttcaggttcatcttatacctggaccaataagtaggaaggagggaagagaatttattcgaagattgatcatatttttgctaacgaatactgggttgatctttttcttaatttggctgctctgtttaaattggatactctgtctgaacattgttcttgtttggtgtctaacaggaagcttgaaaacattggttacaaaccatttcggtattataacttctggtctgagcatgctgagttgaagaatgttgtcacagttggagtaagccttgttcaagcatgagtttacatggtatttttctgaaaatgatgagactaaaacacagattgaatagatttaataacgagatttttggtgatattgggaagtcctatcttttggcaaaggagacataccgtgaggctttattcgtagctcaagccaaccctgggaatttttcttttcaagaagctgaaaaaaaggcagcagagatctttgaactcaaggtaaaatgtatcatagcttccttagacaatgtagtaaaatcacttggcttaggaaaggcaatgataataatgcctattttcatgcttttcttaagaaaaggaagatgaataatagaattgtttcttttgttaataaggaaggaaatgttgggttttgtgccctanntaaaacccatttcaatatagtcagatttacttattaataaagatcagaaatatcattttatgttgcatggttc

SEQ ID NO: 109695 - DNA, 671 bp, Cannabis sativa
ttttttcgtcatacttacctaattgtatgctccggagtagagaagttcaaccacttgatatggttcttcccagatgggtccaagtacacctgttgtacagtctttggtatttaggaatacccttctcaggaccatatctcccacgaagaatttccgagctttcacttgtttgtttaaatactgagccactttttgttgatgggccatcaactttaagtttgcagtggctcctctttctttgatttcatcaagtgattttgctaggagtatgtgatgggtaccttgatcgtacgtcaatcttctgtgaaaaggtggctcgagttcgacgggtagcatagcttcataaccgtacgccattgcgaatggtgtctgtccaatttctgttttttcagttgtacggtatgaccatagaacttcaggaagctcttttggctagtttcctttggcatcttcaagttttttcttcattgtatccttcaatccttcaaggtttttttgactgcttcaacttgaccatttgcttaaggatgcgccactacggagaaacttttgatgatatcatggtccacatcgaaatcagtaaaggattggctgtcaaactgcttgccattatctgagactattttgtacggtagtctgaaccggcatattatgttcttcaccataaagtc

SEQ ID NO: 109696 - DNA, 544 bp, Cannabis sativa
gattcttactcccaagttcgaagtaacattttaatcatggatcccttacctgagatcaacagagttttccatcttgtaactcaagaagaaaactagaaaggaaattccaaccctgctgcagaatcgaattcaggaatggcttttgccttccaaggagacaaaaactcgaacaataagccaaattctcaaggaaataagtcaaattcttccaaaagaaatcaacctttctgcactcactgtaacattcttggacacaccgttgaaaagtgttacaaaatccatggataccccccaggatatcacaagaatgatagagggaaagaaggctcggcatcgctaatcaggttcaaaccagcagtaattccaacaccaaacaagaaggacaagccctactacctcaacttactgctacacaatatcaacaactgttaaatttgctgcctgttcaacaatctggtttggtgaactctgatgcaggaaccagcacaggtaaatcaggtatggtccttttcaagcatgtctgattttccttccattaattctt

SEQ ID NO: 109697 - DNA, 632 bp, Cannabis sativa
ggaacttctgatgttaagcgttttaggtttattatgcttcaaacaaaatttgatgatcttagaatgtctgaatctgaaaccttgtctgagttttatgaaagattatctaatatagctagtaaatatttttctcttggtgaaaagcttgatgaatctgttcttgtcagaaaaattgttagagttcttccagacaggtttgatgctaaacttttggccatggaagaagctaaagattttagcacaatgaaggtggaggaattaatgagttctttgtgtacttttgaattgaatcaacaaatcaagaagaaggacaaacccaagtctattgctgataaaggtaaaggtttgctttaaatgttgttgaaaaaaaaaaatcagatgataaagaatatgatgagagaaatgttttaactaaaaactttcaaaaatacatgaaaaagataagtgacaaaaagagttttccacaattctccaaaggtaatactttttcaaaacctttaatgactaacaatcgaaaaggaattcaatgcagagaatgtgaaggttttggacatattcaatctgaatgtgcaaatacactgaaaaagaataagaaaagttttaatattacatggagtgatgatgaaactgat

SEQ ID NO: 109698 - DNA, 519 bp, Cannabis sativa
ttataacaaaatcatgtcatttgtgctctttttctcataaaaaaatgatcgtaaaataacaaatgatcatcacgtatgctagagttcttagacaaaattatttaagtagaactcatacacaggtaagaacaatctattaaatattataattaaatacattaatttactatcgaaagaatagataaattgtgattcataatatttaataaatttttttcaccatattaagcatccttagcaagcaattattatcgataggataattaattactcataaggatcttaatcttatattggaggaaaatataatatttaaataaaattaatatttaaatgatcctcattatcaaacaatttacatgcttactcttgcgatgagcaagaaaataaacaataattgttgtcaacaaaaaatttatgcataaaagattaaatgtaaatacttggtatgttgatcttgtgcattatagcatagaagtgatagagtactaaatttttagtgaaagaaatagaaaaggg

SEQ ID NO: 109699 - DNA, 598 bp, Cannabis sativa
taactaagcgggctttacagagttgcaagagagtgggcggtttcctttttgtacatgggctggcggttatttttcaaattttcaaaattggtttctttttctcttctagctttcatgtttatttaatccaatctttgtcatttaatctcaccacctacccgaacctattttcttgtctctcttgttgtttctgttcatcgtcccttttagatcaaaatggtgagaacaaaggacctagggcatccgaaaaagatggtggaaaccgatgcaaccccctccaatgcaccccctgctacttcattcgtgcctcctgctgttgcaaaaataggagattcatcgcttccccagcgtgaatctcagcccgagaagccaaaacgcattcctaagcaagtggctcgaaaatctgtgcgtccttacagaacctggtcttcatcgtcttcatcttcgaaggaatctcctccacctgctgtagttcctcctcctactgtatcagttcctgcccctactccaacaggtccttctactcgaactcgtgcccagcaagcctctgtcgagaaggaacttcgatcatctcgaagtcatgataagccagtgcctc

SEQ ID NO: 109700 - DNA, 528 bp, Cannabis sativa
ttttttttatttttcttttattttctgttagttttttttttttttttccataacccactatcttttcctgtgaagccctaacccacgaatttcaacctcccatctatgctacgatctcccctatcttccataactgcatttcttttttcctcttacagttaattttcttcttctataagtggccatcactaggtcgggttccaagtccccttcacctgctaaaaaaatttcaaaaaatactaagaaacctcattcgaagtcctctaaagttgatcctaaaatgggtttgaaatacattgggaagaagggaatgagtgatgttgcagagccatttagttctaaaaaaagacctcttccagctaagattgaatctcgtaaggcaaagacaaccaaatcttcgaaatctgtcaaggatgtaagttgcgttctgttatttttcgatttttttagttttttttcttgttgttttgtttttcgtttgctgttttgtgttttaattttttccccataatgttttaggttctctcc

SEQ ID NO: 109701 - DNA, 1586 bp, Cannabis sativa
tttaattagttacaacatatatttgtattaaaagatgatatttataaacataatagtaagcttggtgtaatgattaagataaatggcaaatagcatagagggtaaaggttcaaatcccactaactatactttatatttttctttttaaatttatttatgccctccctcctttaaaaaaaaaaaattacgccctcctcactttaaattctgggtccgccactgacgaacacgacacgaattttgcaggttggggtgggaaaaattagacgcgagtcgaaaacgggtcgacacaacttaacacgaaatagaaactggtcaaatactacacgacccacttaacacgaatgtgacacgtttgacacgatttttttttaaatataataaaataaaaaattaacaataataatataattatataaaaaatagatatttagtgattcaatgttaatttaaaaaattttaaatttaattttctttaacatgaaattaaaaatatcttatttgctaaaatttttattattatatataacaaactatacatacataaatgtatataagagcttaaatttattatttttctctacaatttcagcttcaataatagcaaaacgggtcatagtgagtcaacacgaacacgacacgattttttacggatcaggttagagttgagataattagacacgagtcaaaaaacgaatcgacacgcttgacacgaaatataaaagcgagtcacataaaatataacccgaacatgacacgatgacacgttttgtcacccctacgttaaatacaatctagaactaatatataattataagaaaaatttataacctacctctttatttacttatttcgtaaatttttagaattcatttactatatcgtattatactgtattatattgtataatattaagaagtggccttagcctccctaaaaaaaaaatcttatcaaaatatatgtgcatatttaaaaattagataaacaaaatatatataaatacgtatatatacaattgaaaaaattacccctcttaataagttcacctagttctgtcactatatgatactatattgaattgtatattatacaatatatgtaaaactatatatggtattaacttttatagatacctaaatatataatattttaatataaattaaaatttaacattatattatttagtaatatgatatataatctaattaaatacaatacaatataatacgacttaatacgatatagggactgttattcgtatttttagataggttacacgtgtacttctaaaaatcaaaattctgcaaggaccaattcacaagcccaatcgaactagtgggtcagtccatcatagagttagaccatggctccaaattcagctataaatccaatgtacatgcataataaagtcggacattattggttctggaagggcgactagcccagaaaatgtaaggtccagcaaagcaaagcatatctggatactctcatgaggtaatctagagagggaaaccgaagaggcatccagatatcaacctacatggcacatttgtgagtatgggtattcacaaagtatccgatccaat

SEQ ID NO: 109702 - DNA, 547 bp, Cannabis sativa
accctgtcggaccaagtctatggagctccaaatgctgcgccaaacataactaggatttcggcccaagtcagctgaaagaaaatcatcatagggaaagtagcgtgctttgaatatcttggaggcaagggagtcagggtgacacaggaaccgccagccctgcttagctagcatagccagattaaaatcatggagaagacggaagcctaaaccgccagcttcttttggacgagaaagccgatcccaattcatccaaataataccattgcctttactacttgtagttttccaccaaaaacgagccattattttctcaatctcatcacaagtaccaaggggaataaggaagacgctcatagcataagtgggaagagattgaaccactgtttttaagagaatctccttccccgcactagatagtagttttccagtccagctattaattctattcaagaccttattcttcaaaaaaccaagaatagcatttttgtttctcccaattatgttagggagacccagataaagactgttttcagaagcttcaggcata

SEQ ID NO: 109703 - DNA, 513 bp, Cannabis sativa
  modified_base (98)..(111): a, c, t, g, unknown or other
aaagatcactaggggtacggtacgtcttcaaccgtccttcccggattgtaaggactacttgaagtttgtcctgcccctcgtgatgctttttcctttgnnnnnnnnnnnnnnagtataagcttgaatttttatacagcttcagccttccttcccggaatatgaagcttgttacataaaaattcaatgtgactctcgcatgtacgtttgtgcagaaaagatcactgggggtacgatacgtcttcaaccctccttcccagattggaaggacttcttgaagtctatcctacccctcgtgatgcttatccctttgacctttttaagtgaagtctaagcttgaacttttatacaacttcagctttccttgcaggaagccgaagcttgttacataaaaattcaacgcgactctcacatgcatgtttatgcaggaaagatcactggggtacgatacttcttcaaccctccttctcggattggaaagactacttgaactctatcctacgctcatgatgcttt

SEQ ID NO: 109704 - DNA, 543 bp, Cannabis sativa
cccattgagaacatactagttttccacccacgcatcttgttccacacccaattctttataacatcaaacaactgccttttattccgcccaacaaaagaaggaagccaaggatatttcccatgattatccacaactttcacaccaagaaattcagccatctcagcttgcatctccgatgtcacaagcttcccaaaacacacctcagatttattaaagttgaccacttgccccgacgccaccgaataactttccaacaaatcacgaaatcattgacaatctaccatatcagcatcaaaaaacaccatactatcatccgcaaagaacaaatgagagaccgataaaccccttctcccaaaccgaatcccttggatagcccccaacccctccgcttgttgtatcaaacacgagaacgcttcagcacaaaaaaggaataaaaatggagatagtggatcaccttgtcgtatacccctttgcggatacactttccctttaatttccccattaataagaaaggaaaaggacacagaagtcacacaactcatg

SEQ ID NO: 109705 - DNA, 2527 bp, Cannabis sativa
gtatgcaaagtcgaattgggtgctgtcccacttgacaaactcaggtatatcactcttatatactattcagagattttcacattgtaactaattatttatatatgcaatctcaaatcaatgaatgttccagctctattaccttttgttgtacatgtcaaaaacactggagaacccccacacattagtcccatgttaaaaaaaaacatcacaaaaaataaagagacagagagagagagtttaaggaaaagctaagaagattcacttactagaaaaagaaaaaaaaaaaggaagtcttttgttttggttttgacacttaagattcctagtgctctggctgttgtgaattgaattttaactgcttgatcagttctagtaagatatcttggtttgtttaagagtttctgctatatatttttatcatgcattgtatatttggttgaaatgttgtatatcctgttattccaaacttcattctttgtttacacaggtcagattacaatttgaaacaactaagagaaaaactcttccctcccaaacttataccgaaacccaatcccgaaaccaaaaccaaaaaggctagcaacaaagaggcagaggcacatgatgaaagccatagtatgtactcatcagttccagtgacagctaaagagaaggagcgatctctttcgtcattggcagacactgaatgtaaagtatcagcactcaagccccccctttctggattaagaaggaatcctcctagaaacagttacatcctcagagaatcagctattcctattagagaagactatttcggagctaaaatttatgtgaatagaaagcatggacaggttgttagactatgcttattatgtcttttcaaatctaacaagatactataacaaagcattgattagtatagtcaaaattgagcaaatagtgtgtctcgttctatgtagactttttattgcttgacatgtttcaaattatcatgttgcagaagaatgctactgggtcatctaagaatggagttcagaatatgagtacagagaacaatgccaagatactgaaagagaaagttgcagcaagcgatataaagactgatgatcaggccaatacacaggaagcaactgttactaataaccctgttttaactgatcctcctgccacagtttctaaggtacaaggaaaaagattcagaggccgtggtcgtggtcgtggtggtagccgtagtcgtggaaaagattctgctccaacactttcaaagacagaagaaatagttcaactaacaagcgcaactgtcactgagggacaacatagtgttcctccggttgaaagtaagggtagcgatttttccaccgaggggcagcatagtgttccagttgaaagtaaggaaagtgaacctgccacagaaagacaagatagtgttcgggtagaaagtaagggtagcgaacctgcagagatcagattctttagtccaatttggttctccttaattgcttcccatgaccagtaagtgttgggtttagcttgtaacatatctagataggacttgtcatggttgaaaagtttgaatctttgctcaagtatttgatttctctttgatataaatgcaggaaagtatatccacccttgcctcagctatcctcacgctttttgagggttaagtatgtttcattgcctcactattttgttacactttttctatttcattacatgtttatgttaggcattgtaatctatgctaacactctcattaatattctgtcataatttttgcagacatagtcttgaaatgaattgactgtgtatactattctctattcataatagactcatcaatttagcgttccttaaattatgtttcaagtttgatatttattattactttatgcgtttcttataagattttttcctatgtgtttctctagagatgatactttaactgtctctttgatcaaaaagtacatagtgaagaaactgaatctttctagcgagtcagaggtaattacttcatattttgctataaatttttgacaagttttaaccacatgaattgatatagtttcataatcaagtcttatttagtatttcaaactaaaactgttatttttgtgggacactaaattaattctcttaattgtcaaaactcttacaggtagagattttactgaaaggtgaaccaatgagttcaacactacaactgcgcagcttgctggacatctatggccaatcaatgtcttctgagaatatagagacgtcaccgggcagctcaggcgaagatgtggtgatggatctaacctatgctcgaaaagctcagtcttgagtaaatcatagtcatatctctttttctatgaacagcagttataatttggagtagcatcaaggatttcagtcagcataaacaatttcatgttatttatttgtgatcctctcttgccaatgtttcctaattggttttccttttaaaacaaggtaaatgagctgaaagtgaataagtgaagctagagtaatgatttctcattacaacaatttcatatctggtttc

SEQ ID NO: 109706 - DNA, 619 bp, Cannabis sativa
  modified_base (405)..(406): a, c, t, g, unknown or other
ttattcagttgttataatatatatatgtgtgacgtatttatatctttatattatattttacacttaattatatttcaacaaatattatatgattcttcttctttcaatatctacagagataagggacctagctagctatagcactaagctatatatatatatatataaatataaatataggtttgccacattagtacacatattttggtacttccaccaaaatcttatatacctttaagtaggccatgttagctttatcacattatatatttattcttaattaaaaatatgaaagttattagtgttatttcttattatataattattattagctatagtgggaatcttcaatgtttgtaaaatttcgtatatgtcatcacattaaatatattattattattattnntattattattattattaaaagtttccacttataaaacaatttgttaatatggataagagcatatatattattattgtagttgtaataattaatattaattaaccaatgtcaaattatacttgcaagagtactacaagattaaaccctagaattatttatttatattaacttctagaataaaataattatgttattaattaatttatttattat

SEQ ID NO: 109707 - DNA, 840 bp, Cannabis sativa
agccttgaggaattgactcaatttattcacaacaaaggcaatgtctggtcttgtcattgtgagatattggagagccccaattacactcctatattgtttggcatctgcaagaagctgtccagaagtgagagacaacttggtattagcacacataggtgtagattgtggctttgcttctgtcatgtttgtcttgttgagtaaatcccttatgtatttttgctgagtaagatgataagtagtgccatttctaaaagcctcaaaccccaggaaataattgaccgatcctagcttctttagaccgaactgtttttgcagattgtctatgatactctgaacttgcttgagttcatgaccagcaattaatatatcatctacatataccagtagcatgatgagtttcccatttttgttgctgtagaacaagctattatcggctttggagtgctgaaatccttgctgaagcaagaattgtttaagttgttcaaaccaggttcttggagcctgttttaatccatatatgtctttatttagtttgcaaacataatctgggtgttcttcatctacaaacccgtgtggttgactcatgtaaacatcttcgttgatttctccatttagaaacgcattgtttatatctacttgctgaatatcccagctgtaatgagctgcgagagtaaacaagatttgaatggtgcaaggctttactaccggactatatgtttcaaagaagtaaattccttgtgttttttggaaacctcgagccaccaatcttgctttgtgtgtgttcacggatccatctgcgttatactttattctaaatagccatctattagtaataatagt

SEQ ID NO: 109708 - DNA, 634 bp, Cannabis sativa
aaccaaaaccccacacatgaaaccttccacacctgttctaagcatcctaaagataaatttcaaagtaacaaaacacaacttcatgtacaaatacaaaaaccaccattgatgagccaagcttgagttcaaaaactcaaagcttgctcatcctactaactagctatcaaaacctactcaaatcaccttaaataaacatactttaactactgaaaacataattaaactccagcaacaagaacagtaaccaaaaacccaaaaacatgcattaatctttttcttcaaaaataagaaactaaagagggaactacaagaggcatacctagagttcaagatcccttaaaatctgctggaaccaataagaaaatggagaaacacacagcaacgccagctggttttgagggtttcgaaagagagagagaacttgagagtgaaatgtaatcttttagaaatttcttattttcttataagatgaataaattaatctttattatcatactaatatcagcttataactcataaaagaaaaccaattaattaataaaactaagtccactaaaaagacaaactactaatggcaaaaagactattttgcccttcccctaccaaaaccacttaaaaggcactaagggtattt

SEQ ID NO: 109709 - DNA, 592 bp, Cannabis sativa
  modified_base (41)..(44): a, c, t, g, unknown or other
ttcgggtttggttcttcgtcttggttctggtcctagtctgnnnnccaaatctagacaccgactactggtctgttccaggcccccttacccgaatgtcgagtcatgatctgaatcactgtcacgggtcgcggtctggttctagttcatgtccgaagtcccatttctatgtttgggttcaagatcgagactagggtgcggttctaggttccgacccaggttctgtgtccatagtttggttccatgtttgggtctgagttcaggttcgggtttcgtgtttgggtccctagtccaggtttcgggttggatctgggtctggttgccaattcgggtttcggacttattttgagttcggtcctggtccggttacggttctagatctaggtttaatttcaattatgattccaagtccaagccctagttccagtcccggtaacctttcggttttggttccgattgtgggtcacatggtacgagttcgtgtccagttttggggttgggactgggtttaggtccaggtgtgggttcgggtcattgtcagtggtcgggtccagggctggatcccatagccagacaccgactacgggttttgtcc

SEQ ID NO: 109710 - DNA, 833 bp, Cannabis sativa
tccatcattttggcttcccctaccccttcatctctctcattctcaactgcctttcctctgtctcttttcgtctccgcattaataattgtctctctcaccaaattctccctactcccagaattcgtcagggtgatcctctctcaccctatcttttcctccttgttgctgaaggcctctctgggatcataaacgctaaaacccactctaactctttccatgggatttccatttctcgctctgctcccactatctcccatcttcttttcgctgacgacagtcttcttttcactaaggtcactccctcctcagccatggaaatcaaggatattcttaacctttataacctcgctactggccaatctgtcaatttccacaaatcctccatccttttctctcccaataccatttcctctgattgtcgttccttcagggatactcttcaccttgacgataagcctttcattgataaatacttgggtgtccctcaatgtttctctaggtcaaaaacctcctctttcctgtttcttcttaaaaaagccagctcaaagctttcagtttggaatcaaaatctcttctctagagcgggaaaagaagtccttctaaaagcggtcattcaagccattccttcgtatgccatgtcctgcttcagactccctgtttctctttgtaagcattacaccaagttaatgtctaaattttggtgggggtcccttggccaaaaccataagattcattggaaaaagtgggacaatctctgcacttccaaattttacgggggtttggggttccgaaacattgttcatcacaaccaagccatgctggccaagcaggca

SEQ ID NO: 109711 - DNA, 2820 bp, Cannabis sativa
ataattcctcaattaactcataattatctagttagggttttgctaatccttttcttaatcccgggtattacaaactcattatctaatcttagaccaaacctagcaaagttatgagcaacaacattagaattacgacccacataccctacttaaagtcctggactaaaggataacgagtttttaatacaagaagtaaatcatccaaaatactaacattccaattacaacccttgagcttatcaactaaaatgttacaatcagtcaagatagcagcaacatgcaatctgatcagctaagaccattgcacaccaagcagaaccgcttttacttcagcaattacaggggaacattgccaacaatcagtttaataatccctgccacaatctagttagattcattaatcactagaattcccaaactgtgctttttccttgcattgtcgagagccgcatctgtgcaaatctgataacaaccattcaagcaatgtaccaaatcagaggatggtatgttcatcaaacttttttttcaagagaacaacgctgctgagcatccaaatatttaagcgaaaaactattacaccaagcaaaaagctcttgaggaggagtagccaaacgattaaaaaatacattattctgctaattccataaagcccataagaaacatagcaaaatatcaatagagagttatctaaattagcaaatatattctgtatatagtgcaaaatgtcaaaatgcctattagaattataaaaactaacaaaatctgaggccttccaagctttcctagctctagtgcaatcaagtaaagcatagaggacacaaagatgaaaaaataatatgccgttgggaaagcaactctgccacagggatagagttagacacccgccaaataaaatgcttaactttaaagggcaccttagaattccatatcttggaccaaaaggattttgaggtttgaaaggatgaagaagaaggaagatccctccctgataaagtaagatgatatgtcgatttaacactaaacattagaactctctttggcccaaataagatcatctttactttttaccccacaaataggaacatccaaaatttattcaaccatacatccgtcaaaatggtctttaagtttattcaaatcccatgccccagaatcttcaataaagtatggaagcttggtagaaggaggctcaagattttggacaaatcatttaaaccttgtagttgggatccaatgatcctgtaacgtatttatggtttccccatctacaacttttcaaatcaaacatgaggccaacagatcccttccccaaaggatacttctccaagaaaatgagggattatgaccagtcttagcctctagaatagaggtcttaggaaaatagcgagctttgagagtaaaactaagcaacgaattatgattatttaagattcgccaagcctgttttgctagcatagcttgattaaaatgagtaagagatctaaagcctaaaccccccacaaatttaggttgacaaacacttcgccaactcttccaatgaatttattttgaatctattgaagatccccacaaaaatctagccatagcaccctcaatatccttacagagcttgacatgcaatcgaaggcaagccataacatagggtggaatagcctgcaccacgactttaagaagaattcctttccagctctagaaaaatgtttggagtgccaataatgaagaatagaggagaccttatctttaagaaaagagaaggagtgatacttagatcgcgacaaacattgaggaagccctagatatttgctaataaaaggcctgtcttccaaattgaaagtggcaaagaaaacatttctagtattcaggggaacattgggggaaaacaggatagaggatttggcaaaatttataatttgacctgatgctttagagtaaaatgaaagagcatcactaagagcagcacaagaggttctatctgcagagcaaaaaatgaggctatcatttgcaaaaaaacaaatgagttaatgatggagcacgtctagaaatagagattcccttcaaaaggttgctgtattgtttagccttaaggagagatgataagccttcaacacaaagaataaaaggataaggggataaaggatccccttgccttagacccctagtcgatttaataagacctctaacaaccccattgataaaaaaagaaatagtagaggtagagatacacttcataatcaaagagacaaaatgtaaaggacaattgagatgaaacataatactctcaagaaaatgccactcaaccctatcaaaagctttgaccatatccaacttaagggcagcccaacctatcttcccttgccttctagagttaattgcatgaacaacttcttgagtaaggaggatattgtcaaaaataaccctacccgagacaaaagaactctgggaaggtgacacaattttgtctaaaattaactttaggcgattagcaaggaccttagaaatgactttataaagtgtattacataaactaataggcctaaagtcaaagatggagtgagcatgttgctttttaggaataagaataatgagagttgaattaatagaggaaaaatcaactccattattaagacaatcaagggctacattcacaagaaccgctccaagggttgaccaatttttttgaatagaaataagcattcgggccatcaagtccaacaactttgttcccagacaagtgaaaaagagctcttttaacttcaccagcactaaaagactgtcctaagattgttgaatcatggtcatctaggggggggggggtcctaa

SEQ ID NO: 109712 - DNA, 626 bp, Cannabis sativa
aagaaatgccaaaaatttgaatggccgaagaatgcgaggaggtatttaaaaaattaaaagagcacatggctaaacctccaatcctgtcaaaacccgttctcagagaagacttgttactatacttagccatctccgagaatgcggttagtgcagccctagtccgggaagaggaaaaaactcagcaccccgtgtactatgttagcaagcgcatgataggggcggaaacacggtatccagtgatcgagaaactagtttttgcctcatgatagccttaagaaagttaagaccctactttcaggctcacccgatcaaggtgttgactaaccatccactccgacaagtcctacagaagccagaggcatccaggagactccttaaatgggctatggaattaagccagtttgatctacactatatactgcgcacttccataaaaggacaagcgctagcggacttcataacagagtgcaatgaaggagaggctagtgcaaacgttccaacaccacgaaccccagcatggaatgtttttgtggacggtgcctccaatgaaaacggatctgaagctgaggtagcaatgatatctccgaacagacttcgaccccaggcgaccataggttttgaattca

SEQ ID NO: 109713 - DNA, 762 bp, Cannabis sativa
tggaagctaaattatcccctcccactagtaaccgccaaccttgttttgctaataacgaaagattgaaatcacgaaagtcccgaaatcccatcccaccatcgaacttatgagaagcaagtttatcccaactcaaccaatgtattccgttggagttattagacttccaccaaaatctactaatagcactttccacctgttggcaaattcccaaagggagtaagaacatattcatagtatacgccggcaaagcttgaacaaccactttgattaggatttccttgccagctcttgagagaaatttattatcccaagtctgaatcctcttttgcaccttgtccaccacataactgaacgctgcaatcttatttctgccaatagagctagggagcccaagatatttgctattttcctcagcctctctaattctcagtcgttgaaaaatagcttgcctcattcgactattcgtattagtactgaaaaaaaacagaggatttgtcaaaattgactctttgccccgaagcatcagcaaagagatcaagcaaatgctgaacattagcaacttccctctccctggctcgacagtaaagaaaactatcgtctgtaaaaaacatatgtgatacaataggagcaccattggccactttacacccatgtatgagcttcctttcctcaaagctttgaataagagctgacagaccttccgcacaaatgagaaaaaggtaaggcgatatggggtcgccctgacggagccctctactagga

SEQ ID NO: 109714 - DNA, 2704 bp, Cannabis sativa
  modified_base (91)..(91): a, c, t, g, unknown or other
ttagctattaataaatattattttcccatgtaattactaactattttaccaaataagatattaggttttcatatgtaattaccacctcatntccaaacacaccttgcattttaaaatataatgtaattactaaactgtgtaattactaccctaataattaccctacctagtaattacacagttatttccaaacacaccctaagctaaactttatctcttaactaaacattttttattattattttttgttgttttcttttctatttttccattatctatattaataaatatataaaataaattaaataaataaaatatattaacaaatataatatttaaactagagaaaaaatagaatagctgatatatggtgttatgtataagtttgtatgtaaaatgaaataaggaaaatgaaaagtagctgattgtagtgctgtgcagttaattttagacaattctttatcaatttcttcaaactttattctatcctagaaactagcaaggtaagaatcccaaacataaaaaatgataatcataaagaaactttcacaaatcatactctccaataactcgaaaggaccaaccacaaacaccacattggcagttattctaattcccagaatgttaatgatcctctgcttgaacaatcaaaaataattggattaaaaagttattttccacctaaaaacagcattaaatggtcagaaaaacattcaacaatatcccacctaaagactaattccacaattataaatcatttcttctccaaaaaaataaaatgacaaaacattatccgacatagttaaccctaacatgtaaacacactaacttaagggattctcgtgcaactggaataagaatgttgcggtcataactagcatttgtcgattgtttgtctaaccaatgtttgttctcatatttaaaatcctaaaggaattaggaacttaattgacttggattagtaatatttcaatcagaatatatgcgaacaattccaagaaataaaatttgagtatccgtgttaaataagacataacaaaatcagcacaagtaaaaactaaaatgtgaatcacacaaataagatccaaaatactgtaggtaaatttttatgcacttgtaaggagtctgtcaattttggttggctatacattggtatacaaactcacacagaaaagaaaattcatcattgcacaaagctaataataaacacctttatgtgaacttacagttgttttaattgttgtattggatcacaacaacatgcatgataagcttaaaaaaaaaaaaaaaaaaacaaaaaacaaaactcaccaattctctggcattattatgcaaaaaaaagaaaaggtcaagaatcataaagcattgcctaacaaaaacctataaacaaaatagtaaacatgatcaatttaaaaatggagtagcgacccacaaattactaaaaatgtcatacatcaaaaagggaacaaaagaatgacgagctatatgaacactctgtgaagcagagctgagtataggcaattcaacatagtgagatgacaattctatggatcaaaacatacagttacacatgcttgaaattaaagttctcaaagtaaagtaaagtagggagaaaatattacaagtagaaggaggaacagcatcctcttcgatcaatctctattctcaaatccacgcagcactgcatttgcagagcagcaaatactgaaagccctgctacccaattcaaagctcgaactcttcatccctgagagccagctctgcagcctcttcatcctcctcatcaagaacaaagtactcatttttctccaccggcctaaacatatagaacatcactatataaaaggccaagcttgcaatctcctcagccgcattgctcacccactggtacttgtaagccgcaatggtcttaagagcgaaaaccacgatccgtgtgaagtacaagtacccaattacaacaatgtaaaattgcctgaaaagggtcaacttggccaagttcctggcggctttcccgtcggttttcgaagtctctctcaacgaccgaatagaccaaacaatggggaaaatgatagcacagcagcaaatgatgtcaacgaataagaatacctggttccaagtaacccagtccttgataaaaggtccggtctcaccgatcacaaccgacgctacattagcgaggacctgaagcgggatcacaatcatcaacaccttcttctccttctcttgcaagaagggtttcaaaaacgaccacccagttccaatcaaaatgatcacagtgaagagcaaaacgacacgaatgaactgaaaaatatagaacagcacatcccacccatggggggttccggtgaccttaacgtaatgcttatcctcagcggcacagatgagattgagagccttcatcaatagcaaaccggccatcaagaaatggatcctatgcacggagcgcttgttattgtagaggatgtagatccaaaaccctaggaagcctaaataagcaaaggagaagacgaagaagagggatgggaggtgggtgaggccggcggagaggaaatccttggagttatcgctgtcgtagttgaagacctcggtacgaacgtccatggagacggacgttccaggggcgcaattggcgaaaaataaactgtactcgttgggggcggtaaccggatacgattggttgaaggaggagagaggcggtggggaa

SEQ ID NO: 109715 - DNA, 538 bp, Cannabis sativa
gtgcgactccttgaccggagaaaccaacagggggttagatctatgagctagagccccatcttttcataggaagtcttgaataagatgttggaagaggctccattatctatcatgattctggccaccatcttgttggctatctagacctccacgaccaacgggtcattgtgcggaaacctaatcttgacagcatcttcgtcgttgaatgttatggtgggctctcctgcctgtgggattttaggcttcctttcttctacagccaggatcacttcttcttgctcgtgttgtgcttttcgggcatacctctcttgagctttccccaaatctccaactatgtgcgggcctccaatgatgacttgcaaatgtccatctacttgtggaggtagcaagtcttggttattatcacccctttgactctgatcgaccttgacgtacttctatacatgcgggttatttttccttatcaggaattcaatttcccgcttcaaattgttgcattcattggtgtcgtggccgtagtctccatgaaatcgacaaa

SEQ ID NO: 109716 - DNA, 823 bp, Cannabis sativa
tgcggcgtaaatacttaagtttaaatcaaagttgcaaataaatacctaagtaaaaattttggcggtaaaaatatcttctgttagggttctgaaacttccgtaggtacctttccgttaagtgatatgtaagtgtccacatgtcatcttcgcattggtccacatcatttaattattatttttattatttgaaattcattaaaatatttaaaaatcattttaaaattaaaaaaaaaattagacctaattataaatttaaatatacaaaataataataatgaattaacattaaaaattataaacaaaaaagaatcaaaaaaatcaaaagaaacctaaaacttaacctcgaactcatctctctcttctcacaggtttcatcttcggcgcacctccactcgaccctagtgaggcattctaccacaaccgatggacgagattcccaccaccaggatcgcaagcaccagagcacactgaagcttgttctccctctcgatctcgcttgagttctctccactctctcagtccctctctttctcgatttctctctacttatagtcgaacggagcaactccaaccatccatggcccaaacagactttaccacatctaacggagatacgggtgaggcgtagacaagatacttggtcttagttgagatctgggcatcaacgacatctattgtttgtttattgcatcccaatttgagtgaagcttgttctcccactcgagctgggaagcttgagtgctggggttgcaatcgcacaagaggacgacgatgatgtttctgggcagactgttgaagcagtgtagaagagaaggcttctagg

SEQ ID NO: 109717 - DNA, 908 bp, Cannabis sativa
aaggaaaaattctcaaaatgtttcgttttaaatataatttagcatcttattcttatgtatgatcctacaaatccatctcttatttcattctcttccctttaatatcttctatctaatgtcctctaaaagtatcaatcaaattctcttatcaacaaaaacagaatttagctaaaaacattactttaattgagtcaatagaaaaactcctaacttttcaaccaaacaataaaatcaaaagctgcccacaatacagaatcataaataaagcataagaaacaagccattaaactcaaaatggacaattcacatagcaataaagcaatcaaacattccattcaatacaaaattaaacctaaattgtaaatgtcatctcactcaaactaaccaaattgagtacacaacaaattatcatcaagtattcaattttctcaaaagtaccttctcgttaagagagcatcgtgattgaacgtagttctgggcatcaaatttatcagacttgaagaaattaagaccttcttccaacttagcaccgttctctttcaccggagtacctctagaccgagctgtcttcgccgaagccatactcagatcccgatcagatcaaaatcaataaataaataataataatacttcgaaaattagggttttttgggttgaattatagaatttgccaaattgagatccaaccaccaaaaattctgaaatctatgtcttctccaaaggaaaagagagagagattaggccatcgaacctaagcaagagcaaaaatgcattaggagagagaaagtagagagagagagagagagactgttgtcttttgttgttttacgctttggtttatcttttttgtttcagtataattaacacaaaaggttgacttttatttttcatttatttcagtctttgac

SEQ ID NO: 109718 - DNA, 874 bp, Cannabis sativa
agcagtcaaatagttgatagaacagaaagagatatgattgatagaatcaaaagtgtatggcctaaaaaaagtagtataaaaaatagaatatgatttgagaatttgtattaggagtatacataatgtaattgatgtatatatatgtttaagaaaaaaaaaaaaaccctattgtctcccttccatatattcagataatctaattagtttgactcataattaatttcattaaggtgctaaatgatattttaaataattttcattgtagattcttgtactaaaacaatttgcgttttacttctgtaattctgaaaatggaaaaaaaaaaaaatacatgaaatgaaatccataaaaagagaagggaaacttttatagatatatgattcctgtagcaaaccttttatcaaaaaacttaaaacaaccataaggcataaagtaccgattacgatatttcagaagtttagtacaggaaccctctttcttatacatgcatttatttatccatctatatgctttagcttatacagtgtttacatgctttcgttccagaaggattttatatataacctctattcaactgtctcttcctactacattatctatatatatatgtgtcaaaagcaagtcttgctatataatcacttaactaattgccaccacctcctccacctcttcctcctccttgaccgccgccacctttaccccctccagatccacccccaccaccttttcctccaccgccaccttggccgccaccaccatgtccccctccaccgccgcctttcccccctccttggcttccaccatgtccaccgccacccgaaccacccccgcctttgccaccaccttgtccaccgccaccccaaacacctccgcc

SEQ ID NO: 109719 - DNA, 521 bp, Cannabis sativa
aaaaaaggaaccaccttttcaatatctttgccatttcaaaaactctaaaagtttctcaagcttttctgcggaaacccagatttacccaaaaccttgcatgacatctttgtcattaacattttttttgcaagtttcatccgatttaattttcgtcattcagagggatgttcgcgacgttcgctgtttcgtagattacagaactgctcatcgtctcaaaacccaacttcgaacactaagttatttttctccttattttcttacatgattttaattttgcatttctgggtttgattactaatttcttagttagcacctttgttacttcatttggttttagaaactttagggttgaattgtatctaggtaaatgttaaggtttaggcaaaacataggttttcgagatctccactctaccaacttctggtttgataaatttcttccaggaattgggattgctttctccttgcagcaatgtcccaatctggttcagaagtttgtcgtccagaagatttagaaataga

SEQ ID NO: 109720 - DNA, 951 bp, Cannabis sativa
atatcatcggtccagcagttcgatgtatagtcattactacatttgatgctagtttactttactaatgccttgaaaaagacattttgcttatcgaagtgtaagtaaaccttatcactgattataacgtcagtgtaaatctattgcactgataaatcctgggactaaataatttgaagcatataatcacaattactttctactatgatgacatcactctaattgtgaataactatatgttcggaattgaatataacttatatattaaatatataatcatgtataaaatatgtgaacaaagcatatgacaaggtcaagatatgatttttaatctttattgaaagtaaataaaataacaataaaattgattttatttaaggcatgaaatcccaacagtatttgggtcctcatgtagacccgcattcgatagggtttttaaatgtgaaatagcccactggtggggtaaaaatatattataatattgactttgggcccggtgggtgaggctcaatttgaggagtaaccgtcattcgtacggtgccataccatttaatggtgatggctggatgtccgtcgtcaatcatgaatagtagatgttagagtagtggacgttgaacaaaaggtagtttatttttttgttgtgcacctttcctaggtttgacacgggggacaaacccgtaattctttgagattttgtgtcagaggtgtgacatgtcaaatttatcccagacgatcgacgctccgtgataccgttttgactgctcctttgggatacctgtggggttatctgtctatgcttttttgaatgctcgataatttggttaagtgtcaatattctaggtctacctgtccgctctatccgcgacaggttcatggttgaatctagatcccagacacttttttcttggaccaagctactaatttgtttgggtcttgtgaatgggcctgcaagca

SEQ ID NO: 109721 - DNA, 767 bp, Cannabis sativa
tatgatgaataccacattcagcaaggtaattggtgaaggatctaaactctcctccccaatcggtttggagagttttaatgtttttaccaagctgtaattcagcttctgccttaaaatgttgaaaggttttgagggcatctgacttgtttttgagaaggtaaagccaagtgaatctagaataggcatcaacaaagtgaatataatatttatagccattaaaggatggtgtatgtgatggtccccagagatctgagaccaccaactgtaggggctcagaaatgatagtttgagatgcctttgggaaaggaaatttatggattttaccaagacagcaagcagagcaaacaaaaaattcagattctttattaacactagaaatgttacaagattttaatacggtttggactaccttctcagaaggatggcccacaacctattgtgccatagagtaaaatcattttgtacattgttattacacttaaaacaattagacactttgatagtagaatcatttagtgtagcaacaaaggtacatttagaatttgattgaccatggctgctgcaaggaacatttctggtttgctgttgactttgctgctgtaagtcttgggaaaacagggaggaaatagggctggagtgaacaggtcctagttgggttggatcaaaagtatataggccattcttgtgcatccccatcagcaaagtagaatgattcattttgtccttaacataacacaaatcagcatgaaactcaaaatacacattat

SEQ ID NO: 109722 - DNA, 553 bp, Cannabis sativa
gtctctatccaagctattcgtagctgcttgcctctttgttccatttttggaaatctagctcaagactgtcgttctctcatgctttctatgccttcaataaaagtctgttttgttaaacgatcaacaaatcgtctagcacatgttgttgctaggatgtcacggtacttatctggttgtaatatttctgtgtctaatgctccagttgctattctggatgttttgtactcagaatgttaatttaatgaagttgatatttcatcaaaaaaataacaacacataaataattgtgtaatgatctaacttaatatacatcaccatgttgtgacaacaaaaataaaaattgtaaaacaacacactaatatctcacaaatataataataataagggtaaattgcgacataactacccaatgttttgggtttgtaagcgataggtacccattgtttatatttagtgggtaaactacccaatgtttacaaaatagtaattccgtctcattccgttttaaaatttctgttagtcaacttaagtggacatgtgtaaggctaagatc

SEQ ID NO: 109723 - DNA, 860 bp, Cannabis sativa
ctttcttggttgcgatcttccatgtctgaaaatgttcttgcttctgttgccaattacgatagctcctacgcggtctggcgcgctcttgaacaaaaatttgcctcacagactcgagctcgaagactccaactcaagggtcaattctctcatgttcacaaaggcaatctgtcaatctctgaatttgttgataaggttcaaagtattgcagattctctggctatagcaggttctccagttgatgatcaagacttggttctacaagttctcaacggtcttggacctgaatttgattcagttgtgtctggcatcacctcccgaagcgatgccctgacaattgaagaagttcaggccttacttctgtcccacgaaagccgtcttgaacatcatctggccatgaatgacattaatgtcaaattgcaagctaatatggctctcggcaataatagatcatcaagtgttcgatcttttgtcaacaacaactctacaaattcatctgccccttctacaggtcgtggcagaggcttttcaagattcccaaatcagagagttgtttgtcaagtctgcatgaagataggacacacgactgccgtgtgtcactatcggtttgacaagaactggacaacaccaaaaccaggtaacaatactagtcgtgcatatcttactgaacttgatcttgattgtgatcctcaggcatatcacacaaccatgattcaagactttggagatgatagttcctggtatattgactctggagccaccactcatgttacctttgatcccaaaaatcttgatgactcaaaacccttcactggtcctaatgctctagcaattggagatggtaagaaattattaatctccca

SEQ ID NO: 109724 - DNA, 618 bp, Cannabis sativa
tatggttccataacaaacaagtaattaaacaaaagtgagcaatttttcactattcctcatatgcgccaacataaataaataaataagtcaattagacaagtggagcaagctaataagaacaagtcctccactttaaaagtaaaaaactatttcattataggctcaagcattagtgacattgactgtggtccccaaatgaacttacataaacaataaatggaaattgcttagtaatttcccaaatgaaatacaaggattattaggtcagtgtcagtgccaaaatttgtccggaaatcactaagttttatatttttacaaacaagtctgccaagattcgctaatagacaaattacttgggttggaaaattctaaaattcacttcattctgctgcaacaaaaacagagaatttccacttaaatccatcatttgatgttagtgtaacagagatattccatttccataaacattttttctacaatataatgtagcataataagcaggcattcctatgattaatgtttccattttttagagtttataatttctcagagagactaagcaaatgatctctcatgtctcaacctcaatcactcaatgaaaaacataacaaataacag

SEQ ID NO: 109725 - DNA, 2207 bp, Cannabis sativa
atttgatgaaaagagaacttctcgcccatacaaatgggcccagcatttagcaggaattgatttattgcctgagctgtcacctttgcttactcgacatggaactccatgcagtgatgttgcaaaaggtgatgctgtcaaatctgacctttctatataccgccagcagaatcgtgtgttgacagttgttcaaagaattcgctcacggaaaaagggtcagctggctcttgtggaacaacttgattcacttatgaagcttaaatggcctgctttgtcctgtgaaagtgttccatgggccttgcattctcctctgtgcaaattcattggttgttcacccattggtccccctcctaataatcatgcttcatcttcatctgtatcagattcggggcaggttacacaacctatagaggtcgttgaacattctggtacttcaaaggaggagctagagggtatcagggaagacggggagcttccatctttggcttcagttacatctagtgatattaaattggctccatcaaaagggtcaaatattgaacattcgaggcagctgtctttactttcaaagagcgtcctaactccaatcagcaagccaaaatcacaaagttacaagaaacacgatgaagatgcaaatcttttgctggactttgagagtgatttggatgaacctacatacgttgagtcagaagaagaacatgtggggcacattaattgctttgagatgactagaaaatgggttagttatggaatcagggaattttctcttgtcttgatcaggaacatagacaccctaaagaagagtttcaagttggaagctaagattaatatcagtgtggagtaccctctgagacctccctttttctcattgaacatttacacttcattcgaagaaaatccttatgaggatgatggttctgaatggtataatgaacttcgggcaatagaagcagaggtcaatctccacatgctgaagttgttaccacctgatcatgaaaattatgtcttagctcatcaattacgctgtttggccatgttgtttgactattacatggatgacatatcctcatctgaaaaaagaaagactatttctgtagttgatgtaggtatgtgcaagcctgttaatggtcaacttatatcgagatcgcatagaggaagagatcgcagaaagatgatatcttggaaagacatggaatgcactcctggctacccttactaagaagtaagcactgtatttctttggttactgtgttgttttcagttcaagactgaagaagattgaagctgttgaattcaagagtttggaattccattaatgagctctgggatcctcttattattttatgtattgagtatttatgtgtttaaatatattgatttggctgaattttgtccctacctatacataggctgaattcattagaatcctagtctcttttctttggggttgccttacctagttgcaaacttggtgaaagtgatgtaatcttgtatgtttcatcccatggattataatctgtttttaatgaaggagcccattaaacatgccactgttgttccatcttctatttcatttcctataatccttttcgaattaatgcattttctcttgaacatttgaagtgagaaaattgatttttgttttacttgaaactttttgattggctgcatcaactaacattcataacctgtaattgaatctattgatttagaagcacatatcatttgctatagaaaatgtaatgtaaccttatgcggatcaaattggagttgtgaattacactagatgataatatactctttataattgactttaagatatcactattattttactttctactatttatttcgtttacatctaaacaaaccaaattattattctcaaattaactaatatctctttttattaaaaaaaaaaacaaatttgtggagtggaaaagagaaagcacaaattgaaaccatatcatgtatcaatgcactgtgggctggactcaacttctttcaactctctctaagtatccaaaatttagcccagtacaaaatatgacacgagtcccacattgctaagataacaatagttacacttgtttatatatcgttacctcagacacttagcttgtcccttcggggacatccgataaaattggaacgatacagagaagattagcatggcccctgcgcaaggatgacacgcacaaatcgagaaa

SEQ ID NO: 109726 - DNA, 1219 bp, Cannabis sativa
ggaagaactagacaaagagtgagtgccaatatgagagatgggaagtctcttaccatttccaacagctagggattcagaacctgagtaaggatgttcacaatcaaggtgttccatgcctaacgcaacatgattggtggccccggtatccgcataccaatcaagatcaatgttgggatcgggaaggctagaggtgagataggcgtgaggatcatcagtgttatcaacctcagacaagaaggcacgggagtcaccaatctttggggtcacaaaagctttatcaaaacggtaatgacaaaccgcagccgtgtgtccaatcttgtggcacacttgacaaaccagtcttgaattggggaaattgcctctgccaaacgttttccctaatggtctgttgggaaaactttgggtattaccacggcctgggttcggagagaacctgctttggttgaatcttgaagaggaagttgtaagatttgcagtgatattgggggtgcgatcctcagtattgaagtggcgttccaatcggctttcatgagtaagaagaagtgactgaacagattcaattgatagattatccacaaggctcgtgacatggacgacgacggggtcaaactcaggtcccaatccattcaagagatgcattatgaggtcagtttcctccattggatggccagcagtagctaaagagtcagcaagaactttaactttatcatagtaatcagggattgagagattacctttccgtatggtggagagttgcgatttgatctgaagaaggcgagccttggattgactggcaaagcgctgatcgagagctctccagagggcatgggaagagttatgctgggctaaagatccaagaatcgtctcggacatagacgatcggagccagctaaggagaagttggtctttccttctccaagaattgaattcagggttcggggctcctgagattaatcgttcgggcggagggattccagtcaagagcagatcatcaaggccatgccctatcaccgtgggaagaacctgcgacttccatggcaaaaagtttgagcgatctaatttgacagtgagggaggagttgagggagctctggaaaggattccattgttgtgtgaccggaggggtggtgggagcgggagcagtgggttgttgaacagaggaacggggtggattttcagggcggctaggatccatttgcgacgtttgtcaatggcaatct

SEQ ID NO: 109727 - DNA, 1126 bp, Cannabis sativa
atttaattcatataaaattttaatcaattggactaataatgcagaaagacttcgtattttggggtattgtgatcaatggtaatttagaaacaagacttggaattttttttttcatgaaaatatgattatattatgaaatttattgagcacattgttaatagtatcatatatacttatataattcccaagacttacataataaagccatacataattttttagtcaaaaaaagatatgtagtaacaatgaaatcatattgcaatgcatggaggaggattttgtttgccgattgtctttggcttcacatttttgcattgagacgtaatacgaccttctggtccattatattttagatcgatgttctcaactgccacattttgacatggatatccactgctacaaattaagtttatcgcaattgatgatgtagtagtaccatgaatattcttgaagctaacattactgagcttaatttttgacggaacctggaaattataaataatgggattagttgcttaattaataatgattatgtgtgtcttagataagaaatttttgaaaagattgtatttaacaaacacacctttttgttgcaattgttccatggacaatactcttgatctatgaggattggattgccaacattttccatgttaatatcctcaaaatgcatgtttgatgccaaaccatctgtagaatcgggccatgttttgattctaacaccattcattgtatttttcattgtacaacccttgaaaagtactccttcgacaggtttttcatctttatattttcccaaacttccaatactaaaaccatgtcctggtccacatgtaacatttctaacagttatttgtttactaccatctcctaaagaaacacaatcatcccctgtttgaataattgagtcaatgatgtttactccatttgaacgtccaatatgaattccatcagtattagcactatcttctggagcatctactcgaacacgtgaaaatgtaatgttttggccacccaatacattgatatgaaattgtttgctatcacgtgatattacatcttgaattatcgaattagtgacatagtcgaatctcacattctgttcatgtatacacataaataaata

SEQ ID NO: 109728 - DNA, 508 bp, Cannabis sativa
  modified_base (29)..(32): a, c, t, g, unknown or other
  modified_base (211)..(211): a, c, t, g, unknown or other
gaataacataaataacagtataataaatnnnntaaatagctataaataatttcatagttaactgataatttccaaattaactaagcgggctttacatcaaaactgccgctattgtgggtttcctgacgatttaaaagcgtcgcttataactaggtatggaaagcgaaaagtgaatccaaagaaaagaaaaggtcgccgtgagaaaagtgangttgttacaaatgaacctcaagggtcatggaagaagaagttaatattttttgagctcgagtattagaagcatttgttgatacgtcataatctggatgtgatgcatattgagaaaaatgtgttagacaacttgcttaataccgtgttcaatattcctgggcgtagcaaaggttgaatcaaatcccgcctagatttgtaagggttagggattcaggccaatttacacccacaagttgttggtcgacgaacgttcttaccacaagcttatcatgctctaactaaagcagataaataatct

SEQ ID NO: 109729 - DNA, 531 bp, Cannabis sativa
aaacttacctcttcttaaaaaaattgatgatgtagaattctttatgaagctagttaattcaaataaaactatacaaacaaaaggaatgtacattaattgagaaatgctcaaaactaaaaactaaaaattctataaaaaaaaccttcaaatgagagaaacatataagaatgtagatttaaattagagataaatagaaatgcataatgtacggtcatcaaataaagagttgtaaatacaatctttttggcatgagatggaggatgaagaagaaatgcaaatgagaaataaaatatagaaattagcttaaaagtatacttgtcttgttaaaaattcatacctcacatgtgtgtatatatataattagaattgagagagaggtataagaatttgaaatggcgattatatgagaatgaacttccaaaaagaaaaataagcaacaattacaattgtatattattcattcattattattaaaaataaattttagtgagtgctcctattaaacataaaaaaaaaacgtttgagttaatg

SEQ ID NO: 109730 - DNA, 623 bp, Cannabis sativa
tctggtgccgggtcacgagctgggtcctaggttcaagttcgggtctaggtcgggttctaggtctcggtcctagttctgtttcctaagtcgctatccagattctacgtccagatcccggttattgtgtgggtttgggtcctggtctaggttcagtttcgagtcctagtctcggttcgggtttaggtcttcgtctgggttttgatttgggtttgggtttgggtttaggtccttgtcctggtcctagtcctagttcggttcaagttccatttgcgattctgagtttgagttcgggtcgtagtttgagtcctggtctaagtttgggttcggtttcgtatttcagtctaagtttggcttcgggtgtgggttcgcgtcctcggtcttggtctaggttgggtccgagtccatagttctgatcccgatctgagtttggattcagctctcggtctaggtccttggttctgatcctggtctggttcgagtttgggtcagggtttgggttagggtctgattctaggtgtgggtttgagttcgggtccgagtctgagttcgggtttgtgtccaggtcttgaccccgatctgggtctaggttcgggtccaactcaaagtttgggtcccaagtgcga

SEQ ID NO: 109731 - DNA, 678 bp, Cannabis sativa
cttggtgattcttcaaaggatttgagaaaaaatgatttcttgctctaattatttaagaatgaaaatgtctaaaagtggttgattagggatttcagccctatttataagctaattagtgaggcaaaataatcatttcaaaatttgaatacctcaatttccccctaaaagtgtacgttgagcactcaattacctgaatggtaaccgtcaaaatgtgctaatttttaggcgtgcttcgatgcacaagtagtcagcattaatgagccaaaaattgaagagacccttggtcagagtcacattggattgtcaacagacacttcaaacatgtgccacccgtttagataaggattcaaactgagtgaagtctacgtgcgaccctaaaggtcccacgtagacttgggggaaaatgttatcccatttcttgcattctgacatggcaaaatatataagtgacacgtgtcctacattcctagcatctgggtggagatgaatatcctgaaccgacttcaagtagcacatttgctcatataacatctacttgctcgagcagggtaaatggcagactacccgagcaggggcatgtttggctttccgaactacttaccaagactagactaatgatatcgtggagtccaagcacgaagacaatccctacaatcatgggattgaattaaagggata

SEQ ID NO: 109732 - DNA, 529 bp, Cannabis sativa
gggccgagatcatcgggaatatttatccactttggttggtcaatgtgtatgaacctcgattaaaggtaagaaaagtatattgtactgcataatactttgaaatgtaatacaattagtattgttgtgaattgattaatattgagatatggttattattgttatataatgaaaagattgattgattaagcaatgataatgtaatgataccatgaatgggatatgcgggttcacctgattaggtgatgcgataaacctggccgcgtaccaggcataggtacgagcgtcaatcacatatgagtaccaagcgtaggtgcgagctcagctaattaggtgatgcgatattcctggcaacatatcgggcgtaggtacaggcgtcaataatatgaaaaatgcctagttatggcatagatcaaaaccattgttgggtttcttcctggcgacgtatcaggcgtaggtacgggcattagtgatatatgagtatcgggcataggtaagggctcgtctgattagacgatgagatatattggtg

SEQ ID NO: 109733 - DNA, 1522 bp, Cannabis sativa
  modified_base (211)..(211): a, c, t, g, unknown or other
  modified_base (855)..(862): a, c, t, g, unknown or other
  modified_base (944)..(954): a, c, t, g, unknown or other
  modified_base (1123)..(1134): a, c, t, g, unknown or other
  modified_base (1254)..(1260): a, c, t, g, unknown or other
ttgtgatttgattaaaataaaaataaaatctattgattgttatgttagagtttcaacaagtaatggatagtcaggataaggaacaaagaagccaagccaagagaactttggttaaaaccattcatatggagtaaccaaaagttttctattagaaggacaagaaaggaatttttgaaattaagtctgttcaatagacttaacaaaacttccngttcctagtattaaaggtttaagtttatctaaacctatggcttatgatatacctggtaatttacttactctagtgtaagcaacttactttagtaagatgctggaacatttttctagtggcaatctatagaagcttgtctacttctagatatagattttatttatctaagaaaaagtttcatctatttcagaaaatataaaggtcaaggaaagaattccttaggatcaacagttagaggtctcagatatgctttagaatgcattagaccagacgcctgctgttgagtgggagtaatgagtaggtatcaaattaatcccggaaagaaaatttgaagataatcaagtaaatcttaagatcacgaagagtaactatatgttagttgataagggtggtatttaatactcttagactacaccaaatcaggtttctagacttgcttagtgctagaatgtctactgatgagatggtgattactctaggggtggagttgtaatttttgagaagtgtaaaaactgatctgaatctctaactgtaccagagagactgaatgttaaagttacaggaaagataattattaagtctatggaaagttctatatagtttttcgcattgtactaaaaatttattaactactagtgttactnnnnnnnnaacacagaagtagttgccaaaaagtaaggaatctagtatccctagaggagtagacacatagagaagaatttcacaatatcannnnnnnnnnnattaaggaaatgtaatggtagagaaaagtttatattgaatacaacttgtcatatcctattatggagagaatactacatactacacttgatctggatattaagatgttgagattatttgaaatctaccttttgtttcatattagtccaagtgggagtttgttgggttttnnnnnnnnnnnnaaatccatttcaatataatcaaatttgctaattaataaagatcagaaatcgtattttatgttgcatggtttacatgatttatttcatgattatgttcaatgtataaattctattaagtcnnnnnnntatataaatatgtatatatttgtttatgattattgtgtcgccaacagagtagaatataatcatgattatatgttcaaaatgttaattctcatgatttgtcagttcacaagacttagactggcatggtaatctgcgataaggtatacttatagcttggataagtgttatgtcctttctagggcattggcaaagttcaccggcatcgaatgtctggagtatacattggaagggaccgatattaatcttggataagatatcataa

SEQ ID NO: 109734 - DNA, 859 bp, Cannabis sativa
ccactaatctacactcaaggttgagagtgagtgtatacatatatattattctcttgttatatatataaatatattatataacatgtgtcatatcttcttcttctacctttcacatatatatatacaatatatatagtgtatatatgcatatgtgtaacatatatttaatcaatctcttattttagtctttgtattatttttacaattgagttgtatacattttgattaatatctataacaaatacaacaaacttatacgctcatgggctcacatgcgagcccttatacacacccacaccatgacacttacacaaagggcatgactcacatgcgactccccaacccacgcacacacgcacacaactgatgcatggctcgcatgcgagcccccgactcgtacacacgcacgcggacacgaacacacatacaactcacgcacagctcgcatgtgagccccgacttgcacacacacatagacacaaacacacacacaactctcgcacgacttgcatgcgagcccccaactcgcacacacacatgcacattcacatgaacacaactcatggggttggcctttgatccgcttggacatatccccaggcacgtaaatatcgatggcgactttgagaaatgcagagcgcaagtaggctaatcgaatgcgcctgttaattctttggttattaggcgactgagttaatgcaaattttcataattaacaaaagtaaatgtgctttatatataccacaataatattatcgttgattacaaatacgtccattcaaaatattaaaaaaagacaatatcgtctactccaactccattaattatattgaattattttgcgacataaataccatat

SEQ ID NO: 109735 - DNA, 505 bp, Cannabis sativa
attgctgacactcatttgaaaccatccgtatcaccaccctctgatggaatttcggcgggcgttcaggttgggtgatttagttgtttaaagccatcttgaccggcttcattgtgagaaggatacgggacactcgtctaaaatcatccgatgttacaaccatcaacagggtggttacgttggtcgattaaggatgtttgaaaggtgtctgaaccgaattcaccgtcggagtgatgtattgctaactcttatttgaaatcattcggcgtcagcaccctccgatgggatttcagcgggcgttcatgttgggtgattgaggatgtttgaaatccatcttcaccgacttcattgtcagaaggatgggggacacttgtctaaaatcaacccacgtaacaactatcaactgggtggtgacgttggttgattgaggatgtttgaaagctgtccaaatcgacttcactgacgttgtgatgtattattgaccctcatttgaagtcatccgtgtcac

SEQ ID NO: 109736 - DNA, 1755 bp, Cannabis sativa
atccacataattattaatatttataacaaccttctatttttcttcaattaaaaaaattgttgccaaagacgtttttaatagctaccagtgtaatataaaattaataatttatttctatcattgtatattatcactcaaaaaaaaaaaaaaaaagagaaaagcgaaaaggcaccagtggtgccaaataccctcctacgtattaatattgctattagtctagttaagtatcgggtcccatatagtttaatataataatttttagggagtataactagctaattacaaggcgacatgtcttaagggtgttaagcaccactcgttcaatacaaaaaaaagtccaagtatacctttcttatatgcctcgtaagtaacgaccaaggcaatgaaatcccatgactaaattatagcataataaatttcaccaaaaaaaaaagccaaaaacctaacataataaataatacattaattatttcaatgtcaaacaaaaaaaacggtatgtgtttttttttttttttgaagcccccaaatttgttttaaaaacacatgttcgaccattgctttccttactttctttatttatataattttttttaggggagctctagagcttcatcaatggcggtttataatctatcaattaattgcagtccaagatttgttcatcatgtttacgttccacatttcacatgtaaatccaataagtcgttaagtcacgtacccatgagaataaccatgtccaaacagcatcatcattcttattttgcctccacaacagccgatgtagatgcccatctcaagcaatccatcactatcaagccaccactctcagttcacgaggccatgtacaatttcatcttttccacacctccgaatttagcaccgtcattgtgcgtggcggcgtgtgagcttgtcgggggccaccagggccaggccatggcagcagcctccgccttgcgcgtcatccacgcatccatcgtcactcatgaccacctccctttaacgggcaggcccaatccaacaagtcctgaggcagcgacccacaattcttacaacccaaatattcagctccttctcccggacgcaattgtaccttttgggttcgaattgttggccaattctgatgaccttacccataataaatcagatcggattttgcgggtcattgtagagttcacacgcacctttggatcacgaggaactattgatgctcaataccatgagaagctagccagtagatttgacgttgatagtcatgaagccaaaactgtcgggtggggccattatccctctttgaagaaggaaggtgcgatgcatgcatgcgctgctgcatgtggggccattcttggagaggcacatgaagaagaggttgagaagttgagaacttttggtctttatgtgggcatgattcaaggatatgccaatagatttataatgagcagcacagaagaaaagaaagaagcagatagaatcatcgaggagttaaccaatttggctcgccaggaactaaaatatttcgatgggagaaacttagagccattttcaacctttctttttcgtctatagaaattaagacgttttgttgtgaaattaaaaaaatgtatttaattatgttttatttgaaactagaaaactggctgcgcgttgcctacatagctagtctaattaagaatatatatataatagttaataaaataatttcattaattaatataataagtctgcgcttctcacaaataaaaaatatattcaatagat

SEQ ID NO: 109737 - DNA, 939 bp, Cannabis sativa
atatccgcattttgcggattggatcggatcggatactttgtgaacacccctagttaacgggcttgactttacaaccagggaatttttcaccaagtttattcctaaacctctcacaatagttttcttccaaggactatcaacctcaccagattgttgaagtgtcaatctcaccaaccgagttatttttccaccggtgccaactttacctcagctaataattttctaaaggactatcaagctctttgaattgttgaagtatcaatctcactctcggatgattgtagtgacaatctcactcttctcgggttgtttataaaaattggtgtaaacttcacctacaaccgagttatttttctaccagtgccaacttcatttctcaatacaatagatatgtcattatgaaatacaaagtaaactctctctaataagatgaaatacaatgtgaaatcctagagagaattacaaacacactagagaagataagaacaagtttaggctcaagtgtgtggggttagtgtgtatatgaaaaaaatcataaaactttaacttagaacacttagaatgatattatatgatgaataaatgctcaaccaaccttaatttttgtgagaaaaatcaatttatatagagtttaaatgaaatatagtcgtttatagccattaggatatttttcgggccttttctgccacaaattgaaagttcgattgtgaatcgaaattttggatcaatcacaattagaagtctggttcctaaatggaacttcagttgaggggcaatgagcattttgatatttttcgacttaaaacgtgcataactcctttctcgtttattcgatttcaaaaattctagttgtgttctcttaggtgacgtttgataacacttttatttttaaattttttaatcacacaaataaacgtaaaaattttgtttttaaaattt

SEQ ID NO: 109738 - DNA, 1106 bp, Cannabis sativa
ctcttgtctattgtagtaacccgaagatgaaccagctggctagagcaaaaaataatgtctacatggtaactcccaggattccacgctacaatcatccttccccctttagcccaagcaatattcgaggtaaaacaccaattcctaaacattctcatgtacaaggctccaagctttggagccttcactctcgtctcgaggagaccaaccagccctattctatgtttctcaataaagttcttcacttcttgttgtttttgtagactgttgattccccggacgttccaacttaggattctatccatgagtaagaggaggttctccccctcctcttgtatcacctactttcggccattcctcatcattcaaaatcccttcatcttgtaagtgcctctctatttcatctaacacattgaaagcatttaggatgtttgaggatcatctactatagttctgcccaattttcctccatccattagcaacctgcctaaagccatcattatccaccattttgcctttatcctctacaactttctccttttttttctctttacccactcttgttttttacctccttgcctcctacatacatctgaattatgccccataccattgcaatttttacaaacaatcggtttccactcaaaaataaccttcaccgaaacctcatagcccatttcattctcaaaataaatcctctcgggaaattcttgatccatagtcacttcaattaaaactctcggatatgcaagcttatctctatttttagtaacattatccaccatgataggctttcctacttgccctatgatcttaaagagagacctctccccccaatatttaagctctaaatcctcaagttgaacccatacaggaacagatcgcacatcctctttcctaagattaacatcaggatcccaagctttcattataactggcctcttattaaagaaaatataaccccctgataaaacttcatctctaaattcacaactatcaaatctgataatgaagataccataagagatcatacctattttatccacctttcctttccaaatccttctagcaaagccatctagaaccgagagagggggatttgcaccaag

SEQ ID NO: 109739 - DNA, 515 bp, Cannabis sativa
tgcagtttcagacgtactagctaagttgaaagaccccgatacacaggtttgtatatgtattatttggccgataagaaatacatattactggtttgtattgggagatgcaattttagcaaattactaataacttctttaaccttaattctatattcttgctttgattattagatagcctttgaaaagtcattgttagtatttgtggatcagtagtcgaaatattttagcatacttaatgtatttcgataaagcttacggctaactgatttatggtttatttttttcactttcttttttgtcagctggatattatcgaagtgcttttgaaggcatgtaactctataaaagattatgagagaaaggtaagaacagcttgatgaatagattttgtttagtacgatggaaacgaactatatggttcttaaggttttaaaattttgtttaatagatttgtccgatttatatgtctaataatgagctataacttgttcctttggcagtgcaagagaatagtt

SEQ ID NO: 109740 - DNA, 808 bp, Cannabis sativa
gtgatggtggtctgtggaggcggattgggtgaagaggaaagagaggaagaagaggggcggaaggaagaagaagatgaaatagggtatgggtatgggtttgggttagggtttgttatttttgttttatacccaaagttaaatttatttaccaaaatatttaaattaaatgtgattattttattttctaaaaaaaaaaatctgattattttattaattatacctaatttaattttacccccaattaattattttagaaaaattccttaaaatatatatactcttttagaaaaaatttatttacaccccaaaaacaaaacttataaaaacatctcattttaacaatgtttattttatataaaatatatatccttttatactatgttttttaactattttcttccaatttatattcttaaaaaattaaaataatttttctctttcacaataatttttttgaatcactttcataataattttttaaatacaactaatttataaaattatcctctaattgaaaatatataaaatccaaacttctcaattttataaattcttaaattataaatttattaagtaatttttttattatttaaatctgaaactttttcttgtattttatttaatttaatacatatttattttattaagttaaaaaaattacaattttctttttcttttttttttttaaatctaaaactctttttttattaaatgcaaagtttttttattaagaaaaaaaaaattatatactaaaacaaatatggaatactaagtattcccaacagttataaaatgttgggaatactta

SEQ ID NO: 109741 - DNA, 536 bp, Cannabis sativa
actttaccaatgccctggaaaggacatactacttatccaagtgtaagtaaactcgttgattatcatgtcaatgtaaattcactggactgataaattataggactatactttgaagcatataatcataattactttccattgtgatgacatcactgtaattgtgaattactatatgttctgaatttatcaaaaattgtatattaaaccataatcataaaaatattatataaacttaaatgacttctaatcttctattgatagtaaataagattattgtatattaaaccgtaatcataaaaaaatatgtaaacttaaatgacttctaatattctattgataggaaattgtatattaaaatgagttttatttagggcataaaatcccaacataaattcaatttaattgtcttgaacgggacaatgacatcatccaatatatttcagcttgacaagtttctatattcaagcatgtcggacgaccattgggtaagaggacatttgacaccttaccaatgataagcaagtgtaaggcagagt

SEQ ID NO: 109742 - DNA, 610 bp, Cannabis sativa
attatgattcaaatagtttttgtaaagctttatattttaaggttatgaataaagttttataaataatgagatctcatgcttagttatttttcattaaagaactctttcattgtctttatcttaaatggttttaaacggactagctagtgtgacgtctcgggaaattggggcgttacagctattcagccagccgagttataaacatactctgcaaattatgtttccaacgagttattccataccaagtgtactttcgtttgcgtatttgagttcttcgttcttcctagtacgacacgtgtcttcctctgatgtgcttaccgaatttcgagtataacaactaatatgggactaagggagatgcccaatttgcttttaggcaagtggaagattgtaagagtttgtgtcctgaaaagcttgtaaagacatttcttattctaaatgatagttgaacattttgatatatactagattgttgaattattaatatttatttttaaattatttatataaatattagaaaattttaatcatacatgacattgtgacttgttgtaaagcccgcttagttaatttggaaattatcagttaattgtgattaattatgaaatta

SEQ ID NO: 109743 - DNA, 679 bp, Cannabis sativa
  modified_base (248)..(249): a, c, t, g, unknown or other
  modified_base (313)..(320): a, c, t, g, unknown or other
  modified_base (511)..(512): a, c, t, g, unknown or other
atcctaaggaattcttttcttggcttttatcttttatggaatagtaaaaacttttccttagataaataaaatctatatctaaaagtcaaaaagcttctgtagattgccattagaaaaatgctccagcattttactaaagtaagttactcgcactagagtaattaaatcactaggtataccacaaatctcaaacctataatactaggaataggaagtttttttgagtccattgaatagacttattttcnnaattttatttcttgtccttgtaatggaaaacttttggttgctccatatgaatggttttaaccannnnnnnnttggctttgcttcttagttccttattctgactttccattactcgtttaaactaacaatggaatttcatcataagtgtctcccaagtcataacagtgtgagttctttaaaaccgtcccactatgacaaggtactgtgactttctgtctaagagcactatatggtattatcctcttcggttgtgtcaagacannagaggcagtgggatcatcttatgtagaataagatgatagaacacttttgtagtcaagataaaaaattatctcctctactttgctactttcagattcagtcattttcttagaaaagtggtatttgttaaaacatacactttcttatcttaatgaccataggatgatcc

SEQ ID NO: 109744 - DNA, 532 bp, Cannabis sativa
  modified_base (170)..(177): a, c, t, g, unknown or other
  modified_base (454)..(457): a, c, t, g, unknown or other
aagcgatctgagcagatgcgggctcctactcaacccttgccagtgcaaccagaggccaaggaaggcaaggagatgctcgcccattacatgaaccggttggttcctgaggtacgtgagcagctggccgacgctgacaacgaactaggaccgggacctagtacccgacccannnnnnnncttgaacctaggacccagctcatttcccggcaacagaaatggatccagattgggagtcgagattgggattcggatctggacccagggcttggacaaaacccgtagtcagtgtctagatttggtaaccagccctggacctgaaccctgacaaggacccgaacctgaacccagtattaaaccaaaaagtgtacctgaacccataccctgtgaccgaaaattggaacccaaaccggaggttgaccaagactagaattagacttggacttggaatcataannnnaattggacctagatccagaattgtcaccggacaaggacctggactccaaatcagacgtagacccgaattaggagc

SEQ ID NO: 109745 - DNA, 503 bp, Cannabis sativa
tagaacctgaacaagaatcgccgaaccaggacgctagaagaaaattaggaccgtgaccgtgaccaggacctagacctagaaccgaacacagacctagcctcagacccaaattgagactggaactcgtgcccggacatgatcgtgtacccagaccggaactgagacccgaacctggacctaaatctgggacccgttcccaaacacagacttggacctcgataaggaccctgatacgaacctggactcgggccaagacccagacttggatcgaaatgctggacctagatctagacggagatcctgacctagacctaaacttagacccgcacccgtgacccgaacttggacctagactcgaacctagacctagatcagggtgcagacctgtacacaaacccggacacagactaggatccgaacacaaacttacacctacaatcatacccaaagctagacccggaccctgtccctaattcgaacccagaccaggatcagaaccaagg

SEQ ID NO: 109746 - DNA, 687 bp, Cannabis sativa
ttttaacaattaatttggtattttttttccagcaaaaaaaaaaaaaaaaaaactttgcaagaaaaattctacacaattttgtatttaaaaaaattgtgtagactcatacatgttgattaattttcttaaaaaataggtatttgtgactgtgctttatttctctccaatattctttctacaagtaggtagatttctcatcatagattttttttttttgtgcaattggtataaaattcacattttacattgttgtgttatttctcgccacggtaaataatcaaattccattggatatgaattgtcacacatatattcttttacaaaaataaatcaccgaggcaataggtctataagtcacttcaaaaataaatacaaaaaactgtaagtcatttcagaatcaatgcaaaataattttgtttttttagtagtattagtgaggcccctttttgttagggtttgtcccatggtgtttcttgtgagatttgtaattggtatgaattggtccgaattgtcgttatttagttatttccttgtgagatttgtaaggttttgttttcgtctggttttttgggcttgtttctttcaccacttttaatgaattctttcaaaaataaaaaataaagaaaataaagaaagaaagaaaaataagactatgtcaacagaaaatgaatattttatattatatat

SEQ ID NO: 109747 - DNA, 525 bp, Cannabis sativa
caaaaggtgcttccagataagcttatactgtgtatggaatgtttatcttggatagcttgttattaatccagagatacactcccagacaacttaatgtcagccttgaaggtccatctgggaaggaaagccatgtatgtatccagaaggcttgtgtgtttataaagcttccaaattgttcgtactaaaagtgtgtttttcaagatgacaggggttattgttgctagtgatgagctggatcatttaaggcgatataaatatgccacgataatttaggagatatttttagcaacaatgcaaatctatatatagctttaaatctttataatttgtgagagaatcaaaccagatttgcttgtgtgaaaattgtgatagtgtaaggtagagtctaaactagagagagaaacttcttctcgtaacctctgagaagtttgtgaagattcttgtagccttgtaaacactaatatcaatgaagatatgtatattattgttccaaccgagatgtagatcattgtagatggctcgaac

SEQ ID NO: 109748 - DNA, 635 bp, Cannabis sativa
cgcggtttgggaaaaattcaaaccgcaaccgcactgcaaagaatttcaaactgcatttttttttgcggtgcgggcagtttgagcggtttgatgtacacccttagctattgcatatatgcagtgcactgtagcagagaatgcatatatcacctcagaatggtgctaccttggagaagattagccactgcatcctcaaatttgaggactccttggagttgctcttatgagtgagttgcctaatataccctcaccctccactacagtctagcacataatttacattaatttaaaaaatataatgagaacatcatctataaagtgggtatatcttaaaaaatatagaaataaaggtaaaaattaaaacagataaagtaaaatgggtatataatataattttctctatataatgtggttcaattcttaagactaattttatagagtgttgctcaatgtagaccatggtcatatgccatttttttttaagaaaaagttattttttaccaaaaaaaaaaaatcatttatttaatgtgatgtaggatcatggtggataacttttagagttgtcaaacaataattagagtattttatgtgggaaaaggacccaaatcttatgtgtaggggtgttcattggatca

SEQ ID NO: 109749 - DNA, 602 bp, Cannabis sativa
ccaatatccaagtccccttgaatcataattggcacttgagcatgacctatacatttttcttctttaacattaatctttcttaactgtgggcaggttcttttcaaatgacccactaaccccacaataaaataagatctggctctacattggctcaaatggcgccatattgcatcttgaacactcatgataaggtcaccatttcttattctcacatttaccactatcctgatcaccctggaaccttttagttctatcccataattggtggttcatttagttttttcttcctgatgtactagtaagttggcttcatatattccactacatctagtagtacaatcagaagtgttggtagtacaagaacagacacaagatgagcctattgttctctcagatctcatatctgtttatccttgttgtctattcatatcctgcatagcagaatttacatgtttccattattaaaacaataaaggattctcttccttaccgtttaccccgagcccaaacaactcattaattagactattcgattgcccttattgcataacttatcacacatttactccacatcttctaaccatttaaaactcagatggata

SEQ ID NO: 109750 - DNA, 584 bp, Cannabis sativa
ggtaaaataatttccaacagcggtgcagtgcattggcggtaccctaacccactcggtaagcagctccgggcgctcaatggcttggaagctggatgagaagaaaaaacggtgacggtattccttaacatttttctgaaagttaaaagggatcgaaccctcattagctggatgggccgagagtgtgaaaaaaccatcttttagtttgtctcccttcttggatctgatacaagttcataaaaattaaggacttcagccgggctggacggagcccagcctctggcaacataaaaaataaataagcctgagagcaggcgatatacttgggggataagttggtaaggcacaaggccaacaaaaactaagaaattgatgaaataatcctgaagcggcagcattgccccagacatgagatgagtttggctccaagctccgaggccaccatagttatggttaggcatctccttgtatctaggaagacgatgaaaggctccggaagtagaaggcttgatcccagccacagtgatgatcttctccagttggtgggcgtaggttagagttgaatgcaactcatcagcctcccagcc

SEQ ID NO: 109751 - DNA, 503 bp, Cannabis sativa
aatcctagttttgtctggcgtagcatttggagtgcacaacatttggttcggctaggggctagaatcactatcggtatcgggctttcaacgtatatcctcaagcaaccttggcttcctgaccctatcaacccctatgtctctactataggaccgggtcttgatgagtatatggttagctccctctttgatgtttctactcgaagctgggatgtctcccttgtcaaggatatgtttaacacacgggatgcggatctaattcttagaattccacttagctctgcagctactaaagattgttggtcttggactgaggatagaacatgcagctacactattaagtctgcttatgctatgttgcaacttcagaagaattctcagtctggagaaaacaatttgggattctggcataaactttggcaccttaaaataccgcctaaagtgacaaatttcatgtgagagcagtttctgatgctcttcctacttgcctccaactggttactaag

SEQ ID NO: 109752 - DNA, 751 bp, Cannabis sativa
cacattctcccaaattgcattgctaccacttcgtctcagccctcaaatcctcctcgcaataagaaaacgcgactttttgtactcactaccagaaactaggacactaaaaggagaaatgctatgttctccatggcttccctcccggttattttgacaagcgcaaatctgaatcttcacagtgctcctctttggatcaagttcccaagtcaaagggtcggctgctaatcaagcttccgcttctcactctgtttcggacaaacttgctccgctgcaagaaatgatttcacaactcacccaacagattcaccatgctcaacagtctcaatcaacagttgatgtcaacactccatcggcatctaaccccattggtaaatctgtttctttctcaaataatctctggatagttgatagactaccctttaattcggctaacaacatagctcctactgcttttgacttaattcatttagatatttggggtccttttcacgaaaccagtatagaaggttatcgatattttcttactattgttgatgatcacactagatttacttgggtttatatgcttaaaaataaatctgatgtcaacactatcatacctcaattttatgtttatatactgaatcaatttgttctttctattaaaggcattcgatctgataatacgaaagaactaaacttgtcctcttattttacaactaaaggcactctttcttatcactcatgtgtagaaagaccacaactaaatttt

SEQ ID NO: 109753 - DNA, 529 bp, Cannabis sativa
aaataatatatattgtcatatgttgtatattattagtttattacacacatttaatatatattatattatttaaaaataatataacaatcacccactagattgaatattatctctttagtaacaatcttttaactttgtaacatatatttaatcaatcaaaaatattatattaaagtataacattttcccactttaattgaataaatatactcttttaagaagtcttgcttaggtgcattagataaaatatctttcggcttgaattttactttagttattaccacaaagtttgataaaattttagttattgtagcattgaaccactattcttttagttcaaacctgtgataacacacacacccttgctaatgctcacttaagactgcatgtctcactcttggattgttaatggccatgtgaaaattctaattaatggactctctagagaatactccaaattctcataagaggcgacaccacctctagtccatataggtggagttttagtgtctcacaactctttagacac

SEQ ID NO: 109754 - DNA, 617 bp, Cannabis sativa
tgctgactttcaccttaggccaacattgccatggtgttatcttagtacctgagtcccgcagactttcaccctagataactggcactgcctgtatctcgagtcttctggactttacatcctgaacaacaatcaatctccatgatactcatctcgatgcttgtagtgaataactagtccgttgagtgaaccgtgaaggtctctcccccacttcatcttttggcgtcctcgacaacatgcccacacgcgaatgcctaacctccccaactcttcatgcacaccatgccatctcaaagttcattccgcaggatgtgactcttgagtcaactaactcatatagcacccctgtcgatttccatatgcatgcaaagtctgctcaaccatctaactgattcacacttgcatcacacccttcttgctcccccaatgtactaagtcccaatgatgcagccctctggtcttcatgcaaactctaggacccttcttgaccttcgcatgcaaacatgactaactaagtctttactgtcacggccctctggcctccactcaaactctagcgccatctcaacgcttgcgctcggtcttctcagccctgctggcttctttgatgccttcattcc

SEQ ID NO: 109755 - DNA, 1050 bp, Cannabis sativa
taatcctccccagggaaaaggccacccacaagtatatcgattacctggagttaaacaagcttacagtgaagaacaagtatccattgccaagaatcaatgacttgtttgatcaacttcaagggaagataatcttctctaagatcgatcttcgctcagggtatcatcagttgagaattcaagaggaagatattccgaagactgcatttcgtacgaggtatggacattatgagtttctactgatgtcttttggattgactaatgctccagcagattttattgatcttatgaatagagtgttcaaggatttccttgataactttgtcatagtgtttatcgatgacatccttgtatactctcagtcggaagcagaacatgagcaacatcttcgaatggtcttacaacgacttagagaaaacaaaatttatgctaagtttaagaagtgtgagttctggttatcccaagtatcctttctaggtcatattgtcggtgaaaatggtattacggtcgatttaggaaagattgaatcagttagagattggtggagaccgaagacagtttctgaggttagaagctttattggtttagctggatactactgtcatttcgtagagggattttctaagatttccatgccattgacagaattgactaagaagaaccaacaatttgtgtggtctgataagtgtgaagtgagtttccaagaactgaagaagcgactagtcacagcaccgatgttagccttaccatcagataaagaaaagtttgtggtatattgtgatgcatccagacagggtttggggtgtgtcatgatgcaagccgatagggtcattgcctatgcctctcatcaactgaaggaatatgagcaacgttacccaacacatgatttggaacttgcagcagtggtgttcgcattgaaaatttggtgacactccctttatggggaaaagtgaaaaatttatactgaccacaagagtctcaagtatttctttactcagaaagatcaaaatatgagacaaagacgtggttagagttagttaaggactacgattg

SEQ ID NO: 109756 - DNA, 531 bp, Cannabis sativa
ctctactatgatataccgtgtagctttccttctcatttttcgagcttcatttcaattatctgggagtttccaaaagttgaggtaggctactattggtgtaatccagtttggggaagtatcaatcatttcgatctcttccgtgccagtgatgctaggctcttcgaggaactgaataggaatcaaattcgccttgtcacatatattgttgcttgccaatcgagctaacacgtccgcaattgtgttttcttcccttggaatttgactgagaccgtagcttttgaattgtgcgagcagatcatgtattcttgctcatatatgttgtcatattttctccccgagcctcgtattccttggatacgtgatttaccaccagctgtgaattactacagatttcaatgtgttcggctttattctcccgtgctagttttaatctagcaattagggcttcatactcggcctcgttattagatgctttgaatccaaacttgactgcagcgtgcagatgttgccccccaggtgtgacaagggaaa

SEQ ID NO: 109757 - DNA, 1378 bp, Cannabis sativa
tcaacttctgggtggtgtttgtctgttattagcttcgcgttgttgatgtcgatttttggatctagttttttactgttgttttcatgtttttctaccatgtcttcagcaaccagattcgaatagtcaactatgtcgaatttgacgttctcaaattctcttgtttctgactctcctccttcttctgattggtgttcgagtgtgtatgattctgttgttgttgtattgttttcaagcattgccacattttcttgatatggtgttgttgtggatgtgatatttgggattacagcaggtgttgtgttgttgctctgtccgttctccacgaagaaggaggcgtcgtttgtcccttgttactgttcacagtacaaaagaaaaaaaatagacatgggcagtataaaagaaaaaaaaattgggcctagacagtataaaaaaaatttctgccgtgtggcagtatttttgtaaagattaaggaaaaagtcggtatatttgtaagttttctaaaaaaatttatagcaaatgacctcaaatcatagcactatatagcactatgtaagtaaatgtcctaatttcaaaacttaaaaaaaaaataatttttttacactatttattatttatatggtcttttgttatataaaaaaatcaataatttttttctcatttttttaaaattgaaaataaatgacttatatattatgatatatctatattaattttgttaaaatcttatttattttaaagttatgtcgattttttttttaatattttataaattgttgtaagttattggtatgtaaattttgttgtatttgtatgatatattattattttagggtgattctagaatgcaccctttaaaagagatgtactgatgcaccctctacttgtttcgacattcaaaaaaaaattagtctaatttttttttatattcatatatgttatagctatttaagatatcctacaaaattttaagaaattcggaataatttacaacacagaaaacaatgttcacacagtctattttacacgcgtataaaataaaattgtcacgcgtgctatacattgcttgaacacaatttttaacgtgttaaacttttctgaattttttaaaattttgcagaatgtcttaaataagtataatttacatgaccataagaaaaaatttgaccaaaaaattatttcagatactaaaacaaatagagatgtatcagtgtatcccttttaaggggtgcattataaaatttccaattattttatatgatatttatattttattaacaaacggggcacatacgaccgtaaacaactcatcatcgagcgactcaaacaaggtgaaaatccgagaactattcctctaaataaccttgatatttgggtgcaa

SEQ ID NO: 109758 - DNA, 846 bp, Cannabis sativa
ggtaaatgtttcaaatgaacttgccttctttttgtataaagtttcaattggtgctaaaattgatttggctaacatgatttgggagcaaattatttctcttataaatttcaagaaacctaggctcaatcttatctttcctcatttaatctataagattttatctgatcaagaggaattgattcttgagaatgaatccattgagatgcctgttgttggaactactttcaaagttccagagaaatctcatcaaggaaaatatgctaagaaaaaggctcggtctgcttcccctggtgttactgatgaacctgttactgcctctacatccacttcagcttctacagaaatggctgaattcaacttgcgttcgggaagaattgagacaagtcaccttacttctcaggaggatggacaacatcataaaattcttccgatccaatgatgatgaataagtggtccattttttttacctcttgctttttatttacgtgtgtttgaactactatgcctttgttcatgcttttgttatctttggctacttgatagacaaaaagggggagtagtatattttttggattatgtgttacaactctggacccttgttttaggagcagttatcttgtttgtggtttgtgcacttttccgtttaaaaagttgttttattttcagtttgtaagccttttcgtataaaaaaaattctttgttttatgtgttagagtgctttcatgaagggggagtattttttatactcttttatctttaaaaaaactattccctttggtttctaacacttgatgcaagttttctcataataaaatgttttgtcaatcaaagtgccaaagggggaga

SEQ ID NO: 109759 - DNA, 1016 bp, Cannabis sativa
  modified_base (140)..(142): a, c, t, g, unknown or other
  modified_base (306)..(309): a, c, t, g, unknown or other
  modified_base (407)..(411): a, c, t, g, unknown or other
  modified_base (669)..(685): a, c, t, g, unknown or other
ataaaatacattgaagggtagaaatgtaaatttgtccatattcggtgtagatcatctatagaggatctttgactattttgattgaaacaatggataatcataacgtacctttatcttggtacatatagagcgttctatannnttaagagtgcaatttcgaatctatagtggcgcaagaaggaattaataagttagaatttactttgtaaattctagatctacttattggaatttatataggcccatggtccccacacttgttgagataatactgcttgcatacttagttaattggttttaattaannnnttataattctaaaattagacaatgtcttatttatgaattttcactaagtaaatgcttaattgtgaagaaaagaggttttggagtttatttgttaattnnnnnactttgtatggtctaattaatacataatataaatggtaaatttatttgataattaattataattatttaataaatagttttgacatttataggattgaaattacaaaacatggcattattgaaagaaaaataagtggttgaaataaagtggcaaaattataactagtaaagcccatgtatggccggccactagtggtgtaattttgcccattattttattctttttaatccatataattcaaacctaaaccctagttnnnnnnnnnnnnnnnnnacatgatgctctcatctcatccagtaattcacttcaaccaagctaaagctagttttcattcttcaaaaactagtagatgagagataccttctatagtgatttcaagcatcctttattgttcttcacctatttggcccatagtgatagagtatcatgcccacacctagcaagtaaagtactcaatcatagtgcggaagacggtggtaaccaacccaaaggagagaaagagatccaggctctgatcttgttattactctgcgctagaaaggaacaagggttagagatctgagcagaaggagtcattatttttctgctgcatcaatgtaaggtt

SEQ ID NO: 109760 - DNA, 2698 bp, Cannabis sativa
acatcaaaatgttgttttcaatttcaaaaataatttttttttatctaacatattgtattttatatttttacttgcatattcggatcctagacctgaaaccatatccgaacccggatgggttcgtgtcttgatatggtgtaaaaatatttttaaaaaatttgtgccaaacaccattaaatttttaaaatgacaaaaaacttttctattctcacatttaaaattacaattttaaaaactgaaaactgaaaatacagccaaacagattcttagtttttacgtattttttttcttcatatttttaacttaatattaaaatttagctatgtaattggataattcaattaaaaaattgatccaatctaattagtaattagattggatcttgaggtctaattggattggatctgatgatgattttccaaatccaattactaatttaattggatcggatgaggaaaaaaaatgttagattagatcggatgttcaccccctaattctgacagttgagattaagaagagctaattcaataaataatatgttcatactaagtcgacggatttttatttattttaatttcctttaattatattgattagttttataaaagacaaagtgtggcaatattatggtgatagactaattaaatccagaaaaagggtagcccatacgtaagtaatagcaaatatgttggttagcaaaatatcataatggatgagtaataatttgactaatgtgtctttttattttgtcaattttccactttatatatatagttttaaaaatttatgtggtatggtagaattctagggttgttttagtagatttttttatctgcctttggtatttaaaaaaataatttaatttttatatgatcgcatgtatatattatagttatttaaaattatttataattattttagaaaactctaaataaatatcaatactgaaaattaaatttaaaaaattatttaccacaaatattagaaaatagtcgtgtaataaaatatataaattttatttttcgatattataaattattcaaaaaaatttaaaaatttatcagtggtcttaaataaccataacgcatacaattataaaaacataaattttacttaaaaactctttcataagtcataagtcgaagcagataaatactctactaaaacatctatttaaaaagtataatgtaaactcttctcataatttaaattaataaatatggtccaaaaatccatgtcatatttgagatggaaatatgatttatgactagatgcttcaccaaatttccgcataaattcaaaacattaaagctattaatgacccattttgaaagtgacttatttagaaagtgtgtttccattaccaaacatctctatgtttgtttttgcatacaacacaaaaatatgtataatttacaattattggaatggaccaataaattaattagtttaataatagtgtaagaattttgaatatagtgaaaaaattggggagctattatagagtcctttgcgtgtaattatgaaactcttcatcaaatctataaactcttttaagtgttcatacttacttcatactataaattcatgcaactcgattacatatataattttttttaatattaaatgtagttatttaataaaaattattagtttaaatatttaaatttaatttaaaagtattaaaattatagtaatttatattgtaaatatttaaatttaattctcagttataaataaatactttaatttaatgtttgacgtcaataataattaaattatatttttacaactttagtaggttttttattagtaagtgtcaaattaatatcatatataaaataattatacataatttatatatatttcatatataaaattctgtattttgttttctttatttatttattgctatgtgtgtgattggtatagagtacactaagtttactttccgaattagaaaataacaaatcaatcccaagattattaatgatcctaaaggtaattaaataatctttcaaaaaattcttaagggtgaaacattaaacaaaattattatcataaattaaaaaaaaaaagttactaaaattgaaataagattaatctcttttaatgactggtataagattttagagatctagttgtagcaagttagtacataaataaaagattcttttactaataaataaatttatatgttttcaatgagaataaatggatatttttggtatgttaatttaataattaattttattttacatgaaaaaatgtgatatcacaatcaatacaaaacatcatttaaaaaaaaaacaatcaatacaaaacatggcacgtgcgacagtgaagtatgtgtaaattcaaccgaagaaaccgcctaaggacggtggctaacacgtgcgatcagctaagattcccgtcaccattaccttcctttcttttattattatttttagttttttttttctgaaaaatagaattaatatttttttaagagaaaatggaaatggaaatttttgataaaaaaatgaaatcccagattctttatttgatattttaaattcgtcataataaataattattaataaggtaaatattagaaatttttacatgaaaaatctattttacacaatttattacaaaattactcacacacgcctatgactacatttttacttacaaagttgcttttattacacaa

SEQ ID NO: 109761 - DNA, 1246 bp, Cannabis sativa
aaaaaagggtattgggattgtgtgtgaaatttattaggtgatatgattggagaagcttatggtataaacaagcataaatgaccatttcaactacccgtacctaagcctaacattacaagtttagaaagaccttttgattcttggttgtgcattgatttatattagtggataatagtaagtatagcaagcatatggaatatttttgagatagtagattgatggttgtaattgacatgcataaattatttcaactattagttaagtgcttattatggtttcatgaactgaataacagattgaggtgaatcaagagtgtaattgaactgaaattctggattattataggtgaaaattttgttataaccatgttatttatcttacttgaaaattgctcatgtttcggttaattgacttgttttatttaggttgtgttgtttttagttgttagtcttactcgaaggcgagtaagggtttagtttggaggaatttgttaggatatttttagcctattatttatgttatttttagagttaattttcttctttattatcattttttggaatagaattatgcttgttttcgttaatttcagatttcgacccttggaatgtataaattggtcaaatctcacaaaaagatgatttataaattagagaagattgtgcaagaaattaaagctgaaacttcaagtctaaattagactatgttctgatcagatttggagaaagtcaaaacataaaagttctagatctctcttttatctttctgaaacatcttgaaccgttcaattccgagcaatatcgagagagttatggccaaaatactatccatcgatgcaacagaaagctcactacccaaataaagggggttatgctgcgacataggatatccatgccgtgaccgctccttctaatcctgaaaaaataggttttcagcgtcttttatctttctttttttaattattatttggctataaaagaagtggacttcaatagtttttaacaagcaatcaaggcgtacgaattttggagagcaaaatcaatattgaaggctttctcaacagggttttcaacattcttttcttcttctattctaaattaatatgtgtaaaattgctacaatgaacatgagcagctaaatagttcattagagtttagatggatattgtttgacattgatttttgattttaatatgatttaatttcccctcaatttctatgtgttctatttcattcatacttaattt

SEQ ID NO: 109762 - DNA, 1787 bp, Cannabis sativa
tgtacatctacgattaggttttctaaatatacttatgttatttagttgaattttattctaaataagaatttactactatttatatattatatatattgttaaagaattattattattttttttttacctcgatcaggttataattgtttggctcaacatttattctatataaaatatggctttataacagaatttttgatttatgaaaaattattgggtgatttttttttatttttatttaaatcactattatgcttttaaatttcaataattatcactacattgaatattattaattttaaaattataatataaaaaaataaaaactaaaataaaattaacatacgtgacttggtacgtaacatctatctagtatatatatataactaagataagaatggtcatcttttatttttatgcctctctaaaatattgtgtgatataaaatgcagatatttatttgtctttaattttatattatatattattatattattttataatataatatttgattgattaaataatatatatttaaattagaataattagatctaaaatatatatgaatctcgaactcatattaaattatcaagattactctatgaatcaataagatggaagatatacctgattctatgatctcagatacgagatgagattgtaggtatatgatcttccacagactaatcttctctttatggattctcactcaattgatggaaattgagaagaaaagtggttaagattagccttggggaccaaactctaatgttctttatatagcaaactaattagagtcctataaactctaattaggtttactattaggtattacacattacaaagctcatactaaataaggttcatttaattagatcacttatttagcctaatttagaatattaactcaaataaatttttaatttgtaagcccattattaaaaataatctaataatctcccacttgggctacaaattaattcaaataacaattacatttgataatcttatgtgtgcacaaacttgctaattattctcaaaacatctccattaaataatctggtccatctcctataccaatatgagaccaaagcgacattcgttacatttttttgtacctggacccatcaattatcactatatcaaatatatttaatggcatagatcaagtatggatgtgtaactaaaaattacatgtaatgtgatcttactcatgttgttataatacccatattttaagtaattaatatggttatgacacatgaaaaagttgaaaaataaaccaaatcttgttataatgtagtgaataaattcaataaactcatcttagaaaatataaattgctagaaatattcaaactcaccctttcaaagataagggtgagtcgtgaataataactaccgctttgtgaggccaacaagacgaacaatcaatgcaaaagattcatctcaagatacacagtatatactaaagaacaacaacctattggaaaaggtagataataaattctttaagagcttacatacttgtgagtatgttgaaagactaaggaaagcacctagtatagttcgtctcgttgccacattatgataatgcctcacatttgcctcttcgacataacatagggacgtgagaagtatttgttgagatttataccctacaagcaagtaattaatagataacatattagagatatgaaatacaattataagataaataatatattaatcataagagtataattattaaatatctaaaattttcttattcatatagagaagata

SEQ ID NO: 109763 - DNA, 657 bp, Cannabis sativa
  modified_base (42)..(42): a, c, t, g, unknown or other
ttcaatgcccctacttagtgtgtttctcccgcagaagcaaangaaatcattacagaaattcatgaaggcttctgtggggatcatgcgggttggcaaagtctgtctaaaataatcattagataatgattttactggccaacgatcaataaggacacacatgagtttgtcaagaaatgtgataaatgtcagagattttcacatatacctcgcgtaccgccaattgaacttagaatgatgaccttcccctacccattgctatatgggggatcgacctaattggggcattacccactgggtgaggaggaactaagtatgcggtggtagtagtcgacttcttcactaagtagaaggaggtcgagcccctattatccataacctgcaagaaagtctttgactttgtcatcaagaacattacctgtaggtttggaattcccataaagatagtatcagataatggaacccaatttgatggcgacttgttcattgaattctgcgagaggaataaaattgtcaaaagcttctcgtcaaaatccaggcctcaggcaattggacaagtagaagccattaataaaaccctaaaggatactatcaagaagaagttagacagtgccaaaggcagatgggttgacgagccacctcaggtgctctgggcccaca

SEQ ID NO: 109764 - DNA, 772 bp, Cannabis sativa
agaacccaatcttggaggggtgctcaacccatggattatatggggtgcttatgatcctacaaggtacatgcctatcatcgaattagaaaactgccatctcaggcgacgcttagaggaggcaaactagtggaatgctgaattggagcgtgaggcaaccgcggccagggcagcacaagggaataatactcaaaatcaacctgaccttggagtgagaagaccacgaggcagacctcgtggctcacgaactaggaggcatgaaactactcaggaggatcctcaaaatgctcaagaagaacaacttggggaaattgagggaccccctaataatgagcaacccgaggaaactgaggttccccctaaaaacccaaatgatcagccagaaccatctcatagaaatgagaataggaggcgatcgaaaaccagggaataggaaattcctcgtggaaacgaggaaaatcctgggacacaacttgggggacataggtcaccaacgaggaaccaccaatgttcttcccggacccatagggaaggggcttgtacaaatcccagtggtgaaaacacgacgaaccacgcccaagggggaagaacggggcgtctcttgactacttggagaggagtctcttgaaagcgtaatcaaccactttctagtttccatgagaaagaactgtagggttgttggtgagaacccaattgtattgctggtcccaaatgatacctccgggatatgggtctcataggggaatgcataggctctcatggcatggcaggcttc

SEQ ID NO: 109765 - DNA, 700 bp, Cannabis sativa
atgagtaaaaaaaagattggatttgatcatatgtccaaccttactcctatatagtataaataagtctattaatctttatttttatttgtaacaaaattaattttttttgtcatatataatctatctatctatatttgtatatgggtgcactcttaatgggtattacccatgaatgagtaatattagaaaaatttgagtttttatgattaatttttcaatttagttagaaaaatttctcatttttacattatatgtgctggggttgttccatcagctgaaaacaaataataaaaataaatttttttcagcaaaaaaatgataaaaaaagttgagtttgacttaaatatttttcatataaatataattttgatatagtgtaaaaaaagtattttttgatatatatttttttaatcaagtagctaaattaagtatagaaattcaaatttcttttttattgttcgccattagatcaaaatttaatggtttaatatttttaaaattattatttatatttaaatttgtttagtaccatcaatgggtaatacgtattgagaagtgtttcttatagttttataatatacccatgttacagtaaaattgaaaaaaaaaaatgcaaaatttcagtagtcaatgtaaaaatctcttatattaaacaccaatttttttatatttttacatttaaagttttttttttatatat

SEQ ID NO: 109766 - DNA, 596 bp, Cannabis sativa
  modified_base (55)..(60): a, c, t, g, unknown or other
ttaattttaaaataaataaaattagttttttattagattattttaaaattaattnnnnnnaacacacttagtttaataaaatatatattcttatttctagtaactaatttatattttttaatgtttaattaattataaaaatatatttaagttaaaaattaatcttaattaatttatatcaacttaagaatatttttcttagatattaaattagaattaataattaagttaattttattcaatatacttaattatttgtttttaattttgatatatttaattaaatagaaaaattaatatttaagttcaagacacttaaatattagaaatttttcaagaaatttaattaaataagaaaattatatttaattgagcttgatctagttcaaactaggacatcgtcaccattgttcctttcccacttaatgctctatcaatctcatttgggtcagttcttggtttgctaattctaattccctcaactccaaccatgtactctgaataaaattccgcagcctattcagatatgtagcactcaaccatagaggcttctggtcgatagtggttacacacataatgtaacgtccccgcttcaa

SEQ ID NO: 109767 - DNA, 529 bp, Cannabis sativa
  modified_base (488)..(504): a, c, t, g, unknown or other
gtggtattttggtaaataaaaataaaataagaggtataaaagttatcctaccctaaggtaaaagtgtaataaaagttaaattttgtatttttcatgtaaaaattccatattttattttatctttcttacacatcatttttgtcaccattacttttaaaaatactccaatagtataacacctttcaaaaatactataattataatctcacacattattatgtagatataaaaaaaaatttcttgattaaactattatatattgtacctttaagaatattttaagaataatatttttttatctctaataatataatatttttatatttgccactttccacatcatcaaacatgattcgtttggtacgctgtattgtaaaaatatatgtgatattaacttttatggagatctaaatatataatattttagcataaattaaaatttaacttagtatgatataaaaatataatgggtgactattcaatggttnnnnnnnnnnnnnnnnnatatggttacatttttctttaacct

SEQ ID NO: 109768 - DNA, 527 bp, Cannabis sativa
  modified_base (38)..(40): a, c, t, g, unknown or other
tttgactagaatttgatatataaggttaattagattannnaagagtatacatcattccaaacaatatttcctggttgccgatgaagtcacacaatgcaaccttgtgcaaatcctctccacataacgtgatctgggtacgcagtgctatgaatcctcagggcaccggaattgtgattatatcacgtttatctttgattcttagaaattcctcaaccatccattttagcaacttagggattaaagccatgacctttggggagaataattcatcttcttcatcatgaccgcctcatggagaaagcatgggagctttccccttcgatacatcccgtctagatggtagttgagcgagtggaccctatacaaaacacaccataatatatcaaatttgatcctaattctaccgaaatttcggcagcataacgactgtaattggatgcccccaaaaattttaaacatgcttgtataatgacaaataacacagatataacggttgtttatttatctatcccaccgcagcacatata

SEQ ID NO: 109769 - DNA, 651 bp, Cannabis sativa
atgtacaatcttcattagagaaagctcggttcacggtttagtaagcccgtacttgtttagtattttaaataattattaaagcatgataggaagtatattagagtataattatttattatagtgtgttacctttaagtccataagagcaatattaagttttatgatcgctgtctaacctgcctggcttatgggttcccaggctaagtcctataaaatggacgcccagcgaaatacaagaagtcagggtaacatggttgagaccggaggtggtcagggaaatcaaaatcctcagaatccccgtggtcgcggctgtggccgtggcagagcccagggtggtcgccctataaatccaccacaagctcctccagattaggagcagaggtttgcaaaaatgcaagatcgaatccgccagcaggatgaagaaattcagtggttgaggcagtagggtcttcctgtcgtgcctcctcagcaagctgctcagggcattgcagttccagcggtgccagcagaacaacctgttgctggcaaccgtatggatccgttgtacgaaagatttcgtaagctagcacctctggtgtttcagggaggtcctgatgtgatgaaggcagaacaatggctcacagtaattgagcatattctaaactttatggg

SEQ ID NO: 109770 - DNA, 543 bp, Cannabis sativa
tagttaagcttattattgaggttggttgagatgaaaagatgaagaagagaagaagagataaaaaagaaaaataaagaagagaaaaagaagaatacttggggattaaggctggggtttaaattgtgttttggtggatatattagtaatttactttattagttaataaaaaaaattaaaaaattaaaataattttataagaaggttattttgcaaaagtagttttggaagagggttattttactcaatatccatttttttagttcctttatcttgtattgtgtattgtgttatattgaaatgtataatttttatataaattagcgctttgtgtgcaatagtattttatttagtgatgttttttttaattggtctttactaataattttagtattttctatatatttattttaatgatattaattagtataaaatttgaaaattttgtattattttatttcactacaaaaaattttaattttaatcacaataaaacttatgactaaaagtaaaaaaattgtcacaaattataaatcatcattccta

SEQ ID NO: 109771 - DNA, 1232 bp, Cannabis sativa
ctatgcaaaactctcgaccaaaaacgggaccctttgggctacgtacctgcaatatataagtatatatatatatatatatatatatttatgtataagttgatgagatgaagagaagatatgtttgagtcgatgggaatgggtggtatttatagatgtagagatgggtaatgatataattttggtgagaaaatggaaaattaatgatatgtatgcatatattctctaccttctaaaatgggaaatgctagctagctagcttgccactaaaagagaatggccctcgaaaaagcaagcactaaaagttctggtatcattgcatgaaaactatccttttctctttatattttaaataattaagatataggatatgaatggaaaaatatataggaagaagaattaaaaagacgaaaagataggatatagtattgtggctgactttaagcagagcataaaacatatgggcgacaatttcggtgtggaagataaaggattggttggaacgttgaattcaaaatctgttttctcattgaataaacgttttcttttcaaagaaaagtctagaaagagacactaaaggggcatgggaatactcatctattttacatgtttcttcaaaaagatctcattcacatttttaaataatactataaaccataattattatataatgtcttcttcccaattatagcccgactttgaaaataagttaatgttaattaggatgaaatagaatgcaaacctcaacaataacggtgaagattaaaatggtataggattaatagagacaatagaaggaattatgattttttatctcaaaagtaattgataattttgtgaaaatacacatttttataaatggtataaacggtccctcacacttttcatgtaagacataatggtcaatggaattttaacgtgtcccacatattgaaagtgtacaaaaattgtaattactatcataattcataagaataaccacattctatattatgactctctctcgtttaatttattatttattattttattctatttagtaaaaacacctatagtgacaactttttagtcacaacataaatttctcactactacaatgtaagcctttagcttcccttttttcaacccaatttataaaaaaggaagctaaagagggtaaaaataaaaagggaagctaaagggggtgaaaatatctgtattgacatttagaggcggttttttggtaaaaaccgtag

SEQ ID NO: 109772 - DNA, 586 bp, Cannabis sativa
gtaagttgccggaattaatggtggttatcaatttggttgaattttcgtttcaattgcgttgggttgctgcgtggttgagcgatgattgtccaagaagcatggatcctgggttgaaggtgtgtgtgtaagtggtatttatataattttttttatttgggttgtgtatttatttgtttgaccagttaaaagtatttttgtaatattattactttttttagttaaaactgaaaaaaaactttgtgttaaattttattgtcaaaaaattaaaaagctataaaacccatcactcaataataataccctgtgaaaaaaatctaaaataaaattactaatctaaaaggctataaaacccactagtcaataataataaaaaaaatacttcagtcaatatttgaaaaaggaagaatagaatagaatagtttaatatattgaatgagaatttttcttttataatttctattgatgaagaacacaatagaaaaaaataccctatttgataaattttagctttacaatggtgtaattcttttattattattattttaattaaggctaattaggatttttaccccttgaactttgacat

SEQ ID NO: 109773 - DNA, 1967 bp, Cannabis sativa
tatcacattcacattgtcattgcctaatcagacaattgacaattacgaaacctgtcatgctatgtggtacattatacttttcttacctcaagtttcggtttaggtgtgttggccgacctacttagagaagaacgattgatgatcttaggccctatggcataacaacggtaaaccaataagtgtctatcccaaaacactacttaatattcagataagacaatctagattttttaaccaaactccgcaacataaatacactaaaataaaacttatattttggctcttaaacatacaccatattatagagctcattgtaagcttcgaaacaatatataaaatgtctaaaacggacagtgaaagttaacaaaaatataatttctgatctctaaaatttctagaaatagcaagccgttttggtaaaacggtcgagcgttttcttgcaagaaaatttcaaattttgcactctctgaaacactaaaaaaaaacctatccaaatcattccaaacttcataagacacatatataccatatacacaaaaatctttatgtaacagaaattaaaatcaagcccttaaacagaaaatgccattaaagcttggacttaagctttaaaaagttccaaattcaatttctaactcacaatcacctcaaattcaacaagtaaacattgaaactagtctcatagctaccaaagaacaattccatgaagttagaatctccataactactctaaatcacaaagtcactatataaaatcaatcgttatcaacttaaaacgaaaccaatccttatcttaaggtttccctcttcaatgattttcaattactaggttttcggttgaaaatcgaagaacatgaattaaggggaggagagttatgtcgcaacgaaggagagggtttcgttcgttcttttttgtttatgtttttaaaataagtattgacctcaaaaagtgatcaacctacagtggagtcatatggatttgatgcttgccacgtgtttgcataaataagaatgaaaagcaataaacaacaaattcgttatacatgttcggcccccttgtgatagtgggtaatgacctactccccttttagttgtatttatatcgagagaaatactatcttgatcactatagatgggatctactatagcgcccttacgattataacgtatgaatcaataatggcaaaagttaagtgttgagatgatgctagggtaggtttgtgagagaggaaatgaggaagagagagagttagttagacacttagagcataaaggtaggtttcaagcttagatgaaactaaggtttctaggctaaggttaaggcctttatataggaggcctaaaactctagattacaatttaaacccctcaatacttgcatagtttattagatatttacaaaagattaacttgcccttgaatctagatattattcagctattctgttgagcttttagggcccaattgacaacccatgacttgttatccacgtgtagaagtgcccaagaaagcctgaagagtacctcttggccagccaggaccttatggaggccaggttggccggccatggtaaagtcctaacgctggccggtcataggggtggtcggccagctcttgaaagggagttggtatgtcacttgatgcgcatttgagtgttggggtctccatttattcaggtgctgacttggtcttcttattggtgagttgtactcccacgtggcactaattttgtccacgtaagcatgccaagttaggagaacaaaaattaggagaacatttacctcacaagttcctgtgtggatgtttatacgaatagggactttactagctatattgatgtggtagggactgttataccctttattgaataaaatttaatgcacttttagccttttaaatcactttgtcttgactgtctgatctcattgcattagagaaaataactgctttagttgcctttatgatgt

SEQ ID NO: 109774 - DNA, 701 bp, Cannabis sativa
atcacatcaaagaaggttcaagactttatagtgaagaacatcatatactggtttagactaccgtacaaaatagtctctgacaacggcaagcagttcgacagtcaatctttcactgatttttgcgcgaaccatggtatcatcaaaagcttctccgcaatggcacatccacaagcaaatggtcaagttgaagcagtcaacaagaccctgaaggacacactaaagaagaagctcaaagatgccaaaggaaattggccagaagaactcctcgaagttctatggtcataccgtacaacggaaaaaacaacaaccggtcagacaccattctcaatggcgtatggttatgaagctatgctgcccgtcgaacgcgaacaaccatcccacagaaggttgacatacgatcaaggaaccaatcacatactccttgcacaatcacttgatgaaatcgaagaaaaacgagcaactacaaacttaaagttggtagctcatcaacaaaaagtagctcgatatttcaacaaacaagtgaaagctcagaaattctttgtgggagatattgtcctaagaagggttttcctaaacaccaaagacagcacgtcaggtgtactgggacccaactaggaagaaccttatcaggtggtcgaagttctcgactccggagcatacaaacttggtaattatgacaaaaaaatgcaactcattttagt

SEQ ID NO: 109775 - DNA, 589 bp, Cannabis sativa
tcttcaagtacaaatcatgaaacattgatagtagtactcttccatgttcaaattataatgaggagggacatcaggaagaacgatgtcccagacttctaaacaattcaaatgaatgtaatgcttttgtttttgaatcatgtgttttagagaatgacaaatccttttggattgttgatttggatctactaaccatgtttgttcttcattgaagctgcttgaaacttgggattatttaaatccaggggagttaaagctcaaagttggaaatgtctaattagtatcggtccaagcttaaggaaaagcccgccccaagtttcagaagaaatttttagttttagacaatgttttgtttattcctaattttagtagaaacttgattagtgtttcatgtttacagacacagttttatcaattgaattttttgagttttatttgcaatatttcttgtaatggatttcaattatgtgttggttacatggaaaaagggctttatgttttgagacttgaaatacaaatcgcacttaacaacgaacttttcaatgttgctaaacctagaaaccataaaagaaaagagatcgataataatgat

SEQ ID NO: 109776 - DNA, 626 bp, Cannabis sativa
gactgctaactgtagtcactctttataagagattatccacactgacatcagtagacattattccaccacgttgtgtaaaaaacaagtatttataacttttatcaatgatttttctcgttatggctttacctacttgattcaagaaaaatctaacgctcttggtaaactcaaaatctttcaatatgttcttgagaaataattgggaagagtcataaaatttattcattccgatcgcggagaagaatattatggttgttataaagagtctaaacaacatatggggccttttgttgaatattttcaagaagttgtgtagtttctcaatacaatatgtcaagttcacctgagcaaaataacattagtgaaaggagaaattgcactctcatggatatgttagaaacatgatgagtagatcaaatcttcaagagtttttatggggtgaagcacttatgactacaacttatatttcccttttaagttgtggattgggagaaagcctagtcttaataatattcatgtgtggggttgtccagcttaagtacagatttatgatcctaatttgaaaaagttagattcgagaacaaatcactgttatttaattagttatccaatgcactcaaaaggct

SEQ ID NO: 109777 - DNA, 1350 bp, Cannabis sativa
agacgagccactagtactagcaccaccgcactcctcgcgaataactctttctggacggaagtagctgaattcccctggagcaacagatctaatacgacatccacacctttgttttatgccgcaggactttaaaacaccaccaacatactttccaatggttcttactttggattcaattagttcagcttcaaaggtgacattagagtcgtgtcgagtctttgatttatgaggcttagtagacatgatttcaaaatctacgtcacctgatgaaaaagcaacagtgactttgggtgaaaacaaaggtttagctaggggaacagaagataaagacataggttctaggcaggctgcatctcgcaagtaacgacgtttaccctcagttatctcttgtaaaaaacgcctatggcgactagaaactttatcttgattggtttttattaaatggtccctaatttttgcatcatttatctcaagtttggattgaggtttcctgattttgcgtttgaatgggagggccaattcctgaggacattctttttataagaattctggagtataaatttcaaaaccagattgggacatttttataaaaagaacaatcccaattcttggaagaaatttatttaaaccagaagcttataaatacgacaaaatgaaattaattaaattgaaattactaaaaccaaacaaagtgaacaatgatgcaattaattaataagaaaaccaactcaggaaaaagaaataccagaaagaaaggaatgaaccacttactattcagagacatgttttttcacaaaggagaattctgtacctgaagttgagacgaatgactaagtgtactcatagaactcctaaggttgaagattaaacccgaagaaactcgcaggaaacaggtcaaggataaagagggcatgcaatggttcgaatagttgaaagtgatttttgcagaaaagcttaaaagtttcaaatggtagaaatggggaaatggttattttctcttgagttttatactttaaggatgataactgttagattaaaagaataaagatctaacagatgggaacaatggagaattgaaaaagatgggcatttaatgctaatgatgtgcctcgaaatcatgaacttccaaaactcaaagcatgcaagttttcaaaattggttaagacaaaaatacccttgtaatcatttaaaaagctctttttaataaaaaataacttcttaaggggcaatttttatacccgaaattcagccacacttcagaggatgacatgtgttagttagtggaatatgaactacctgatataataaagctatatcatttaatacaaagaaaaataactcgttaaatat

SEQ ID NO: 109778 - DNA, 741 bp, Cannabis sativa
tttcaagataccacttttttatttaaaaaaaaaagtaagcctatagttgtaacaaaaagggggtagtataaaaggaaaataaaaaaaaaatcctaaccttcattctcttcccaacctaagagagagagagagcaaaaaaaaaaggagtcgtaacgccttgacccacaggggcgctacgtgtgtggttttacaaatttatttttgactaatcaattagtttaagaaatgtgtagtttaattaaaaactttttagttaaattaaaataaaatttttgtacaaaataccaccataatatgtggattccctgtttataaaattcttttacaacaagttacaaaactacagctattacaaaagtaacagtatatttccaaacatagaaaaagggttgatcctgcttcccggaggccaagacaccacgactgatatgtacatcgttgggggacctctgacccatggccgaacacaaaacctatcccccttacctgcaccatgaagcaacgtgagtcacaatgacccagcaagaaaaactactagatcgaaagtatttaaaacacaagtattcacctcacaacataatatacatactcgtaattcattacttattcaacatgcatatataatttaacgtctatacaaacacatatattacgcattataagaaaatcatagcaactcgtagtcaacaacttcatcattacaataaacggatattcactcaatgcataatcacataatct

SEQ ID NO: 109779 - DNA, 1084 bp, Cannabis sativa
ggttagcgcggtatagtcacaaccgggaatttcgggcccgaaatgtaaattggattggttatttggcatttttatttgatatgtgataatctaaaaattatttgggaataaactgagtatgaattataaatatgcccttgagaatgcttatgcatgttatatagccctaagggcaaaatggtcatttgaccataattgagttatattgaatttaatggattttgagagaaaatgaattgtattttctggttgcttctccctctcaaccgaaccctctccctctcttttaccccttttgattttcaaagcttaaatttgtgaagaactagttgatttgaagcttgttggttgaaagaaaggtgttggaggcttgaggcttaattgtccaagtgtttgaggtagttttcttggttttaatttatattttccttgctgaatattatggtagaaacatgcttaggttattttgattttgggtcttgcatgtgtggtgaaaaggatgcttaatcttgttaggttgtctgttaatcttgtggaattgagcttctatttattgtgtgttttgtggttgagcttgggcagtgattacatggtatttctatgttggaatttcatgttttaaatggtgctatgctgctgaattgtaataggtttgagttgggttgagttcatgctcttgaatttgagattttgatgagtttgaagcacgtgtttgtgtagcatgcaatctgaattcttggtttagtatgggattttgatgcttgaaatatattagttatgcatctagtaatttgctagtgatcctaattgtgaatttggatgtttgattgagaaattggagtgaaaagtttggtttggaaactgaaaattcgaagaggggctgctggttttctgggttctgcacctagagcatgccgcggcgcgctcctttgagtggacctgggaatttgtcccaggtgccgcaacatggtctgggcatgtcgcggcccgccctcgtgtttttgggcagttttgagttgattttcgaaagttcgtaacttttgatgtcgaactccgatatgtgagttctttatatcgttggaaa

SEQ ID NO: 109780 - DNA, 830 bp, Cannabis sativa
  modified_base (26)..(44): a, c, t, g, unknown or other
ataaaatgatttatgatcttttattnnnnnnnnnnnnnnnnnnnattaaaatgagttttatttagggcgtaaataccaacaaactctcacttgcactaatctaaaaaaaaaagtgcattttaattaatcctaaaaccttgatgttcagatcaagtgtagtatgtagtattatctttgtaataggatctgacaagttgtattcagttaccaaccttctccaccattacatctccttaatcacaaaatattttatattgtgaaatttctttctatatgtttactcctcttattgtactggattcttaatttttggcaactatatctgtgttagttaagaagtaactctagtagttaatccatgactagaataacgctaaagaacttttcataggctgaataattatctagtaaccttcttggacactttaacatttagtcttactggtagagttagagacttcaataggtttttacacttctccaaagatcacttctccatcccaagagtaatcaccatctcataagtagacattctagcattagcgcaactctataatccttatttgaagtagtctaagagtattaaaataccacccttatcgaccaacatatatttcttctttcaatcttatgatttacttgattgtctttcaatattcctttcttggagtaaatcgatacctactcataggtaccactcaccaataggtgtctggtctaatgcataccataggcatacatgagacctctcactgttgaagcttaaggtgttgggttttgtgcactgaataaaactcatttcaatataatcagattgactaattaataaa

SEQ ID NO: 109781 - DNA, 665 bp, Cannabis sativa
agattgtaacattcgttagtgtcgtggccgtagtctccgtggaaccgaaaaaacttagtcatgtcccttttcttggtatctttcttcatgggccccgacttcttgtacgggattaacgactgatttgccaaatatacactttctatatcttcagtcagaatagtgaatgcagtgtatttggtatgattctcttggggagtttgtttgaatttatcagtgaactttcctttcttcccgtttccttgcttgaacgcttgccttttgagcttgaattagtggaatagttgggaagttgggcggatgtcccaatggaaggagccttcgttttgcccggcttttgttcaccttctgctcgttgaatggcttcttcgagcttgatgaagccttcggttcggtcaaggaaatcactcattgagtataccggcccgttcttccttatatctttccaaagttcaccgaggacttcaatggcccccagtatcgcggataactttccatcctcggttacccgtaaaactttggtcgcttccgtcatgaatctactgatgtatgcccggagtggatcaccaggtcgttgctttacttcgaccaaatctcccaaatgcaatgggagctggcgcgaggaggagaattgcgcatggaattctgaagagaaggtttttcat

SEQ ID NO: 109782 - DNA, 606 bp, Cannabis sativa
catcgggcacaccatcggacccgaccttcaaacccaaaaatgagctaaattccacgtcagttgattctttagtcggtcggggctgcgtggacggttggggcggtcggctgtgggtgatgtggtggatcgccgatggtggttcggtcgagatgggtatggatgggcgtgggttggtttttggcgtgggtggtgctcgccgtgcgtgggtggttcgacgaggaggaaagggatgacgtgggtgtggttgttcgacgaagaagagaaggatggccttggatgggcgtcggtggggtggttcgacgaagaagaaagggatggctggtatgggttttggatccctgggaaatttgagagaaaaaagaggaagagagagggacggttgggaaaaatgggaggggtattttggggtttaggaaaaagttatcccatttaaaaaattatgcataatattagtttagggagccaatttatgagtttattaagcatgaaatttaaatttccctttatattttaagatgaattggaaattattgataccaaagcaagccgatgcattgttgatgctctaatagactcttttagaatagagaaatgctaaaagatatt

SEQ ID NO: 109783 - DNA, 683 bp, Cannabis sativa
  modified_base (614)..(646): a, c, t, g, unknown or other
ggataataattctctaaaatacataaattcacaacaaagttagaaataccttgcttctttgccaaaaacttaggacattggggtttccagtagcctgttttgttgcaataaaagcatttcattttctcctttgccttttgttatcgcaaattttcgttaactaaaattaattagcctttatgtaataaatactttatagaaataataataaataatttagaaatcaataactctagatatttttacgtagttttacagttaaaatctacatactccacgagtcttttttattaattatattttttgagtacagaatacattatctgaatgatagtatttatctctcaatttttccgtacttttttttgtggggtctaaccttatttataggagtataggttggcagctattcttttggaatcagttcaaatataactattcatgaaacgtgaacaatccctacgtttcatttaatcacatgtgggataatatctaataactacccaaccaccctctgtttttatccttcagacagttattgctaacttggaagatagtatctcgcctaacaagagttatcctccttgtccatcttgttggaatttattttaccnnnnnnnnnnnnnnnnnnnnnnnnnnnnnnnnnaacatcctaaatatgaactctctaaaacgataataaa

SEQ ID NO: 109784 - DNA, 508 bp, Cannabis sativa
gttgattaaccatgaatccgaggaatttccctgaaccgactccaaagacgcattttagagggtttagccgcactttatatcgtcgcaatatatcaaacattgcgtgtaaatgggtgacatggttttttgcatgttgtgattttacgagcatatcgtcaacatatacttccatggtgtccccaataagatctacgaacatcatatttacaagcctttgatacgtcgcacctgcgtttatcaaaccaaaaggcattactttataacaatacaagcctcgatctataatgaacgaggtatgttcctgatctggttcgtacatcaggatttgattatatcccgagtacgcgtccatgaagttgagaagttcatgacctgcagtggcatcaacaagttggtcaatgttaggaagtgggaagctgtattagggacaggctttatttaaatctgtaaagtcaacgcatgtgcgccaggagccgttaggctggggcacgagtacgggatttgctaa

SEQ ID NO: 109785 - DNA, 767 bp, Cannabis sativa
gacctaggccccaaactcgatcctggaaccaaacttggactaaggatccagacctagatgggggactttgacccgaaactgggcctcaaaaccgggacggagatccaaaactcgaccccagactcgagacacgggacacaaccttggacccgaaacgcaagacctaagtaccgggacacaaccccaaacctggacctaaatactttcatatgacgcgacccaagaccttggacctaaactggaataagaccgagatctgaatctagacttgaggtttcggcatacccgatagtaagtgtttgaatccaagacccggacccagatctgtacccagacccggacatggacacacactggcatccaaacacgatctcggacccggaataggaatcacaccaggtctaggactagaacccagacctgggaagtagcaggacccaaactcagactagaacccacaccgagactatgacttggatcgggacctgtgactttgtacctaaacaaagaccgggacccggagcgagactcagacccagacccaaaaactggggctggacacaggacctaagaaccagacttggacctgggatctgaaactcggacccacactaggagtgggacccaaacgcaaattgggacctgaactcagacaaggactcaagaccataacccgaaccgaaacacaaacttggacccggatcgggacctaggacctggacatagatgggggacccaaacccaaaattgggaccccaaactgggac

SEQ ID NO: 109786 - DNA, 842 bp, Cannabis sativa
tggtatgaaacgaggcatcaggcaggctctgggattgaactgtgaaatgggtaacataaactatttaggcctcccgctttttagatcccaccaaaaggattcgaattttaacttcatccttgaaaacctggtgtcaaaactccatgggtggaaattaaaatcgttatcaaaggctggtcgtgctacgttgatcaaatcggtggggcttgctttgcttgtttacacgatgcagacgacaaagctttctaaaaagcttgcatctaggattgatggtatggtgagggacttttggtggggctgtgaacaaggtaatagaggcatctatcttaaagcctaggaccagttgtgccttcccaagtctcgtgggggacttggctttagaaagattgtggagatgaaccaggcattgctggccaagtggggttgggctctgcttactgaggaacaatcactgtgctgtaatgttctcagatctaagtaccttaaggttaaaaaaaattttgactgtgaggttaagagctccaattcttggttttggaaaaatgtggtgcgatcaaaagagattttaaaaaaggggcgtgcaagctaatatctgatgggagagggacaagcatttgggatgacccttgggttatccatggtacagatttttaccctaagtccaattatcgtcaacagcggggcttggagaaagtgtcagatttacttttacctgacgaaaattgggatgcacccaagctacacaacctttttgaacaggaaactgttagtaacatcttaagaggcggtaatccgagtggccagggaagggatagatgggtctagacaaaagaatcaaatgg

SEQ ID NO: 109787 - DNA, 637 bp, Cannabis sativa
  modified_base (528)..(530): a, c, t, g, unknown or other
cctcgcggagatgccttagcattacttgggctttcgggagcgcatggggctccctatgtcttctccgggaggcatgtcccggatgctgccttattacataaacacttagcaaatagttcgaatgctaagatgtttgatccacgtgtcctcgtccggttggtcctcgtatattgggcaaaatcaggggcaacatttaccccccaagccttgtttatttgaaaaataaagcaaggcttgttcaagtgcctccggtcgactcctcgatttcctggcacgagctctgggcgcgtgagggtgcattcaatgatggcttttaatgcagcgattcactttttgcagaggtcgattcgtttcactcccattgattgatacggcgcattaatggtgtcagacggatactgaaacgtttccaccgccttaattacaaattaacccgatccgttgatctttgggaactcgaattgtgcgtttccctaaccattcgattggtaggtgatagtgcctgttcctcatgcatgtttgcctatnnnagccaccacctttccttcatttcggttacttcccatttcttgcgaactttgctcaagtttccttatagagaaaaactcctcaaaccaagagaataccttcgaacact

SEQ ID NO: 109788 - DNA, 652 bp, Cannabis sativa
gaggtgatcagcgttccaggccctaggcaccatggttccgtccattcttttgagcttgtaagtctcggagccaatttcgtcctcaatttcgtatggtccctcccaattaggccacagtacccccactccgggttcttgagttgctaggaagactcgtcttaggaccagatcaccaatagtaaattttctatttttaacctttaagttaaagtgtttagccaccttcttttgataagctgtcattcatatttgagactcatcccgaagttcgtcaatctaatccaacacttcttataataaagccttgtttgttgttggatcataagtcattctcctgtgggatgggaatagcgtttccaccaggaccattgcctcacaaccgtatgccattgaaaatggcgagtggccggttgtggttcttggggttgtccagtaggcccataacactcttggcagttattcaggccaattgtttttgcaggccagcagctttttctttagggtaactttgaggatcttattgaccgcttccgcttgtccgttcgtttgttgcattgccaccgcggagaatttgacgactcagtgttggttgcagaagtcggtaaattcttcgcagtcaaactgccttccattatctgagactatcttgtga

SEQ ID NO: 109789 - DNA, 583 bp, Cannabis sativa
caaaatatgttaatctctccatttgcacataaaatacatctattctctctctttctcatttgtttatctcgatctctctcttgtttcaatatctctaattatttcttctctttgttgaatccactccccatggtctaaacccaaagatccattgtcgtgaaacccaagagtcactactaaaaaatttgaaatttttgcccattttatactatcgagtaaaaaattctcaacgatctataaaattgttgcaaatattgagtagaatagacaatggtagaaaaatgtcaaggaaaaaaattctcgacaatttaagatcgtcaactatagtcgatactatataggtcacggtttaaaaccgtcagctatactatagttgacggttataaactgccgtctacagacgattttaaatcgttgctatagtggattccttaaaaaaaaattatcatcttcatccttcttggaaccacttttcacatattttgtagccgctccaaaatctttacaagcttcatgttgtactcgtcttcatcctcctcaaaactttcttttacaagttttagattgtttttcacttgatgat

SEQ ID NO: 109790 - DNA, 508 bp, Cannabis sativa
attccggagattttattaaactctagatgtattatttgtgttatatgtgaattatgtaatttttataatttttgctcggcgacaaagaaaaatatgattgatggccatttgagtcacatgggtaagtctagaacctttttctgagtgggataagtgttggagataaatagaataccgagtttgagcggggtcatgatttttgaccattttattcctaagcttgaattagcttaagtttaagcatcacgggcattttggtcatttggcaaagggggataggtggctgatgggttgtgtgacacctagccaattctattttagcatagattaattaagattgaactagtcaaatgtgtagaaaaagtaaaaaaaaaatcaagaatacatgaaaaacaattttctttctctctttcctttgctcgaccaccaccaaaaccagaaagaaaccaactaatcctccccctttttttagaattcattaagaaatcaagcgagaatcaagtagagg

SEQ ID NO: 109791 - DNA, 549 bp, Cannabis sativa
gatttatgatcctaatttgaaaaagttagatccgagaacaaatcgctattattcaattagtcatccaatgcactcaaaaggctatcgcttttactgtcctactcgtggtacgcgaattgttgaatctcaaactgctaaatttctagaatttgatgttgctgaaaatattctctccacatctcttgaaatgggggagtcatctaaaggaattttaattcctatgtcattttcaagagatgataatagtagtcttaatcctactccagttggtaatgctcccattgttgataaatatattgctcccgatattgaagatgatgaaggtcctattattgatgaagggcccattattgaaaaagttcctattgttaatgaggatcctgttattaaaaaaattccagttgtggaagatgttattcaaaataatgatcaacaaatagaagctattccagaagtgcctcctctaagaagatcaaagagacaaaagaagtcaacaaagtgtcatgataattttgtttatcttggagaaggagaatatgatattgatca

SEQ ID NO: 109792 - DNA, 536 bp, Cannabis sativa
  modified_base (446)..(446): a, c, t, g, unknown or other
aaattagactaaaaaatttttttgaatgcggaaacaagtaaagggtgcatcaatacatcccttttaaggaagtacattgtagaatcaccctttattttttactaaattaagcacaatttgtcacatgtactaaatttgacacacattttacatttgtatatcactaacaaattacaaaatatacaaaaaaaatattattactaataaaataatattggaaaattttataatgtatctctttaaaagggatgtaccgatatatctttattggttttagtatccgaaataattttttagtcaaattttttctaatggtcatgtaaattaaagtttttaagaaattcagaaaaatttaacacgccaaaaactacgtccaaacagtgtattgcacgtgtgactattttattttatacgcgtgtataatagactgtttgaacattattttntatattgtaaattatttcaaaaattagactaaacaattcttctggatgtcgaaataaatagagggtatatcagtacattccttttaaaat

SEQ ID NO: 109793 - DNA, 1161 bp, Cannabis sativa
atataaaattggctaattagtaatttttcccccgaactttgatatgtactaaatcgtgcccttggactttttttggccgttagaattttctccgaactattgagattgttaaatttaaggacttttgtcttattttagtaaaaaaaatttaacatggataaaagttcaagggacatgatttagtacatatcaaagtttgaggggcatgatttagtacattaacaatcactgaaacagtaaaattgaatgaaattagataaaagtccttatatttaacaatctcaatagttcaggggaatttttaacggccaaaaaaattcaaagggtacgatttagtagatgtcgaaattcggaagaaaaaattactaattagccgataaaattttaccatcacaccaaatcatcaaatctaatataaattctttataaaaatatttttataaggccaaataacttagaaccgatcctgtaaatagtcctagtctactcacgtaagagattaacatgtactattccattataataatggtgtgcgtcctattggtcatttacaagataacactagaaaaaataataaataataatagcatttggcaggtattgggcgaaataaatgcaacagtaacgtattaaaaaaagttaaaattgttaaggttgtagagagtcatacatgtgaaacttgagttgatcatattatataattaggatggttgtgcgtagtagtctgtatgtctcaaacttggcaattttgcatagccaatgcatgtcatgaaacgtcttgaagtaagcaataagaagaaggctttttctgttgctggcatatataatttgatttaggtactgttgttgaaaatcagtttcagatgttaaatgctaggtttcgtagtagactctctctctctctactaataatttatttgttggtgttatgacaggatggatatgtttttggtcctaaattgacccaaagcacagaattatgtgaggacgtatttcattatgcattagataactatatatataaaataacaataaaagtcgcttgatttttttcaatgatactactccatgtaatctttttggccgattaggatttttaccacctgaactttgatatgtactaaattatgtttcctaaacttttaaggtcgataaaaatgc

SEQ ID NO: 109794 - DNA, 580 bp, Cannabis sativa
catgactaatcttatatatttttaacaaaaaaaatgacaaagagatagagatggagatggtggtgatagtgaaggaaatgaatattaatattacttttattaatttttagatacatagggagggcatgactaacatttaataaaaagtaaataaaaatgaacataaaagataaaaatgtgcaacactactattactataatcattaaataaaaatatatagaaagaacatgactaagtctatatatatttagtatataatagtatatataataaataaatgaaagaagaacataaaaataaaagtggaataaaaacttgcattactcaaatgtgaatcaaagatacaaaataatctcactttgcacatatggaatcatccctaaccttccaaggaagattaggtcattatgctaatcattctcataaaatttctgcacggctggagaggagaagagccaagggggcgctagttggattgcgtggacgaatcaggaggggccatgtggtgctgatgtggactcctgctggactgaaggcaaattgggccttaagctcttttgggctgcatcttttttttgg

SEQ ID NO: 109795 - DNA, 1044 bp, Cannabis sativa
  modified_base (677)..(679): a, c, t, g, unknown or other
tcagctaaggcttcgggggcttcgggctgaatcatatggataatatggataaatggataaaaaaagaataaaatattgggcaaaattgacttaatggcctgctatgaaatggaccagtttctagttacaattttgccacttttttcaaccatttattcttctttcaataataccatatcttccaattcaatcatataaatgccaaaactatttatttaataattataattaattatcaaataaattaccatttatataatttattaaggaaaatttgacatttaatgctaaaaggttacacatggttttaaaatattcctcctcactatacattttttaactatacttttaattcttttttaaccctaaaatatactttgatcaaaaccaaaaaaactcacctctctctctctctctctctctctctctttctctctctcacatgcctaccttagtgttgtccaacacttaagttttgccagtattgattcataccttgtaatcataagggtactatagtagatcctacctgtaaagaccacttagctttaatttagaaattagcagataattagggattaattatgaaaattatttattagtatttaattattttatgatgatttatttaaattccaaatgcatttttatgtcatatatagaaatttcataatttnnnatgttttgtgcccgacaacattggaacgcggtgtttggctattagactcacatcctagtatttttagtatggcagggtaataaatatagacattgggaatgtcgggaataatcaggattttagaatttctcaaaatacccctaagtgccattttatgatttttagtgtgggcaagggcattatggtccttttgccctaagttaagttaagttttgtcttttagggggattttaattaagtttattattctgatttttaggctaaggttaattagataaaagccttgttttatttcatttgatgaaaaataagaaatttaacaaaaagagttctatctctgcaagtcctctctctctctctctctc

SEQ ID NO: 109796 - DNA, 635 bp, Cannabis sativa
  modified_base (447)..(452): a, c, t, g, unknown or other
taaaaactgttattgctcatgagttgagattgaatccaataatattattttgtggatcctatcagactaaactgatctttgtgtgtagtggttgatctaaaaaatttggtgagtttcattacctccataagatacaacatacggaaaaattacaatgatacttaatagatcattaagatgtaactttcttagtcatcttttttgtttatgatttaacatatatacattacatatggggattcttgaggtggtacaataataattagagtaatttgcgatataaatattgaagtttaaattttagatgcaaataaatacctaagtttaatttttagcggtaataatacttaaattatattttcgaaactctgtaggtacctgactgttaaataataagtcataatccacgtgtcattttttcactagtatatttaaattatttttttnnnnnnaaataaaaatttaatgatttagactaatcaggtattgtcacgtgccaatttactaatatttagcagttatgtacctacaaaagttttaaaattataacgtaggataaataacttagatatttatttgcaattgaaagttaaacttagatatttatgcgacaaattactctaaatattaaaata

SEQ ID NO: 109797 - DNA, 1026 bp, Cannabis sativa
  modified_base (606)..(606): a, c, t, g, unknown or other
cttccttggcctaaatatttaattggaacacccgaggtaacttttgttataaattaattatcaatgattagtggagtttgaatatcttaaatattcaagcatagtgaagtaggttctgcgaatacatgtgttatggtccgatggatgaatgaacaattttttttatctattttgtttgttattaggtatgttttaaattttttggggcattatattacagtcgttatgctgccgaaattcgatagaattaggatcaaatttgatatattatatggtgttttgtatagggtccactagctcaaccgccaacaagacatgatgtgtcaaaggagaaagatcccatgccttctcgaaaaggcggtgctgatcaagaagatgaattattcacaccagagatcatggctttaatccctaagtccctaaaattgatggttgatgaatttctaagggtcaaagataaacgtgatataatcacaattcgggtaccccgaggattcatagcacctcatacccagatcacgttatctgaagaggatttgtagcaggttgcattgtgtgacttcatcggcaaccagagaatgatgtttggaatgatgtatactcttntttaatctaattaaccttatatattaaattctagtaaaattattataaaacactaatatttaacaatttaatgcaggcacatctgggagagcataaacaatttgagaaaaattttcaagttttacgacccagagcttctcacaatgaatgttatcaacaatgaagagaagagtcagtcttttgagaatgcgtcaaaacgattggccctttggttatcatcgatgaataacaactactaaatgttctttattccctagaatatcaggtaaacactatttaattttttagtgctaattgttttctatattatagcttgaaattatttttatactatcttacatacatcccaatataatttcttagtgcgcattggatgctagaaatcgttgcgccagtaaaagttatccatttagacctata

SEQ ID NO: 109798 - DNA, 934 bp, Cannabis sativa
  modified_base (43)..(49): a, c, t, g, unknown or other
  modified_base (252)..(269): a, c, t, g, unknown or other
tttcggccaatgtgtgcaagttttcagtgttgggtctttgacnnnnnnnaaaatccacaaatttcccgacgtgtacacccacaaatttcccgagatttggccttgtgggattctttctaatgtcacgttcgatcctgtggtttcttaaaggtcgttcgttatacccacactttccaggcccaaacgtgaggagggtgtattaagagttagtcccacattgctaatgggtggaaataaattgtgatatataannnnnnnnnnnnnnnnnncccattgccaattggttttgagatggaacctcattcatcttatccccaaattctaacaatacataaatccactactggagtggattacctccaagagtttctagatgtacttacgtggcccacacgtggtttccaacaaccaaagacaacttctaaattcgacgtagattatcctctcgatacactaatacagaatttaggcagcccttaagtattcgatattagactattgcagaagttcttttatattaaaaaatttattttttattatctctttttatatataatataataaatatttttttgatatatagtctatataattaatgttcataagaacaaatatgtacttacaaaaaaaaataataataaaatcttgtggtctcaatatacatgatttttaaattcttgcttattttagaatttatgaaacatttttttataactaaacttataaagtattaattaataattttttttaataaaaaattcaattttaattttccgctcaagaccctcaaactgtttgagccaaccctaagaggatctatacaatcagtgttcacacaagacacattcacttttttcctatgtatgtaactagtgcttgtcacatcataacaatacaagactaatcataaattatatgccttataagtttggta

SEQ ID NO: 109799 - DNA, 1057 bp, Cannabis sativa
taaatatttacatttatactgccacatgaaaaaatttatatttttactgccttggccaaattttttttactgtaaacactaaaaaaaaaaaatgaagcctccatcttccacacccacgaacagaactaccacaacaatatcacaacaactagaaaataactattaatttcgacaagatgaaggagaaacattaaaactattaatatttgggctatcatggttattctaatgttgtttttttgggttgtttcactattgtctcgtatgcttaacaaagttagtatcaaattacacaggttaaaccaaccactgaatatttgtttgaggtaaccagaatgaaagaatcatggacagtaaacctcaaagagagaacgcacacgtgtaacaggttactacacaagctctgttcagattactacactaagaaaaattggctagcaacttattaaggaatattgtacctaataggacaccaaaatgagtgggatgtagcacaaaatgtgaacgatgtaatagccttacctcccattgaaagggtaaaatctagaagataaaaaaaaaagatggaagctggctgagaaaagaaacaacataacaaatgcagcaaatgtgaggagctagggcacattaagaaaacatacaggagaatccatcataaatgaaaagaatcagaacaactaaaaaataataatgaaacaatggaggaaatttgaatatatattagagcataggatactgaaagaaataacttacatacaaattttattattttttattactattaaaaatagagcagtataataatatttagaaaatgtgataaataaatgaaataaaacaacagtaaaacaaccttaaagcaatgataaaaaaaaataacaaaataaacgagtaacagaaaatatatatattcaatcctaaaaatctaacagaaacatatgtaacatgaagaactaaagaacatttatatagaaaaactagatattacccataatgataggagggagaagagagagaagataaaagaaaaggggagggatgagagagagagagagag

SEQ ID NO: 109800 - DNA, 1013 bp, Cannabis sativa
gaagtatttaaacagctggagtcccaggctcttggttcgagtcttctgggccggtaggaggtggaggatctgttgtctgaatggaaggcacattaacgttctggccagaagtagaagcagtagcctcgggttcaccagaagccacttgggaagcacagtactcgagatacatgtctttggcctcgcccaggtaatcaaaatttgcctgagggttagccttccaaaagtcataaaaaatctcgaggcactttttcttcctacttcgccatccccgacttgtacttctcaatctcagctgtaagctcctcctcctgggtcttcttgtcctcttctagccgattgaagacggtctgaagaactcccctctcatcctgaaggctattcacttgtgcagatagggagccaatggtagcctgaagctggtcgaaagcctcgaggtccttagtcgactcagttactttcttctcagcagtaaaaagcttcttgttgaccacaccctgctccatccgcacagctccgagctccaccctggcatcatcagaatccatcctggccaagtccaccatcgccctcatggtgttggacagagtagtgttcttggaggcggcagatttagcccggtagtaagtgtaagccaacttcagaccaacctgcacagagaaaaaactttagaatctatgccaagtaaaaaggattgaagggaactgtcaagaaaaacttacccttgtgaatttcttcaagactcctcctatcagcagttctagagaagattcgttgttagcaccggccagttgctcactcactttaggaaccaacaggttcatgtaatgggcgagcatctcctttcctttcttggcctttggaagcactggcaaaggtgcagtaggagcccgcatctgctcggatctacttttggccagctcggacccaccttttgattgctcaggcctgtctgagtttcctcctcgagaatctttagacttagcaacttttggagtagaggggttcgcaac

SEQ ID NO: 109801 - DNA, 1166 bp, Cannabis sativa
tctgttgggaagtatgcagcaaataaatcttcatctccaaactatcaaaatttttagaaaaaccatcaagcttgacagaattgtcactctcaaccacagaaggttgttccggaacaggaatactctcgtaagaattgtaatcagtgtcaaacttgaaactgctcaatttcaaagctttgaactcaacagcagtgggtttcatatttaatagttgcagctaagaaaaaagcaagaaaaggaaaaatatacatgaggacataaaaaacaacaaacaaatataccttgtctttggagacataaaaaatagtagtcttcaaaattttgaaagtcggctggctggtacaaggccactgaataatccttggaatacgagaatttttcttttggcaatacttacatttcatgtacttacaacactcataaaaccaaacttgaaatacatgaggacaaccaatcaaagtgtaaaaaacactcggcctctttcctaaactcttcgtctttctaacactttcaacccaactgtcaagcttacccttcaacgacaaaatagtcaattcaaaagaactccgtccccaaataaattcatcatacctcccactgtctacaacatctaaaatggacctatgaatatttttatgcttagtaccactaagcaaaaaccattctacaaaataaagaactgccaacttaacagcatcctcatcagaattaccccacctctttgtggtaaaacattccccaacaaattctttagtaaagtaggccaatatttcaaacagagactattaacgtcttgcttaaaatccaacacactacaatcaccttcacaatctaaactagttatcaacgcaaactcctcaatgctaaacctaattctaacaccacgaatcataacccacaattcagcatcattaggttgctgaaccacccgcaacaacaacccataaaaaacttgcagttgaactttgaactcaagaagcttaatgaaatgcccaaaacaagtttttgaaaacatttcaagctggttaggtgaaaggtaagtcttaatattatcaataacctggtatgaagtagtggagacggctttcgcaagaaacaaattcttctggtcatatatgtaatcccattcctgcagcagttccaacaaacaacatgaggaaaacaac

SEQ ID NO: 109802 - DNA, 564 bp, Cannabis sativa
  modified_base (511)..(539): a, c, t, g, unknown or other
aggaggccagagagaggccactcaccaacttgaataatttgagtgagcggccaaaaaaattgttcaaaaaggaatgtgatgatatcacatttatggagagcgatgccaggtgggttcaccacccacatgccgatgcacgagtcatcgtccctaacattggaggagacaatgtccaccgcatactagtggacaacggaaattccgtgaatctcttgaactttcaagcttttaagcaaatgggaccacaagagaaggatctgcggcccgtcgtgtcgagtatctacggttttactggagacaccatcgctttgaaaggaatgatcaaactcctaattactctgggaaccgcacctgttgtggctaaatcgatggctgacttcgccgttatcgaccaacactcggcatataatgttgtgattggtcgtcctatcctgaaggagatgaagcttgtgacgtccatttatcacctcaccaggaagttccctactcccgtgttggaaattattttacnnnnnnnnnnnnnnnnnnnnnnnnnnnnnttattaacatcctaaataagaactt

SEQ ID NO: 109803 - DNA, 1415 bp, Cannabis sativa
gtttgggtttttgtcctagtctaggttcgggtttgagtcctagtcttggttcaagtttgggtctcggtctgggtttttatctgggttcacgttcgggtttaggtcttggtcttggtccgagtcctagtccgattctagttctagttgtgattcggagtttgagtttggattcgagttcgggtcggggttcaatccctggtctgagtttgggttcgggtccagattttggtctaggtcaggatcaggtttcaggtgtgggtccaggtccaggttcaagtccctagttttgaactcgatctgtgtgtgggttcaatttttaggtgtaagtcctgggttccgatctctgtctgtgttcgagttcaggtttaggtccaggtctatgtttgggtcttattctaggtcttggtctgagttcgggtcccgagttcaggtccgattttgggttcaagtctaggttcaagttttgtcctggtctgtgtctaggttcgtgtcctggtttttgttcggggcaggttttaggtccgggtctaggtctgactttggattcccgggtcctgctcagggtttgggtccctggtcaaggtcccccatctaagtccggttcctaagtcttggtctgggtctaggttttggtttgggtcccgagtcttagtttgattccagttcccgacccaagtttgggtccaggtctcggtcacagtcttggtctaggttcgggttctggtccctatcagggtccagaacctggtctacgtcccggtgagtgtataggaccagttcaggtccaggtcgcggtacaagtttaggtcccaggtctcaggtcccagtcctagtcaaggtctcggtctaggtctcgtcttggtttggattatggtttgggttcggttctggtctcaggtccgggtcctagtcacagtttcagttcaaattctcggaccgggtttggtttcgagtcagggtctaggttcaggttggggtcggggtctgagtgttaatgtgagttttggtacgggtttttcgaatcccgagctgggtccaggtttgagtttggttcccaagttcgagtctgggtctacattcgggttctagtccaggccccgtgttttgatcctagtctgggtcaaggtcagtatttggttctaggtctaagtttatgtccatgtctaggtccaaatcccagtctctatcatgggcttggtctgggttcgagaccaagtcccgagttcaagtttgcattcgggttcgagtctcagtcctagtctgcgttcgggaccaggtccgggattgcgtctaagatcgagctttcgggcttggttatggtatagtttggatccgagtcctgagttccgatctaggtctgggttccaagtcccccatccaggtccgggtcctaggtcccggtctgggtccatgtt

SEQ ID NO: 109804 - DNA, 971 bp, Cannabis sativa
gacatttgcaaaaacacggtttttcactaataacaatatgttacagtcatatagcaatattcttacaaaaataattaagaaaaatagtgtgtaattagcaaagattagtgagaagaagaaagggataaaaacatagaataagaatatactattttagaatgttggattaaacgaaatcttaagtaggtggattattaaaaaaaaattacataaaatactaatttttataaatttttaacatttttatgtttaatttttttatatatttttttacaatattctataaaaatacaaaaaactcacacaaaagtaacaagaaaacaacatcaaaacaagaccaaaataacattaataataatatacaaataacaacaaaataacaagattacaacattaaaatactatttttttatgtaaataaaagagtaatttacggcataaatacctaaatttagctcccaattgcaaataaatacctgagtttaattttttaccgtaataatacctaagttataattctaaaacttttgtagatatttgactgttaaatgttaagtaaattatcacgtaacaattcttaattagtctaagtaattaaatttttgttttttaaaaaaaaataataatttaaatatatcaataagaacatgacacgtagataataaattaatatttaatggttaggtactacagagttacaaaaatataacataggtattattaccgctaaaaattaaaacttaattatttatttacaatttgaagttaaacttaaatatttataccgcaaattattttaaataaattctaaaaaactataaaatattaaaaatttcgtagagtacttttataattatttttatttgtttatgtttttctttttttttttgatttgaaattaactcgccattttggaccatgtattttgcaaaagttacagattggactctgtgttttgttaaatgataaaa

SEQ ID NO: 109805 - DNA, 879 bp, Cannabis sativa
ggaagtcttcccatagcgagacttcccatagcgagacggacacctcgcttacttggtctcgagccgatcacaccgttacacttagtttgtactctaagggctttcacaattgatatatgttgctttcgtcttcctaggtgtactgtccttgatgcctcgctattcactttcagcgacatatggtttctcgctaatataataagtgccattgtgtatattgattcctcgactaagaccttacagttagcaagtttcaaatatactctgatacttacttaattaatgagttattccataaaaggcgattacatcgattcatattccttttatcttgacacgtgtcctccactgagatggcagctgaatttcgggtataacaattgcccttaaaaagttattttttttgtaacaattactttttaataattacataaggcatttttgtcaaaatcccttcttggaaaaaatgcttcctttgattctggcggttgtacagtttcgagggtcattatgaatcacctcttcatattctgctctactcccaaccgttagatatcccaatctttggctttcttgtcactggactttgtgtataaaagggcggctcaagcttgtcaattttcacaaacttctggctttttttggagagatccatttttagaatggatcatctctttcttgctggaatgtcccttccgagtttagaagttcactctcccaaactcatgataccaggatgcatcaaccattttccatttgttcccaagaactttaagcctcaattggaaccagaaacgatggattccaaggctaaggagctttcgaccaatccaaactaggggaaccccgtaatctgctaagggagatcctcacaagtga

SEQ ID NO: 109806 - DNA, 559 bp, Cannabis sativa
  modified_base (73)..(79): a, c, t, g, unknown or other
  modified_base (524)..(528): a, c, t, g, unknown or other
acaaatgaataaaaaatacttctattactttattgatattgaataatcaggattacattgaaatggagttttnnnnnnngcataaaacccaacaatatatatttacatgtttagcgtagatattgttattgcctgttagagtacattgatagcggtatcagtatacatagagttgtactagatactgataaatgtatgtttggcttaaataatgatcgatgttatcacatcaatatggctagagtacgactagcatattgagtataggctgatattatggtcgatagtattgttgtatgaatgttctagactcggtaccgtgtggaacacagggatagggttatgattgggtgtatgggcgcctaattataatcaagtttattattatgttattacttatgcttttcttactgagtctgttgactcacagttgctatttccatgtgtaggtaaaggcaaggctaaggctaaggaggcgtgagagcgagcagatggagattatgcatgtaaagcccgcttagttnnnnnggaaattatcagttgtttatgattaattatg

SEQ ID NO: 109807 - DNA, 585 bp, Cannabis sativa
ttgggaaaacaagcttggaggttagtcacacaagatcactctcttgttagtagggtgtataaggcccgttattaccctcatgggactattctgatagcttctcttgggccaaatcctagtttcatatggaagagtatttttgaaacacaagatttgatcaagaaaggggctcggcggggtgttggtccaagcacaaatgttagtgttcagtttgatccttggcttgcagatgactccaacccgtgggttacttctacggctgagggtatggcgacttggacggttgacaaccttatggtggttggtgattgggtttgggatattgaggtggtttcggatattttcaatgatcgagataaggagagtatcttaaagaccgccattgatcaggagactccctttgacacttggtattggcatatggatctccatggcgtttatactgtaaaggaggcttaccgattgatgcaccatgcagagggcactaatattagtgattttgagatcaagatttggaaaattgcatggaaactccaagttccacccaaagtgcacgaacttatgtggcgtgctttgtctggttgt

SEQ ID NO: 109808 - DNA, 504 bp, Cannabis sativa
actgctcacagagtgggtcagggttcctccgatgcaccgcaccgctcctacccaactcttccttcagcacgccaaggtcttctccacatacgacaaggactggcttaatgtgggggacttagtcgtgacggtgcactgcaggaaggctaagctcatcacggaaagccaatcggtggatgacttcaacctgtccaaggttctttaccccaatattcgtaccccgaatactgaaaaggcactccgggcggacattatcgccttagcggaggaccggtatcagaagtacctctttaggagggaacaagagttagcttatattaaggctcaagctgctgccgtgaggactctctgggtagaggctgataaagagtgggggtcttctcggcctaagctacggctcccggttcccaacactggggctcctgacaccagtacctccggatccggtaagtctcccttagttgttcatcatgtcccttctgctcaagattattctcgatgtag

SEQ ID NO: 109809 - DNA, 506 bp, Cannabis sativa
actgattattatacaaaaatacttcattaattatgtgagaaaatcattttttatacgtttacttgctaacaaaaaaaaatacttacaatattcaaaactgtttataacaaatgttacaaatctatactcattatgacatcttaaactataaagtaacaacctattgttttaccttataaccatttgtgcaacataatctataaatgaacctactagtttattactgtatgcatatcataataaaccttataaaatataaaaatatacacattcttaaaacagcatatatatccacataataatatagtatattaatattttattgttttataaactaccttgtaaacatatatgtatatatttcagttaatcaacttattggtttattgatgcaatcgacaaataatacattaatacatgcgagtatacatgttaatctaatctcataaacaattaaacaaaaacattgctcatttataacttcaactaaaatatttatttttata

SEQ ID NO: 109810 - DNA, 562 bp, Cannabis sativa
ttaagtgtaataaatatgatgtgactttgtgttgtactttaatgatagctttttttaactaaaattatattatatttagataatataaaattaaattttaatttatgttgtgtcagatttctttttttttatttttctttaattaaaattaatgatgaaaaattatattatattatactatttttttaaaaaaaattgttttatattgtcttgtcacttggcacggtttccaatttttttttcatcacaatacacatgttacctcacattttttcatttcttcatctcttttatcttatatttttttcattatcacctttattcttaaactattcatctctctcctctattaatcttcttcttgttgttctttttttttttttatatataatttaagttattttaaaagtttgattttacttggtattgtcacatctatgacagtattttttgtctcttttttaatttaattttgatgataagtatatcacctacactatttaatattactttcattattctctctctttattcatcttcatctttgaggggtttttttttt

SEQ ID NO: 109811 - DNA, 723 bp, Cannabis sativa
  modified_base (148)..(153): a, c, t, g, unknown or other
tgagactctaagaaaagttataaccttcataagcaatataacattcattcaatcatactataaaaaaatgtacacaattgcaatttatcacgtaataacactgtaaagaccgcttagtttaaattggaaattagcagataattagggnnnnnntatgaaaattatttattgatattgaaataattatttatgttgatttatttgaatttagaatgcattttatatgccatatagtgaaatttcatattttttgcatgttctgtgcccggcaacatggaacgcggtgtatggctcagtagaatcgcattttagtattttagtgtagcgggacggtattgttaaacattgggaattttgggattggtcgggaatttagaatttcccaaaaatacccttaagtgctttttaatccttttagtgtgggaggggcgaaatggtcattttgccccataagcttttgtcctttagtggacttagtattaagtgattatttgatttattttaagttatgttagctgaaataagttgattaatattgtatttgctcattttttattgaaaaatcaaaagaaagacaaaaatcattttctctctcaaaactctctctttctctctttcagccatcctaaaaccagctagggtttatgattttgcttgtttccagcagctcatagtgtaatccaagccaaggtataatttttagcaacctcctctttgttttct

SEQ ID NO: 109812 - DNA, 530 bp, Cannabis sativa
  modified_base (397)..(398): a, c, t, g, unknown or other
cctgcctatgcctaggcccgtgcctagggccggccctggactggtcatgtatacacaaagtatatttttagtggtccacataatattaattatttaaagattataaaaaaaataaaaatttatttttggcggtaataatatctaaattatattttggaactctttaattacctgaacattaaatattatgtcattatccacgtgtcattttcttattggtatgtttaaattaattttttaaaaatttaaatgacttggaccaatcaggaattgtcacgtggcaatttacttaacagtcaggtacctacaaaagttctaaaattataacctaggtattattactgctaaaaattaaacttaggtttttatttgcaattgggagttaaacttaggtatnnatgccgcaaattactcaaaaatttgttatagtctcttaattaaaatagttttttctaaaagttaggttggaagctttagagcatgtttggtattgttttctgttttttgtttttaaaaaattgtttttaaaa

SEQ ID NO: 109813 - DNA, 518 bp, Cannabis sativa
  modified_base (350)..(356): a, c, t, g, unknown or other
gacccgaacttggacctggacccgaacctacacccagatcgaggtccagacctggacataaacccaaacacagactcggacccgaactcaaacccacacatctagacccggacatggatacaaactcaaacccagacgaggatcagaaccaaggacttagaccctaaactaaatccagactcagatcgggattggaaccatggactcggacccaacttagaccaagacccccgatgcgaacccacacccggagactgatctggacctagactgaaatcaagacccgaagccaaactcagacaaggacttgaactcaatcccgaactcaaaagtggacccgaacccgtacnnnnnnncccaaaattggaaccaaaacaggaagttgaccaagactggaatttggacttggacttggaatcataactgaaattggacatagatccagaatcgtaaccagagcaggactcaaactccaaatcagacctagacccgaattgggagctggacccggatcccaa

SEQ ID NO: 109814 - DNA, 826 bp, Cannabis sativa
tgcccgggaccttttctgctcaaggcatcggccacaacattggccttcccggggtggtaaagaatctcacaatcgtaatccttcaataactccaaccaacagctctgtctcatattcaaatctttctgagtaaagaagtatttgagacttttgtggtcggtataaatttcacacctttctccgtaaaggtattgccgcgagatcttcaaagcaaatactactgcggccaattctaagtcatgtgtcgggtatcgttgttcataatctttcagctgacgggaggaataagtgataacttggtcggcttgcatcaatacacaccccagaccctgtctggatgcatcacaataaacaacgaacttttctttgtcagaaggcaaagctagcactagagctgtaatcaatttctgtttcagctcctgaaaactagcctcacatttgtctgaccatttaaactgctgattctttttagtaagctcagttaaggggttgagatttcagaaaacccttccacaaaccgacaataataacctgctagacccaagaagcttctaatttctgttactgtttttcagtctaggccaatccctgacagattctatttttcctggatccaccttgatcccatccttgctgataatgtgccctaagaaagacacctaagatacccaaaatttacatttcttgaatttggcataaagcttctgttcccgtagtcgttgcagaagcattcgaagatgtacctcatgctcctcttctgattgagagtacacaaggatgtcttcgataaatacaattacatagatatcaaggaaatccttgaata

SEQ ID NO: 109815 - DNA, 620 bp, Cannabis sativa
acataccccttttctcatcaatatgattgaagcgggcctgtgagttctgccaaagctggtataaagcgtcatagatatgaaacttttccgagaaagcttttcaattctttggctgattgcggtaccttcatggctagtatagccttagtcttatcttcgtctattcttataccatttttgtgtacaacaaatcccaaaaatttcccagcgcttacaccaaaggtacatttaagaggattcattttgagcttataccttctacttctttggaatgctttctcgaggttgcaaatgtgatcaaatttctttttggacttgacaacaatatcatcaacatacacctctatgctttcatgtatcatgtcatggaatattgcagttattgctctttgatatgtggcaccagtgtttttcaggccaaacggcatgacagtgtagtagaagtttccgaacggggttcgaaatgtcgttttcactgcatcttccttggccatctggatttgggtgtacccgctaaacccttccataaaagaaaacatttcacaatttgctgttgcatcgactaaagtatcaagatttggcaaaggaaaatcatcttttggacaggctttattaagatc

SEQ ID NO: 109816 - DNA, 942 bp, Cannabis sativa
atcattttagaaagttcatgtttaggatgttaaataacatatttgtgagtagatctaacatcctggtaaaattatttccaacagcgttacaggccaaggcgtaggagctgatgacatgggacgaggctgtggccaaggcgaggcgcgagctaggggaggccaaggaggcagttgaggatctgactgctaggctgaagtctatggaggagctgcatcaggcggacttgcagacgatgaccaatttgaccgttgaggtgaaagagctcagggattttaaagatcaggccctcaaataggctaaaagagatgagctcctagcccgagttgtctgcaatcattgcactaagcgctttgatgacggcgtctttatggcctggcagactaatggccaaaacctcaagctcgacttctatccaaagcctgaggaagtccttgttcgtttctgggagaagaagaagagacttgatgccctgctggaggagcgcagggggcctcgtcttccaccccgtattgattaagccaaccatcatccattactgcttttataactatcttttttttcttttttacatttacattcctttttccccctctcagacaatttatattattttttaagggtagacaatttaaggcctgtccccaggcccttaatatctttttaaagcttattgctgggtttgaacatcttatttttatgtttaaatacatactttgctttgcttttgttaaacttttggcctattttacatattccgtgtggtatgccttactaccccctgagtgtcatgaaaattgtttttagggcactcagctttacaaatattaatttagaggttgcacatacttgtccaggacaaatttactttacaaagcataagtttatatttcttgactattggtaatactttcagaggtgatcggcgttccaggccctaggca

SEQ ID NO: 109817 - DNA, 745 bp, Cannabis sativa
  modified_base (202)..(203): a, c, t, g, unknown or other
gctaaaacatattatatgaaaaaatataagttaatattctttttaaccaaacctactaaaataattaaagggtttttttatttttacactttaaaacagttttttttttgtatttttacagaattctacataaaaattcctattacaattagcgctgtaacttaaattgcaacaaaaaattgtatagaaacccctattgcanntagcgctgcaaccactttacaaattcgaaccgtaaatttgaaaaaataaaatagtatatggggtaatattattcttaattttttttttacatttaataaattttcactatttttaaactattttcttaaaatcacatgcatataacattaaaaaataaataaaaatcatttgttgttattattttatttaaaaactaataattaaatcatattaattcgcaaagtaattacaaagtgcatcaaaaaaaagaattttttttaatagaaaaaaataaaataaaattttaggatcaatgccaaacaaactttttttaattatttttttcaccactatttattataatcaatttgaaagaatattgctttattaaataagtattcatattgtatttttatgttttccttcctaacttcaaactcaatcaaataaaacacatgtaccttttttttctttttcctttatgtatctttagtagaaaaaaaaatggatttgtacccaactcacatagtttctttccattaaggtttttatttttattttt

SEQ ID NO: 109818 - DNA, 507 bp, Cannabis sativa
cactgggcatgtgatagacttcaagtagtgcttctcttctgagaaggagggttgaagacatttcatacccccagtgatctttcacgcacaaaaaactttgtgcacgcgagagtcaggttgaatttttatgaggcaaaataattgaatatgttttattttggtatttttgcaaacatgtttacttacttgttattttctgaacttgtgtataaatttaattgaaccaaatgattttttctgtttattgatatttgtagtgtcaaaatgaacaacccacaccccaatcctcaccttttacatgcctttgcaaataaactctatagtgtgaaaatgtctcctgataagagcattaattcacacttaatcatgatgaatctaaagttccagaaagaaaatttcttaggaattgatttatcaaaagagtaatggattcaattcattctaaacagtcttccacctgagtataatggatttgttgtatcatacatgtgttggaattattttacc

SEQ ID NO: 109819 - DNA, 954 bp, Cannabis sativa
  modified_base (905)..(913): a, c, t, g, unknown or other
tggaatgccattccaatactttaaaatgcaaccaaataaaataatggaataaaaaattatttcctttccattccattccatttcattacctccaactaaacgctacctaatatgctttctcttgaaatgtattgaaaagaatttagtgaaatgtgttttaattatatctccttttagttgaacgatacaagcagtattatcttcataaagaactattggtgttgatacttttttattgagtgcaatccatatatttcccgaatatgttatatatgtcatgagctcactccgacacattctgtacttgcttcataaagtttaagtatgttagcataatttaaaattgtctcattaaaaaccttgccaggttagcccagtgggacaaaatttgagctaaggggaaaagagtctaatatatatacttcatattcataattatttgtaaattgtctcgttaaaaaccttgtcaggaaaacctagtgggacaaaacctgagttaaggaagagtgtaacatgagtatgtctcctcctcatggacatataatccataattattttggtgataatatgtctcataagattattgttatcacttttaaaatatcacaatatgttatctatgaccatatattatctataactctttcagagtgtatgtttggacttctgaattatggatgaggggttcttggaatatcaatatttatccaactaatcgaatcattcatgtgtgtatacaaccttgttcatactaaagtttaaaatttcaatatgaacataacacattaatgataatataaatttttatttgcgacaataatgatactccaagactatatatttgttccatttctattgaacatatataacacattaatgataatataaattttcatttgtgacannnnnnnnnctccaagaccatatatttgttccatcttgttgtatgatctt

SEQ ID NO: 109820 - DNA, 1122 bp, Cannabis sativa
  modified_base (31)..(32): a, c, t, g, unknown or other
gtgtttatttttatcgttttagaagttcatnnttaggatgttaaaaacatacttgatagtaaatttaggtcctagtaaaatatatttcaacacttacgctcagtatgtcgccaataaaattgtatcacctaatcatgtgagctcgtacctacgcttggtactcatcatatgtcactgacgcctgtacttacgcccagtacgtcgccaggaaaatcatatcacctaatcaagtgagcccatatatcacatgcataataacgtcacattatcaatattcaaccaatcaatcttttcattatgtaacaatattaactatatttttaatatcaatcaattcataacaatactaattatattacatacaacgtattatgcaattaaatatatttttcttacctttaatccatgttcatacatgtcgaccaatccaagtggagaactattcccgatgatctcagccctatgtcataacaacggtaaaccaataagtgtttatcccaaaacacgacttaatattcacataagacaatctagggttttttaccgaatcatgcggtataaatacacaaaaataaaacttatattttggctctaaaacatacaccatgttgtagagctcgtcttgaagcttcgaaacggtatatagaacgtccaaaacggacacccgagtcaaaagttatgataaaaatacgatttttgatcttctaagaatttctaaaaactgtgaaacacgaaaatctcaattttcgcactcactgaaacactaccaaaacttattcaaatcacttcaaacttcacagggcacatatatatcataaaaaaaaaaatcgcacaaaatttaaatataattataaaatcattataataagtaatgagaatcaatagtaagagagttattcccttacatttgtttatttactttattaaatttaataaaggtaaaacttgattaaataaggaaaaaaaaagggagaactcccttcattaattttctaaagaatgccattaaaataattgattttattttattttgtaatattaattttataattacaattttatcctttaaaaatatcttataagaaaaattaccatatactatagtttaactcaaaagggtaa

SEQ ID NO: 109821 - DNA, 1933 bp, Cannabis sativa
ttgggttgaaccaagatgagataaacatttttaagtgtattaccttttaatataataaaaaatatctagcataaaatttaatatacgtgtctttttactagtatatatatatcgatttatatctctcattctcattctaaaaatacactctaaaaatacacgattagtaccacttagatttttttttttaattattgctataaacaaatacattatatacggatttatatctctcattttcattcgatattttttatttcctattgatggtataaataattaagctgtgatcttaatagattttcattctcgataaaaaaacctttcatagtttgatcaagaatgatgacaaaaagtaatgtaaagttttaaatttgattttcttttaattaattttttaatatatctctttcacatttatataatcttacatctatatttttttttcctaaaaaatattttaatttttttaaagaatttataacatagttttgacgtcagattttttattattagtgttttggtttgatttatttgatttagttgcattataattgtaaaaaatgtttagatgattcataattaaatgtattttcaaaatataattaaactatacgatttattaattttacatattttttattttttattcattttatatatatatatatcttttgttttttaaaactattttttatatatcacatatcttcttttttatttttattcatttttttttaattttgaattacaaataatatctatcatctgtctatctatctatctatatattttatgagtattaataactaaaaaataaaaataattttgtcaatatatattaattgtaaacttattttttctaatatattttttattgttttttttttttttgaaaaggcatatattttttatttaaatatgttaaataattgtttcacatagattattgattattcttttttgtaagttataattaaagtttaaatgatagaaagatttatgttaagttcattgaaaataattttatgttaaatttttttatagattttttattttgtgagttatctagaaagtttttaaattttaatctttttactattaggcatataaagcattaatttcatggtgatatttttttcattctattatttaaaccaaaaaaaatataaatattccaaactaataagctatacacatctaaataattcatatataatttaaaaaaattaattcaaataattttattaatatattttttgtcactgattttgataatattattcgctcaatctttgatacggccataataacaattttgaatgtagtgataattacaaataaaatacgaagatgataacaaatttgaatatagtggcaatcataaatgaaatacgatgacgatattggctttgattgtggtggcgactgtgaatacagtaatgacaacgactttgaatatagtggtgactacaagtgagatacggtagtgacaaaaatttaaatttgtttcatcacatgacatgacttttgtggtttgtagtgttcaacacatttctattaaaccacaacaaaaaattattaatttaattttatagtcagaatttcttttaatttaaatatttaaaaggacttttatttttatcgaatcgattgatcaatcaaataaattgtttgttttaatatatttgatgtgtttgtattcacaaacctaaagaaagaaaaatatataaatatttattaatatatatttttgattataatatattctatctaatatcaatttatatttttatgtaataattctaatagataattgaataattttgtacatatcattttaataaattagatattttaaaatttaaaattttatgttttcattttattattttaaatatttacaatattttatttattcataaatatctaa

SEQ ID NO: 109822 - DNA, 583 bp, Cannabis sativa
  modified_base (555)..(557): a, c, t, g, unknown or other
ttaaaagtctaatacatataatacaattatattgcaaaacttttttttgggaaaatcagcagtgtttttcattactccaaataatatttacatcctaatcagcaccttttataaaacaaggtctgatagtatttactccaaactgattacaaagattacaactattacaactcactataccaagttgtatcacctatggacacttttctaggccatatactttgtattctaatcttacatgtatgtttaatcaactgtacaatggtcttcgagtcttcttgcgtctgctgccatagtcgagcattcatattcctccatatttgatacaaaagggcagcacatgcagcagcaaatacctgctttcggaaagcagagtatggtcttttctctataacacgcaccaggtccattaaagaggttgctggtgtcttccaacccagccaattcttgatctgttgtaagcattcagatcaaatgtatttttttatatattgcaaaacttaatagataaaatgtatattctattcttatatatttttttctacatacaatttnnnataaaattaaatattttttttatata

SEQ ID NO: 109823 - DNA, 626 bp, Cannabis sativa
cttgaagaagaagtgtatatggagcagtttgtcatcttcgcaaatctttatatggattgaaacaaagtctccgtgcttagtttggtaaatttagtcaagctattgacaaatttggtttagtgaaaagtaagtcagatcattctgtgttttataaaagatcaactgctggtatcattttgttagtggtgtatgttgatgacatcgttattactaaaaatgataccgaaggcatctcatcccttaagtctttcattcatacccagtttcacacgaaaaatttaggggagcccaagtatttcttggatattgaaattactcggaatagacaaggtatttttctgtctcaaagaaagtatggtcttgatttgttaactaagacagaaaaattgggagcaaaccttgtaatgctccaatcaatgaatccagctgtgcatcttacacgtgatggggaaccatttgaagatcctagaaaatatcgcagattggttggaaagttaaattatctaactctgactcgtcaagatattgcattcccaattagtgtcattagtcagatcatgtcttctctaacaattcagcattgggcagcactataacaaattttatgttacttgaaagaagcacca

SEQ ID NO: 109824 - DNA, 761 bp, Cannabis sativa
aaatgattttggttaagaatataataaattatgcattatcagatacgttaccctaattaagacaatttaaaaaatatgtatatataatcatattcaaatgacactttgattttaagtttttttttaatattagtaaaaaagtctaaggagtcatgatttagtatatgttaaagttcgagggacatgatttggtagatatcaaagtatgtagactagagcatgatttagtatataaacaattaatgaaatagtaaaattgaatgaaattagacaaaagtccctaaatataacaatctcaatagttcacggtcaaaaatcctaattagcctaaaataaaatagtcacacatgcaacacactgcttgaacgcaatttttggcgtgtaaaactttttcgaatttcttaaaattttgtaacatgtcttaaataattataatttacatgaccatgagaaaaaaattactaaaaaatattttagatactaaaacaaataaaaatgtatcgatgtatcaggttgcattatagaatttcccaatgttatattgtacaactattttgttttattctcgagtgaaataacatgtttgaatattattttttatattataaattattttaatttcttaaaattttataaaatacatttaaataattatcatgtatacaaattaaaaaaaaaagttaaaactaaaatatttattaaaatgtcaaaacgattggtaataatgcagtgcaatagacaatgattgttgttttgataag

SEQ ID NO: 109825 - DNA, 925 bp, Cannabis sativa
agcaacattgagtaaatgttgatgctttctctcaacaacagagttttgttgaggtctttgcacacaagagtgatagtgcataatcccaagttcattgaacaagttattgaactgtaactcttttgcattatcagaccgcatacccttgattgtcttaccaaattgattttgaacaagagtaatgaattgaggtatagcatgctgagcatcagatttttgtttgatgagtttgatccatgtatatctggaacaatcatcaacaatggtaataaagtacttatacccttcaatggtacaagtactatatggaccccaaatgtcaacatgaataagatcaaaacatttttcagcaatgttatgatttgaaatgaaaggaagtttcctttgtttggcataatgacaaatagagcaatgaaacaaagaattagaatcaacatgaaatttcaaagctttatttaaaggatgagtttttacacaagatggatggcccaatcgatagtgccaaacagtttcatttgaaattttagaatcagaaaaaatggcagcaacagaaatccgattcttattacagctttgatcaacattcaagtagtataaattgtcaaattttctacccatcccaatcaccttggtcttggaagtgtcctgaatgatacaatcatcatcagaaaacaagaaggtgcaattagttgtggctgttaatgaattcacagacaacaaattacacttaaaagtaggcacatataggacattcttaagaacaagttcaggactcaaatgaattgttcctatggaagaaatttcagcatgtaaaccattaggcatcaagacagttttcaatcgggtattaacagaggtatttttgaataaattgatatcataacacacatgatgtgttgcacctgtatcaataatccaataagag

SEQ ID NO: 109826 - DNA, 5955 bp, Cannabis sativa
ctcctccaaagtgacaaccatccaatccactccatctatagttactgcaacttcatatccgaacagtctagttctttcacatatgcggacagaccctccatcatttgtcaaagttaacataaacactttgtgtttagttcgaaaactccagtacttatggatattctgatccacagaagtaccaagaggatttttccagccaaaaccagtagggtaatggccttgtttcttcccaaaaccagtggggttctggtgccttccatggccagaaaggccatggaaccccctcgttagcatgggcacaattcacaaacatatcttgagcctctttactaacaaatcgagttgtatcataatccacccttttcgaagcacgaggagggcttgatgatgatgtacccgaatcactaagcctactccttttaggccccattggacaaaatctcaccaaaaattaaaatatactgccacaaaaatttggtcaacacctccccttacttttggcacttcccataattatcaatcttcacaataatccacaatttcacaatccaacaatcaaaagagcatatatctctagaattcaacaaaagcatacacttaacctctttaaaaatcagagaaactaaaagaaaaatactcaaaagcacatcaatgcctcacgacaagcacacaaacttgttttcttctccactttgtcaataaacagaggcattgtactatggccacgatccccctgccattacagcttctatctccggtattttccgggggacattggtcaaattcctgcaaccatttgcagtgacatactgcaacccaaatgagagatagaaagattagacttctcaaacaatctacttggagaagagaccaaaaaaacaaaaaacttaaatggacatttggtgctcgattcgaaaagtaaaacttataaatgaattatgatcgattattgaaagatgcaaatacctccagaccaaaaccccatacaattatttttaattgtaaagaataataaataaactgaatctatacttgtgtgacaagaaatgttagtggacggaaaaaggcaccatctttgactgagaaaaactaagtacatatttatttcaattaagcaaaacaagaagaaggtgaagctgaaaatataacttttgtgccatgagatagatatgaaaggccggtaatgaatatattacaagacttgaaatcaaaagagggacaaaggcttaccagatcactttctattcgaacaccaccaaaatctttaaatctgataactgcttcacggttaaaaaacctggcagtgtttgagttttccatagcaggcaccaataaagcatcaatgaagtagcaaccaggttctactgttatcacctaaaaatataacaagacaacctaaaatgaaaccaaaatatacttcacattttaaccaacggtaaaaaaaaaaactaaatcaagtcatcttgtaaatgagttgatctttaaattatcagataatgatcgacaaattgtatattaatggtcaacaaaccattccctcttggagttctctgaccgtacgtaaggactttaacccaggttcttttggcctctccattccctgcaaatcattcttgtcatcccaagcccaatcaagaaagacactctcaaaattagagagagtgatagagagacatcagccagtcacgttaagcattaaacctttagatagcctccaggatcatgtgtgtcaaggccaaggaaatgcccaagaccatggggcatgaaaacagcaccaagtcgttcagccatcatatcatccacattgctagaatagaacccccaaaacaaaaggtcaatagactataaagtgtctctatgagtaatggaaatacgcataactagtacgctggaaggcagtcaaactaagctacagtacccaacaagaatgcctcctcttagcaatgactggagaacaatcctttctgctaacctgtaataaatacgagacaaaccgtgagcatgtctgaatcgatcacttaaaaatattcaaaataggcaacaatgtcagaaatatagtaatcttaattttccttttcccataaactaatgaagaggtcaagaaacgacagatgtatgtcaggttccattgaaatatatgcaaataatttccgaaaaaacatgtatccagaacttagaatacggcacagcacaggaccagctcaaaaatattatcatcgatcctcaatccagtaagaaacaattctcaagttttgtagtcaagataatgaagagcttgaaaaaccaatgctaaaatcagacgatacttaaatcaaggtaatgcaaatgagctgaaaaatgttggaacatcaccatatataactacacagtttaacagataatgtgtaaaaaccttctttggcactgtctggcaccaggagatttgttaacagccataattagtttcattttaagtacgtgaattgatggataattctcaacatttcaaataccaaaataaaaactatataaacaaggatttgtaggtggtgcttttccttcagtgctaccatcttattttcatgatgcataatgacctctgagttatggcataaaacattcgagattttacacttgaaacagaacaggaattaagccgaacaagtcaaatgaataatgaattctgtttccgccccagaatatatcagatacatcaatcttcatcaaatctatttgctaaaaacaagataacttagacttacttgtgcatatctatccaggttactccaggtttcattgtagatatgaccgcatcatgagaatcgaggacagcctaagaatggagatagtaaaaagaatttactgtaaaaacactaaaaattaatgctcaacattgaaaatattaaatcaactacagtctcatctactcctctttattgtggaaacaccaaaataggcaaaaagagaaataaacacttacattgtatataagtgattgatcagaggaaaatttaccattcacctgcacataaagaataaaaaaatctcggggtaaaaaattcatcatgtagaactagaaattgcccaagtacaataagaaaggacatttcctaattttaacatctcaggaatttctatttttgatttcagcattgaaaccagcgtttcacaattcaactaacaaaaattacagaaatactcactggataagaacaagttatgtcagagccataaaagtgatattcagctcccatatcaagcaaagccatatccccatcattcaaagtctgcaaccaaggacaatgtgattactagaaaaccacaaagaggtaatcatacttcaagaatgattttgttgtaccctatcgttcggagctgctgcatgcccataatggagaacagcactgtaacaaaatattactgccgttaaacaaattttgacttgaagtacatgccttacagaaacactcatgaatggaagtgagaaatctatatcttgataaattggaaaataagtatatttctcgtggcttacagggaaaaaaaaaatactattaaaaaaaagtatacctgttcccaccagtagcacatatgcatgtgtaagaacagtgcctacagccaccatacatgtaggtgtgatgaagaaatatgctttctaactgatactctttcatgcctaccctaacttttctcatgacctgctcagaacattttgaatttattacacattttaacaccggaccaggaaacatttgaagtttagatacttgaaacttgagaaaaacaaatacagaatcaagatgtggacaatcatgaagtcactaattactatctacttattctttgaggcattggcatagttcctttggtttccaaattttccccaaacctctagttagtggatttgaggtccaaactaaaacctctgccaaaccaaatcaatctttgggagcattacactttgttataatttgaacccaaaaaggctgggcagtttgtaaaaggttacctcgacatgagcctcagaacttatgtcattagcaaactggataacagaaagctccaggtctgattttaaaacacggcattcagtcaaaattggatgcaaagtagtcaaatcagtttcaaacttatctatcccctgcaaagagcatataaaattttaataagcattctgaactgtaacagagtaaacctatatattgttgcacacacttattcttctttttttgtttaacttgaactcataaccactcatacacactattcaactacttgacctagccagtgtccagtatgatatcaatgtggagtgaacataatttgatagaacagaaaacctgtactgtacataatcttagtatatgttaaaagttcatattcgtgtgtaagaccaaacaggcaagctctatctacatccctatccccaatcaagccttacaaacactgaaggcccggggtatcatgtaacaaaaagataaataggttatgatgtgaacaaaataaatgagtacaaagaaagaggaacctcaaattctgctggttttgagaaattattactatcagtattcagtccatgaaagaggaacaatagaggtttactggatccctgaaattcatcttgtaacacttgtacaatctcatcagtatagtatgccatgtcaaccttatatttttcctacaagtaacgaacatatatatgagaaaataaatagctatcttgccttagacaaaatcaaatatgaagcattcaatcaccttgaagtgaactaaaggttttatctctcccaaccaaacagcataatcagcaggtaacctaggagcgaatagaatcgattttcctgatgcaatatccttcagggacaaaagaaatatatcaaaatctgtaagtaaccacgtttcagtagcttatcgaaagtatcataaacaccataagtggataaatacagtgaagtaacccaaccaatcccattccaaaagaaaggaaagtaatatggtcatacaaacaagcaatttaagacaataaattacatcaaagagagcaaaaggatccattttcccataaaaaaacttactaaagctccataaaaaccaggctcaaccactccaaacaagtaagcaaagttactctcctgcctacacatcaaacgacatatcagattgttagtacataatacgtttaccaattagccatccaatcttaaaaaacaaacacacataaataaattttataattgagataatccaaacaaaagaaaatacaaaacaatatataaataatttgcaaatgtgttttttatataaatattggttacctgaagagttcgaggtgatcagtatcatgccgagtttgctcctcaccaccctgtgaacgaaaataataatcagacataaaatctactgataaatcaggatttagaaaatacgttcatacacacacacacacacatacatattgaattacatagggaagagggagaatttacctggagaaaaacgaagccatggagtgggcgagaagagtgagaaaggtggtgatgaaaagagtcgataagcttttcccgattattgacgtgaagctccataggtaccggaagaggagagagtcgggacggcgaagccatcgtaaatggtgtccttggtttcgccgtagtcgtgaccgtataaaagtccgaaacgaatacttaccttctcttaacaaaattctgtcccaaaatgacagctttcggtcacatgcgtaaccacgaggcccagctcagttgtttgatctattgggcctattctacattcaagtagcccaaacgcgtcctgcaattcaaagcccaagcctacactaccttcaaagtcaccaaagtaagtaaaaaaaattagagaaattatactccataccttttttatattattctcttttaattttatcctctttttgaaagtctatcatttttacctctttttttaaatattgtaccaatt

SEQ ID NO: 109827 - DNA, 639 bp, Cannabis sativa
ggggacgttacgaatggtatcaaagccttgacccagccggaagtgtggttgacgagggcgtcagaccccgtaagggggggtgattgtgaaagtcaggagacccgtgattcgtaaggggaaatacaaggtaagttgtgcaatcccacatcgcctggggaaggtcaagtgggagggttttgagactgtgtaggtacgggactgcatagttgaagagagctgaaatagattgattggtactacctatatcaacaaggtgtatcttgtttttcgttagcccatcatgaaagaactccatagttaagcgtgcttaacctgagataattttagaatgggtgacctcctgggaagttttttcaggaagcgtgcgagtgaggacaaagcaccctggaaacactcgtgttggtctgtagggccactcgtcagtccatgaagcagccagagtgatgcactcgtgtataaaagccattcattacatgggtgtaagaacctaatggaggcttgcagtggggacgttacactgaggaagagcaggtgactccgctcaaaaggaggaagaaacttttagcccagcccatgcccgttgaacatggaattcgcattagggagtccagttcacatgctcggccatcttctcctgta

SEQ ID NO: 109828 - DNA, 1104 bp, Cannabis sativa
  modified_base (158)..(160): a, c, t, g, unknown or other
  modified_base (444)..(450): a, c, t, g, unknown or other
  modified_base (565)..(590): a, c, t, g, unknown or other
  modified_base (648)..(652): a, c, t, g, unknown or other
aactcaataggtccatttatggacttaagtaagcttctcgctcttggaataaaaggtttgaggaaataataaagacctacggctttcaccaaaatgaagatgaaccttgtgcttaccaactctaggataatcaagtggtagtattcctggtcctttannntgatgacattttgattattggtaacaatatcaacaaaatgactgacattaaggaatggcttgtcactcaattcgaaatgaaagatttgggtgaagctgcttacgttcttggtatttagatcatcagaatctagaagaacagatcccttgccctctcttaaacaacttacattgataaggttttggagagattctcaatgaccaatgccaaaggggcacagatgccttctagatttggtatctgtctatctaaggaatagtgtcccactaatcctcaagagatannnnnnntgagaagggttccttatgcttcaacaattggaagtctaatgtatacaatgttatgcactagaccttcatatgctaagtagtaggaattgtgagcaggtatcagacaaacccaggnnnnnnnnnnnnnnnnnnnnnnnnnnatattctgaaatatttgaaaagtactatgcattgtgtgttagtctacaagggtggtgnnnnnaatcccgtaggctataccgactcagatttctaggcttgtcttgatgattgaaagtctacatatgggatggtctttactctttggagtggagcagttgtttagaaaagcgctaagtaaactgcaatatcagactctaccaaggaggccgagtacatagctgccgctgaggttgctaaggaacttgtttgtttaagaaagttcttctcaggacttgatgttgttcttggaatggaaaacccactagttttactttgtgacaacactggttctatagccaatagtaaaaagcctcgaagccacaagagaagcaaacacataaagaggaaataccacatcattaaagaatatgtcgcacgaggggacgtactggttgagaaagttgacactaaagataacttagctgacccattcaccaaagttttggctgccactacatttgaaaagcacagatt

SEQ ID NO: 109829 - DNA, 532 bp, Cannabis sativa
ttcaaacatggctggtaaccattcctttaatttttctgattattggataatcgatagtggagctactcatcacatgtgtttcaacaaaagcatgtttcattccttttcaaatcatcaatttcctaaacaggttactttgcctaataatcatcatacaccagttcatggtattgggaatattaaaattaattctgcaataacattgcataatgttctttatgtcccacaatttaacatcaacctcttttctgtcattgcattcattgataacactattaatttagttctttttcaacctaaatatgtgttattcagcaacattctcagaatcgggtgattgggatagccaaaaggcatggcaaactttacttgctgcaacatgaggctgctgttatggccaatacaagtcatttttctatttttttctttacaaaataatgtagaccaatggcataatcgccttggtcacccttcaatgtacatttccaatgtttttaataaaaagattgactcttctttttctgcaaattct

SEQ ID NO: 109830 - DNA, 934 bp, Cannabis sativa
  modified_base (167)..(167): a, c, t, g, unknown or other
  modified_base (542)..(543): a, c, t, g, unknown or other
  modified_base (704)..(705): a, c, t, g, unknown or other
attggctcactaaagtgtacagccaagtgtggaattttgcccaatttttttattcttttttttttaatccatataattcaaccctaagccctagttggctcactaaattggatttatttattgaatctcatcaatcaaataatcctgtttattaattccatgattantccactataaatatagaattgaactcttattaattatataattatatttactgagttttactgcagtgtccattgatataatcaattgcagtgataagccttccttatgtcatttcgtaattagttttggtcaaattattgttttacccttctaattacttctttatcctttagtaccgtcaaactagtgaaagtataatttagatccaatttaaatttgtgcacaacttttcagttccagaattaatacttaaagggaagcaacattcgatccgttaggaatccatagttgtagattatgttcccaaccatccacattattagactcccaaaacagaagttgtaagaaccattttctctgagaaactttaacgnntgaatcaaagaaactaataatatgaaaggatttcatgattactcaagatttatactgatctactattgatcattattatgatatgaattaggtctttatagtaaatggtaagtttgataaagacaattttattcatatcggtccttgtcatatataatctnnattatatacaacaccttcacttagatatcatactaccttagtaatccaaattgagattacgtgcgctgaataataggcatcagtgagccatactagcaaatattgattaaagattcctaaactttaatatgttgctgattgttttattcatggctaagtgatcttaattctccatataactacaagtcataacctcatgtatgaatacgaattttttttatatttatat

SEQ ID NO: 109831 - DNA, 957 bp, Cannabis sativa
tataaataaagaggcttctcctcaaaaagattaactgaggctttcatacatttctctgtatctctctttctctctttctattacactattataattatatatataggtgcgatgaagatgtttcatgtgatgattttttatttcaaacagggtacagatgtcgccgtcttggagtatataaaccccaagcaaagattcttaccggtccccacccagatgattgctcgcatgacgagagttggaccgtttgcctaagttcgtatgagagtgatcccctcatacgactacactctgcaggagcaaccagggacttataggttatcatttcagattgtctggatacgacttgtattattccctaaagggtttaggaatacgtaggggtattttatgcgattgaatttgcggaattcgacattcatgaaaattgttactttgtttgtgattggatttgtgattggggaaatttgaatttatgcgattgaattggcggaaagagggttgtgactctcgaataattaacatcaaatatcagtttaaatattattgggatttattttatttttattttattattttattaaatataaataaaaagtctatcattacatttgattaatttataagtcatctaaataacataactcgccctaaattctttcttgaatcctcttatttagctgttccacatccaaaattagattggtttgaggcttggcattgttttggtcatatatgagatatgattacacaaattcacttagagttctcacaatctaatgatattataattttttgtatgattaatcccatatttaagaaatttcatattttctttaatatatatatacattgtattaaaatttaatgaataaatagatttaaaatagtgatattcataaattcatagagattgataactcaaaaatgctagaatcaacttactaaagttcttac

SEQ ID NO: 109832 - DNA, 647 bp, Cannabis sativa
aagtaatataaatgacaattttattttataattaattataattattaaatatatagttttgacatttatagaattaaaattagaaaatatggcatttgtgaaataaaatataaaggttaaaaaatggcataattataactagtggggcccatctatatggccgacaacttagtgtataatttgctattattttatcattttttatttcatataatttgaatcctaaccctaggtgaaatagtataaaaagaatatgatagtctcattatccaacaactcatataacctagtttacattctgtttgacaactaaagttcttgagacatccttcttccttcttctatttcgaacctccttcattgttcttcatcaaattttcgagcctatagtgagtgagtgcattgccacccatagcaagtcttgtactcaatcatagtgtgtaagactatgaagaatccaacaacctaaaggagaatcgagctcagatcttgataatactctgcaatagaaaacaacaagtcttggagatctgagtgtaatgagtcatatgttttgctgcaatcaatgtaaggtttctcaactttatatgtgtttaaattttattattttagaaattcatatttaggatattaataaacatacttgt

SEQ ID NO: 109833 - DNA, 642 bp, Cannabis sativa
aaggccagagctctatggggcccactcgccccttacctacatctagaggcaagggcgaaacggatgctaaggattcaggtgactcctcttctgaggatgatggtatttaatagttaattgcaccatcttttatattcttgtcttgcattgaatatttgtgacttgcattctgactttgcttttttctttttcagatatgtgttccaagtagagaggtcatgctggtggaccttttaatgagcctttaggtcatccgagggccaagttggctcagaccacccgtggtagttttgctactagatcatcacttcctcttcctcctccaaggcctgtactagctaggcatcccacgattgatgatccttcagctagtaaggaacgaccttcgggcaggggtgccccaaagcctgattagggagtaggcttagccgcagggtagagagccatggaggctgctcgtaggcacctagagagagcccttccttctatgtatgatgagttcaggagctcagtgatagtgagccggacaagctctactcaactagccttcgagatttatctgtggtgagttgcacacttaactttgctcatttttttggcatttttgtgggctgaccggccatagtgatgttgcatggggtt

SEQ ID NO: 109834 - DNA, 596 bp, Cannabis sativa
aattacgtgattattgaaagtgaagcttgggattaatcctatttgtgaaatcttgagaatgtgtgactaggactaccgacgcttgctcaagaacactaggggatttggaatctccacatacttgggataccaggtaagacagtagttagcacgtagagttaagcatggtggtgctcatgattgatattatagtcagggccggccttgaaatttagtgggccatagaaaaaaaaaactatttttgggccctcatataggaaaaaatgttgtatttttcaaaattgataaaaaaaaatgtgtaattttaaaagggaaaaaaaatttttgggcccctgagctaggtgggccctaggcacaagcctagcccgcctatgctcagggtcggccctgattatagttgtgattaattggaaattgggattagggtcattgccctaaagtgagtggttatatggcctagggttattaccctagtgattatatgattttaaatcctatgacatgttttatatatattgattgtatggattatgcattcaagacataatttggttggactcagtaattagaatagagataaactgttctaaggcctt

SEQ ID NO: 109835 - DNA, 756 bp, Cannabis sativa
gaagcttttgtaggtggcagaggtaaagacaaacaatttgaataggtggcagaggtaaaagtacaagcatgacctacttttgtaggtgggagaggtaaagacaacctctctctcacacattttcttttcttattttatgataaataaaaaatctgtacttttgttttgactttagtagcacgaaaatttgtgctttgcttaatttttcaggtttcggattaacacccgaaataatatttggtttattttaaaatccgaacccgatacccgtgtggagtattttcgggttggacccgacccgaccacacgggttttcagtttttcggttttttcggcagtgggtcggggcgggttgctgggttttcaggtttgcgaatctaaatgctcagccctaccttaaatagtcttccttttctagtacctataaagatcggtatcatcatgtgtaactgtgtcaacactatgaaacttactattcaatgtggtatagaaagattaaaggctcccagataaactaattgagcaacacctttaaatttgaaattaagaaggctaatatttggtacactttgttaagaattcatccaatgttcacaattcaagtttacttaaacacacacgaaaaaaacaacataaaaaaaggaaagagatagtcaagaacatatgttatcaaacatctttcttaaataagactcattagaacaagagtacctacatacatgtgcaccctctacgacaccatgtaaactcagtaaa

SEQ ID NO: 109836 - DNA, 681 bp, Cannabis sativa
aaatttgttcaaaataaagtaaatacatggcaagttaattaaagtttaaacaaaaatacctttgcattatctgttgcccaatatttgatcaactcttcccattgatcactatacactcgtttgtccttgcattttttttgctcctcaaatgataagtggtctaaataataagtatttttaagaaaacatttccactctctaagctttttaccaaacagtctaaaagtccaagtcttagcattaagaggaatgtcaaatttttcctgcaagaataataacactaatttttaacacatttaaaatataatgaaatatgataaatattaaaaatacataaatttggaacctaaaatttcaaattaaaatataattaatacctgtacgattttccacatttcatatttgtatttagcaggtaccttatgccaatttttataattaattggagcatttttcccatctcgtactattgttccaataaagcttgaaagtttgtctgcattttcatcatgtggctgtccaaaactattacatgtaatttttatcttcacatcatcgcgatttccccaaattttatgcatttgtgtaggacctcgagtcttcttttcagtactttcatttgtcaacatgtctgtaaaagattctacagtatcttgagaggctaatctgtatcgcatgtat

SEQ ID NO: 109837 - DNA, 791 bp, Cannabis sativa
  modified_base (368)..(396): a, c, t, g, unknown or other
gcagaatttaaactgcaaaaccacgtaaaaaatcttttgtgttcatacctcttactttactgctttcattttttctgtgtgaaagaatcactgtgaggctcaaattttggttaacaaaaatatgcgttaacagtgatgaccgcatttcataatatggattagtaaaggaaatcaacattaattattagtacttttatagttatttgtgaatttattttattgtgggtcccattatcaaaagtgggcattagagttataatttttcaattctagagattttattaaactctaggtgtattatttgaattatatatgaattatgttatttttacaatttttactcggtgacaacggaaaatgcgatggannnnnnnnnnnnnnnnnnnnnnnnnnnnngaaccttatttcttagtgggatatatattggaggaaatagaatactgagtatgagcggggttatggtttttgaccattttggccctagactttattttgcttaagttataagagaaagggcattttagtaattggccaaatgagtgattttgtggctgcctagggtgttgaacctagctaggtttacttcagccaaagaataatttatttaatctttattttcattttagaaaataagagaaaaagatgagaataccaaaaaataaaaaaataccctctcttccccttctctctcttcgacccagcaaggaaccaaggggattgctgctgaattttgtgttttcagcaaggattcaagtgggattcaaggttgaggttgttgggttttgtgccct

SEQ ID NO: 109838 - DNA, 562 bp, Cannabis sativa
  modified_base (316)..(318): a, c, t, g, unknown or other
  modified_base (481)..(502): a, c, t, g, unknown or other
ctttaataaacttttgaaaaaaaagaaaagaggatgtttgcaacaaataaatgaacaatatatatataagctttcaaaaaaaaacatgcttacatgagtttatgtgtgcattaatagccactactcgattatgtgtgcattaatagccactactcgagtttcatatatatgaggcggttagtttcgtatatgaggcggtgtatgatatgtagcaagatacctggcaagataaagaaaacgtggcagttaaaaatctaaagaaaagtggtcaaatgcatgtcatacaccattcactattatcattattattattatnnntattattattattatttagtattaataagcaccataacaaaacgaggcggtgcatgatatatactagaggcttggggtatcttttatacaatcctcatttaaccattagataaaaaacaaatcatgctgaccccaactttcattgttattattattattattnnnnnnnnnnnnnnnnnnnnnnttattattattattattatcagacatagacgagtgaaaacgaaaaagtaaaagtatatat

SEQ ID NO: 109839 - DNA, 568 bp, Cannabis sativa
ggacctttcttacgatttcatgccacagttgatgtatctaaacctctattacgaggtagaatggccaggatacatgattctaggtaagagtgtacatcagtcagtttgatcaggttatagtgtatttttaccaatccaatataaatgtcgggttgtaaatatctaacggtaacccgtccaatgaaaaagtagaaaatgtgtaacctacctaataattttcgtcgatttggtcggattaacccgtttaaatcgatctatatttttattttttcattattgttagtttttagtgttcaaataagtaatttaacaaaataaatatataatataggcctttcaagattaaaatggttatagtttaaattaaatattaaaaaataaatataaactgaataaacattctagtattaaatagtatttttttaaaaaaacaatagaataaaaaaatatattaatatgtaaattctaaatttcagctttaatattcaaatacaatcaaaattattaactataaatttcaaattaaacactataaaatacatagtttaaatgtaaaatattttaacta

SEQ ID NO: 109840 - DNA, 574 bp, Cannabis sativa
  modified_base (45)..(45): a, c, t, g, unknown or other
  modified_base (542)..(549): a, c, t, g, unknown or other
tcgggacccgaacttggacatgtacccgaacctagacccagatcngggtccagagctggacacaaacccggacacagactcggaagcgaactaaaaaactcacaccaaagctagacccgaacccggaccaaaactcgaacccaaactaggatcagaaccatggacatagacccagaattgaatccagaatcagatcgcgattggaacttgagactcggaccaaacctagaccaagacccaggacgcgaacccacacctggaacctgatctggacctagactgaaatcaagcatcgaacccaaactcagaccaagactcgaactcaaacccaaacttgaactcagaatcgcaaatggaactagaaccgaactaggacgaggataaggaccaggacataaacccaaacccgaacctagatcaaaacccagaaagagacctaaacccgaaccgagactaggtctcgaacccgaacctagagcgggacccaaaccaacacaataactgggatttggacccttaataaggatagggacctgggaaannnnnnnnggaccgggacctagtacccgaccca

SEQ ID NO: 109841 - DNA, 645 bp, Cannabis sativa
ccatttttaacacgtggtagagctaaaaatctgcataaccatttgttattcttatctttaagatagtggacactaacgttggataggagcatctcgctagatgcatctcgccttatacatagatgaatgacttgatttatttatatgccttccagaaatggcatgagcaccagtgtactgagcaaacttaaaaactgctctttgaccataaggcattgcagactgaacaatcatgtcctacatgctctcaagctattacacttagttattataatgtgaattatatgctaagtgattcaacgactgattcgcctcgtcaatacttccttacatgcagcgaggtagatgtcttgttgtgcattgtctgtaattcctttcggattctgccttccgaggcgagatggttcctcgttaatacatgaattgataattcgtgtatccttgtctcacctaagattatgtagtcagcgagttatgaatatactctattaattctatatataatgagttattctattttgcatttaataacacaatcgttattatacctggtggttcatattccatttgttcgacacgtgtcactctctgaagtacagctgaatttcgagtataacaatatcttaaccataatattttcaaatt

SEQ ID NO: 109842 - DNA, 575 bp, Cannabis sativa
ttttttttatattgagggagagagatttaaatttgaaattctctttatgaggaaaagtatagaactattaagctaagaaatgaccacgacattaatactattgattagggagaaacgagagctaaattttgaatattgattatattttttttatataatataaattaaaaatattcaatttgtcaatatatattatatacgaggtaacaagctgtatcatgttagattcgttgaatgtatcaatttgtgtgaaaattatagtattttcaaagtaaaccgttaaccttttgccctagatagataacattaattgtgaagattaatatggcatgatacttggtatttggtattataggatatttcttactgtttttattattattttttttttttgaaaaaaaaataacaataaaataaggaaattacttcgttctaattccaccaagtttgaaaactaaaaataagaaagttaatagaaaggagaaaaaccaaaatcttttggtgaaaaggaaggtttaaaaaacatgattatttttttaatagaaaaaacatgattaatctatgagctgaaccca

SEQ ID NO: 109843 - DNA, 566 bp, Cannabis sativa
  modified_base (68)..(69): a, c, t, g, unknown or other
  modified_base (414)..(419): a, c, t, g, unknown or other
tttgcgaccagtctagctttaaagatttcaacttcgccaccatcacctcttttcttcttgtagacccnnttacatccaattggatgataatcatcaggcgcatctacatattcccaaactatgttctttttcatagaatccatttttgaatccatgccggctgaccattattttcgttctagacttgccattgcctgtttgtaggttaatggatcgtcatcaatactgtcaccaacgaccatattgattccaccatccaagccataacgagctggttttgtggaaaccctcccactacgatgaggagtcgtgaccttctaaacaggatcatttgtggtagatttctcggttgtaacaacttgcattggtatataaccattacataattataaaggtgtcttagggactgatttnnnnnnaacaacatttaaaatgtcagttgccatctgcatagcgtatccccaaaaggacgtaggtagagttgaatagttaagcatggacctcaccatttccaaaagcgtgcgatttcttcattctgcaacgccattttactgtggagtgctagg

SEQ ID NO: 109844 - DNA, 1072 bp, Cannabis sativa
  modified_base (60)..(75): a, c, t, g, unknown or other
ttgtaacaccctaactaatttaaattaataaacattttccataattaaaccctaattatnnnnnnnnnnnnnnnntaaagctaagcggtctttacaaattcaacaccaaaatgtaacttccctcctttatagggatattttcaaatattagtgttcaaccctactcctatataaagtgtccatgaccattgatgaaggggccctttcttagaatctcgtatatagactctaagtcacaagaactcgtatgactagagctctctctctctcatcttcctatattcttctatacattctcacagttcttcatctacacttcaccttctcattattgtaatactcaagagaaccatagttaaaaattacaaggttaatacatgtaatctacatggtattatctccaaagtgaatataaccaaaaggggagtaggtcattacccgtacataagtgggccaaacctctataatttcatgtgttttcattatctatttatcgttcttaacgtttgattggtgattcatcagcattaattaggctttaatttagttgatgaattttccagtcaacaaactatatgagcagtatattcatttattttgaggctgtattttggttcttaacttgattaattgtgtcgttcttttaaattttctttcctatagtgtttagtttaccttttctcgagggcgagtaaaggttaagtttaagggaattcgatatgtgatttttagactcactttacatcattaatttaagttaggctttagttttttttatgtttattttgtgcaagtttacgcttattttgatatgtttccaagtttggatgaatttgggatgacttgaaattgaaacggtgaaaaaagatggaagatttggccaaaaatactgaaaaaacttaaaaattgttgtttctaaaggaattctaggaccgcacacgtatttggagcagtcgtgtaactatgctagaaatgtatatcgagagaaatttttagtgaaggatacttttgtctattccactacaagaaatgtcacttttaccagcatagttcgctactgcactggtaaaag

SEQ ID NO: 109845 - DNA, 659 bp, Cannabis sativa
  modified_base (480)..(480): a, c, t, g, unknown or other
atagcttctgcccataatcacttttttagcttcttgctatttaacatcactcttgccatttcctgcaatgttcgattcttcctctcaacaactccattttattgaggagttttgggagcagagagttcatgagttatacttgtagacttacaaaaatcatcataaactgagttctcaaactccttaccatgatcactccgaattcgaacaatttgcccaatattacatcatttttcaactcttaatctcaaacaaagagttttaaaagcatcaaaagtgtcaaacttttctcttaaaactacccaagtaaaacgagagaaatcatcaacacacacaaaaatatatcgcttaccatttagactttcaacttgaattggacccataagatcatggtgaagcaattccaatacttttgaggtattgatatcaaacacacgtttgtgagtgatttttaattgtttaccaagttgacatggttcncacttaccaacactttctttaccaagcttgggtagagcttgaacaatacctgcatttgacaattttttcagatttttataattaatttgtccgagcttggcatgccacaaatttgtggtgttattgatggctgaatgacaagtaaacacaggagttagggtataacaattatcattgga

SEQ ID NO: 109846 - DNA, 686 bp, Cannabis sativa
agtttgagaggttcatgctttgggttgggttaagaagaaaggaagaagatgaaggtgataatgggtgaagagagggaattaggttagagagaaagatagatgagagacgggcgacaaagaagaaaattagggttagaagtgtttatattttagggttagattttttaaaaatgggctaaatcccataacaaatttttttaatgcctttctgcttcggttgtgcaccaacgctaatagtgtatataatgaatttttgcttcgattgtagactgacgttgatagtgtatacaaaatttttgatatttcatcttttgctttggttgtgcaccgacgctaatagtgtatataatgactttttgcttcgtttgtagatcgacgctaatagtgtatacaaaattttttagatttcatcttttgcttcggtttttgttttagtgtcggatagataaccgacgctaattactaattatttgcatcggtggataactgaagcacaagagtgtgggttgacttttgcatcagtcaacaagtgtgagcagacgcgttgattgacgcaaaaacccctttttgtagtagtgttagcgaggctgcttcgggtcacgtatctttagcagcttgaaattgtttcttggaatctctggatagctactcccaggaagttattgaatggtgagtaaacttgttaa

SEQ ID NO: 109847 - DNA, 606 bp, Cannabis sativa
tactcctcatctacaggctgttcaccatctgatccgataccttaaaggtagtcccggctagggccttctctataccacaaagtcctctttacaccttagaggttaaactgattctgattgggcatcttgccccactactagaagatccaccacgggattctgtgcctttttaggcgattgtctcatctcatggcgcaccaagaagcagcccactatctccaaaagttcagctgaagccgaataccgcgcccttgctgctactggcagtgaattaacatggcttcaataccttcttcaagattttcaaattccccaacctggtccagccttcatatattgtgacaatcgctccgccattcacatcgccaacaacccaacatttcatgaacgcaccaaacatatcgaacttgattgtcacttcattcgtgacaaaattaagaactccaccatttggctcattcctgtcaacagctcccttcaacttgctgacgcctttaccaaaccgctgccttctacaactctctcttctcacattgccaagatgtccgtccatgacatttaccgtccaccttgaggagggggtattagaatatctgtccagttcag

SEQ ID NO: 109848 - DNA, 923 bp, Cannabis sativa
tgtttcatttctcctctaatgtcttgtggcgtttgagttgtttttatgttggtaaaccttggctagatgtagtttccaatcaacttcgtcgtagtgtgtcttttgtctgcaaatcttatgtttagatcacaagtgtgaatcacctttctgtcatactttcgaattatgaatgacttggttggtccatttctagatgccgttagtgcccacttgcattttggatccaagcaacaaattttgtatgttcttgcgcaagactttttcactttgaattggaaattgtttctaattgcatagaaaccaagcacactttgaattgtttctttgtccttgtatatttgtgattcttctctttcaggatgttgcggatctgtgattagtagtttgtcataatctgtgatttctacctccctgtttttattgtttttccagttgctcaaccatttcctctaccacaagttttacgtagtctatgaagtcaaattttttttccccatcttctagcattgtcccttgcattgtatgttgttgagttgttgagtcttctgttgttactacattatattccattggttctattgcatttatctgtgcaactaatgcattactattttccaagaacgatggattgatggttgttgatgacattcacacacaatgaatttaggttccttcagttttagttgtatgcagaaatgtaggcttcgatcatcctttatcctcaacggttggtatccttctttcacttggtatttcagttgtaggacagtgttttcttggttgcattccaagacctctttctgctttagtattagttcttcatatttacgattaacgtagatttttgttaaccaaatttaagtctcacagtaatgatttcacacagaaaaataaaagccataaaagtaaaagtatgaacacat

SEQ ID NO: 109849 - DNA, 780 bp, Cannabis sativa
  modified_base (32)..(40): a, c, t, g, unknown or other
aggggattagggtttcataagcattttgggtnnnnnnnnnaattatttagggcgttacagcgaggtttaggtcagccaggttttttattaggctcttaagctaatccaattgagctttcatcctggatcaacttggcctgtctttcgactgacatgtgtcacctattggtcccctagaacttcaaagggtacaaagttatctttgttctgtgaaacatagctgtccacattgataggctgattattttgtgaggagataaattttttgtcttcattacctctccttcggttcaagtcatcgtgaaggtcatttctaggcctgggtcccatcctttgaaagattgagtcagccttgggtgtcttgtttgttggctagtggaccttgccagcttgggaggatctttgtcattttaggcattacattgattgccattattgggcgggtttccctggtggtaatcacgcctttgttaacggttgtcattattgagcccactttcagcttcatcgtcattcttacaagagtatgactgtccactccgagaccttgtatggccttgaggttgttggtcagcatactgattatgaccatgaacctggatccttccatcttgattacacatgcccacctatccctaggatcctctagcttgccgaggaggtacatcttctttccttctctcaggtctgggtcggaagttggtttgatcgttccttctaaggtagtgatcaagaaaaacttgatcatccatggggcgaccgatggttttatcctggggt

SEQ ID NO: 109850 - DNA, 1085 bp, Cannabis sativa
aactaatcttgctttgaacctttgaagtgatccacaagagttcagcttgattctatacactacccatttgttccccagaatgttcgtattaggcaaccttggaaccaacaccaaagttttgttctttttcaaagcatagacctcttctcccattacactattccagcctgcatgagccagagcttctactagagaattagacaattcatggtcattaactgttgcaacttttcccatgtaggttttaggcttgaaaattctagcattagcctttgtcatcataggatgaactgaagctaagggagtagtaggatgttcaatactttagtcttgacttcgctgattgtcacactactcgtcttgtacttctgtatgagtgccagagttttcactttgaatttcaatatttttaaaaacatagttactgtcatgatcattgtgaacaccctatttagaattatcagtacctgaaagtgcttcattggtgtcaaaattagaagctctatctgtttgagaaggattgttgtgatgagttagagactaagaagtggtggctggaatattgagcgacacagaccatgaaggatgttgaacatgaactggtttctctgtatgaaagttattgagaaagtcatgtttgaagggaaactcaatttcattgaagacaacatttttagatatgtaaactatccctgcagtgctcaaatattgtatcctttgaaaatctcattgtacccaaagtttacgtacatttggtagagtgatactgaaattcgtgtttttagcaaggtcttaggcaaggatagcatgcaacaccaaaggttttgagatgtttgtagtcaggttttctagaaaataaagtttcgattagtgagatgttgcctaaaactggtgtaggcaacctgtttatgagataaacagcagtaaggaaagcatcacaccaaaatttcaatggcatgcatgcttgagaaaggagggtgatgtcgcccaattagttacactgcggtcgcggtagtaaacgggctatgtcgtatccacagggaggcaaattactactaaaaattagtataaatagaaaaagatag

SEQ ID NO: 109851 - DNA, 684 bp, Cannabis sativa
tcaccaacggggtcttaacatataattaatcaaataaattctcatatattaaactccataataatctaattcctcaattattcataattatctagttacggtttttctaatccattttttaattctagggtattacaatgctagtggtcattaaaatcgatagtttggtggtgtggcaaaggttgtttgtactctgttacatatgtgctccaattttggtgttttaattgatgaatgtaaaaatttactgggattagtttgtgatgtttctttatctttttgttaagtgatctgcaaattaacatgcacattatgttgttagaaattctcgatggcttgctaatcgtatgttcaatggagatttattttcgtctcatttattgtctagttttttgaacgattactctacttaataaaaattctggctaaggtcacccacagagggtagggaatgaattttaaaactacctgtttttggtgtggaaacaatgaagaaactatagcccatttcttgttgttctgtcctatgaattcaaccatttggaacggtttctcgtacaagtggcttctacatcagaatatcgaggaccctattattatacttctcgatgtgcatcaaaagctgcccaggtacgagtggctattgtttgttgtcttaacatggctaatttggaattgtaggaa

SEQ ID NO: 109852 - DNA, 576 bp, Cannabis sativa
tttttttttaaatttagaatttatagttgaatgttttgattgtattttttttttttttttgttaagtgaatgttttgattgtattagaatattaaagttgaactttagaatttacatatgagtaatttttttattattttttttttttttaaaaaaaatagtgcttaatattttaatatttattcaatttatatttacttttaacattcatttaaactatataatcattttaatcttgaaaagtatatattatacatttatttttttaaattaattatttgaacaccaaatactaataataataaaaaaaaaataaagatctgtttaaacgggctaacctgaccaaaccgatgaaaattattagagaggttatacttttttttttattttttttattggatgagttacaattagatatttaccatcatatatttatattgggttggtaaaaatatacttataacccgaccaaaccgagcgattttcaccctaataaatttagggattttttcaataatatacttgaaatataaattatttacaaaaatacctttataaatctcaattacaataata

SEQ ID NO: 109853 - DNA, 3046 bp, Cannabis sativa
  modified_base (185)..(198): a, c, t, g, unknown or other
  modified_base (1691)..(1691): a, c, t, g, unknown or other
  modified_base (2987)..(3015): a, c, t, g, unknown or other
ccagttgtgactataccgcgccaacttatcagaacacacctgaaaaaggacaacacaagcatactatataagcacgtaaattaattactttcactgttttacccttctcaggtaaaaattactaaaatgcccctagctcacctacggggtctttacatgtcatatctcatattaattcacatatnnnnnnnnnnnnnntaatataattccacaataatactcaattaactagttagggttttactaattcatttccttaattccagggtattacacatatgataagtgcatgctaaatcaaggatccactctgtgctgttattattttctaaaatagaaaataattccccatatgaacttccatctccatttctctcagccacaactgcagagtccttcctttgattccatgatcattagattttgactactggttttggtttttattgcatcttttgtcatcgtagtttgatatgaaactagactacgtcttcaattcactacaaaatcttttaatgtggccaatctttccacattgataacattgtcgattgtctttgatctttgactttgatcttgatggtgactggttgttccttgatgatcctctctttagactttttcctcttgcaataggcttcgtctttcctagtctctttcttgagttacaattcaaagtcctttgattttaatgttgcatgaaatccctccaacgagatcacatcccttctatatttgattaatgttttaacttcttgatatgccattggcaatgatctgagcaatatgattgcttgactttcttcatctatcttatgatcaatgttagctaaaccaacaattatttcattaaatttatcaatattatcatctaagcaaagagaagaactcactctaaacccgtttaatctttcaagaagattaatcttgctcgagattgatgatgccatgtacagatgctctagtttgttccacaattcttttgcagtatgccatgtacagatgctctaagtacctttgccaccttttggtgcacaagtatacccttcaaactctctcgccatagtgcaaaatcagttgatccatcgaacttctctagtttgaaccttgccatcaaaattctccttcaatgtgtgttcttgtataattccatgatgaattcctgatgagttcttaaagaattcttgatgagttcttggtgcggaagcaagtgatctttgaatctcccttaataatttaagaacccaactctaatttgtaagaaatatagctctgatacataaaaattaacctctgtaattccaacttcaagatcacacttaaacaaataaaagttaaatcaaaacaaacaaatcaagaacaaaaaactagcaaacacattaaactagaaaaatataacacagataaatctaaatggctgtcagacataataacacaagagatttatactggttccgatcctaagttcattgtgaacttggtcatactccagtttgaaagcattgccacaatctttattgataatgagaataagagaaatcaatcttaggagctataaggaaataatcacagcaagtcatccatggtgtaatccctcaacactcattaactcactaactcaaactaacataatcattaatgttactcaatacaatttcccaatcccagctctccctctctctctctctctntctctctctctctctctctactgtgttatgtctctctctttcttcttgttgttcttctttgaaataagatgagtagtcctctttatataggccaaggaacccaatatgcaagttgtcataattggcagttaagttagttaaagactaactaactaattgaatagtggttggggatttaaagaataataccacacattttaattatatttctactaagtataatattttgttttatatttccacaaactaaattgttttcactattattccctaaatgttcatattcctttgatgagagtattgtttcatgatcttcaaatatttatgtctattatcagtagttaatttgaaaattgttcacttactgaaatgcatgagttattggttattagagtaataaaactattgatttattgaaattatagagttactaaaaaatatagtgcgcttcgcgtgcggttgtttaagaaaattctaaattaatatgtcttttgtttaattataatcaagccaaaaaaattgtaggatagatacaattttaggtaccaatcgacttttttattttgttaaatgacaatttaaaacatatattgacaaaaagtaatataattactaaataattttacttaccttaaaacttactgttctctaactctaacagtgttgcttcaatttatattatattcttaacctgaaaaaggtttgacccaaattatgttcaagaaaatcactatgttctttatttgacaattaaacaaaaaaattgattgataatttttgtaaactatatggtctaaaatagtatttaactaaaattgaatcaaattttaattttaatattttttatatattaatttttagttcaagaatatgtggaactattttatcaaactttcaatttttaaactttttgttagtaattataaataactaattttttattcataattaattaattcaaattatatttgattaaaatattttgtaggttttttttctaccatttaattaagatatttttttattattaactaaaataaccataaattataaatatttctctaacaatttatattaattatattttatataacgtttgttattcgcgtttctagcagtggacacgtagaatccaggtcagtacccaaggcccatcattgggtcccttatagaaggtaaagtgggctaagcccttttggacaggtccttgcaagaacgtactccagctctatgatagaagaatctttcgccattgacagctcatgtctggaagcaggtgttggaaattattttacnnnnnnnnnnnnnnnnnnnnnnnnnnnnnttattaacatcctaaataagaactttctaaa

SEQ ID NO: 109854 - DNA, 761 bp, Cannabis sativa
ggaagaactaaagttcattaagtatgaagaaaattgagaatcacaggggatcaccctccccttgatacagaactgcagttgtctagaaattctagcactccttgctaaactatccgcataaagattgaaattacgattaatgtactgaaacttacaaagattaaatctacgactataatctaaaatagacagggacttgttgagggatctccaattcttaggacactgttaatggctagagcatgagttagtgagtttagatgggaacatagatgtgttttagttgttgtgtgtggtgcattaactcctattctgaactgcccataaccataggcaagagggagttggaagttgcatcttcatctccatttcttgctctatataaactttcttcttttttcttatttttagaaattaaagatatgatatttattattaggagtttttttagggtgtattttcaagaatgagtgtattggtacacttttttatgttttcagcatttagattacaatttttttagaggaaattacacattgtatgggtttttatattttttgtttgaaaatatggtttttttaagaaatatattttataataaaaattgaagaaaaatttgaaaaatataataaaatagtgagagtaaccaaatatccttacaataactagttctctcatactattttttctatattattcaactttttttttaaaaaaaaaaaaaatccataagatcattttttgaaaacaaaaactatatt

SEQ ID NO: 109855 - DNA, 966 bp, Cannabis sativa
tatctagttatatcaagaatatgcgtccataaatgacataagctcgtgcccagcagttgcatccactaattgatcgatcttgggaagtgagaaacagtcttttgggcacaccttatatagatcagagaaatcaatacaagttctccaagttccgttaggctttgggacgagaacatgattggctatccacgagggataaaacaccttgcttgtaaaatcgttaactaacaacttgtcaacttcctgttttagtgccccttgcctctcggaatccaagggcctccttttctgtcttttcgctgggtagtttggatcaacatttagatgatggaagataatattagggtcgatccctatcatatctccatgactccaggagaactgatcctggttcgccttcaaaaaacttagtagttgctatttgagatgctcatccaggttcttcccaatgtatacacactttatgggacttcttgggtctagaataacctcttccaattcctcaattgatttcaataggtttttctcatcttgaactcgggggtcgagatcttcatttttcttttcattttcttttgccaagatcgccatcaactgatgaccggctttcctatgctgcaactctatgcgaaaacaatcgtgagccaacatctggtggccacgcaccactcccacaccttctagtgtttggaatttcatggataggtgtttgatcgaactgactgcccctagtctgatcagtgctggacgacccaacaatatgttataagctaatggctggttgacaactaagaagtcttgcataactgtagcagataggggtgcctcgcctaaggttaatgcgaacttgattatgccaagattggaaatgctgtctccgatgaatccgcaaagattcaacatacaaggccttaatttggcctttttgagccccattttccatagagtctccttataaagaatatt

SEQ ID NO: 109856 - DNA, 1953 bp, Cannabis sativa
ctctctctctctctctctttgttcagccctagaagagaccaacagcccaacctgaattctgacccttttctttagcaatttatcaagaaaatcagtaggaatcaaagtaggagttggtggttacggattaaggtaaccctaacctctttattttcttcaaaattcttggtagaaggtttagtgttatgttgagtttgtatgattttggttcaatatggatagggttgggttagaatctgtttcaagttcatttttagattgtttatgtttgattttagtggttgtggctactgttggtgaaagcttcaagattgagttcttcaaactaaagcttaaagctttaacaatgatttttgtaatcatgggatattatgttaattgagctatggactatgtttagatatgatatttaaagtactctgtcaattttggtaggctttggaggagttttggttaggtttgtagtgttaaaccaggttttgccatttcagtagggaaaaacagttaaccatttttggtaaaatggtggaccgttttttcaaggcaaaacccaaagaaacaatgaaccattttctaaaatggtgaaccatttggggtatttttgagcacctatatttttgttttttttttttattgtttttagggtattgtgtcacgttatttatcgatagggaaacttccggttctgagtttaagtcctagaatagactagattgagattgtttacaagattaccactgttgtgagatagggccaagatcatcgactgtcttccgctcaagtttctcgataagtatgaacttggatttgaggtaagaaaaatataattgtaccacatagcatgtcaatacgtgatttagtaactaccatctataaaagagagttattactctatttggttgtattattagattaggcaataataaaaaaaagagtactactctaattgaaactgttggtaggtttcttacttatcggttgtctcattaaacaatgataatgacattggactacctcattatgcaaaggtaagaaatggttaatttattaagtaacaatttagtttgccttataagataaatatttgctaatagtgattattttattagaaaatgtgatgtcttgcttgtgagtttagtatgtgagtatctggttatgatttaatgattgtgtttgattatatttgtacttggatgtaccctatgtatgattttactttttttgttggatttttgtgactcacgggtactttgtagtacaggtaaagaaaggattgagctaggtcagccatgagttagaggactttccaagcaaatgtacacagtagcttatccacccagcagtgtcgagtagtgagatttttggtttgtggcaactttgaaaagtataagtatttggttgtaacatttgatcaaaatatttgtaaatatttttaaaagcggtgcctcgattccaattactgtatagtgccaaaaattggtttcatatttcagttaattaaataaatttttaattaaatcacaatttttctttaaattgttagtttattattataaactaatttataaaggcacacacacgtagcgttcctatgggttagagtattacaacatggtatcagagcagttacagttttaaaggtcctgaagactagctggatatattcaattactatgaagacaacctcaactcatggtatagtaagtgatatctgcttatgtaagtgtcattattttgtgacagtttagttatgtacaatgtctagtcgtgtctggagtttttgtctgttatatctgtactagtgttctgttaagtcagttattgttagtgttagttagtgcgttttgtggtatatatagtcagtttcattctgtaaacagtttatcgataaaatcgtatagtttgttaattcagttgttatcgtgggagttagtgtcgtatcttgctattctt

SEQ ID NO: 109857 - DNA, 1057 bp, Cannabis sativa
aaaaaagaaaaaaaaaatcaatttaaaacaacaacaatgaaaacagtatatacacaaacaaacatttttttataccaaattaaaactaccattggaaccccacaaacaaactcaagagattgttcagcattttcaatttgaaggcacaattttccaatgagcaattgagaaggttgatatgcatttaattactaattaggattagtggacagttataaagatactaatgtaacttataagcaggggaaattgttgaaaaaaaaggcttatacaattgaagaaaaagaaaactcaagggcaataacatgggctgtaaaaaaaggggaaagggaggtgtttgatgtaaaataaggatttgattccttacttctaagcattaaccacgaccatacgtatgtctacggtcggcatccatcaatcaaattatggatagaccattaccgttcattattaatttaaaaaattggccaaaataaaaaaatagccttgaattactttcaacctaattagcataaaaaaaataattagagatcaaactcagaatctgaaattaaaatataaattaaaaaataatgaaaaatgcatttatcaattatatatgcaaaggtggctatgcacaatttcttagttcaaatggactcaaaggaaagagacttgggattgtaagacatccttactttgaattcaacatttctaaagagatcgacacatttctcattattaatacatttgagcaatatctcagcacattaaggtaatccaatatagcatatgttctagtgtacgtacttacatattaaatccatacatacatatcgtcctggtattttatattttagttactagttagtgtatgaaattaatgtatcgatacttattgaaaaactaggaaaaatggtgcaattataatagataaactgaaaataacaaatattgatgaaatcaacaaatgaataatatattatatacactactaatatatagcctattaaattttggatattgtaggaaaaaattaaggaaaatgggcaagaattacttatagcagccgaagcaa

SEQ ID NO: 109858 - DNA, 1086 bp, Cannabis sativa
  modified_base (44)..(46): a, c, t, g, unknown or other
  modified_base (1054)..(1056): a, c, t, g, unknown or other
gttgcaacagcatgttttctcctttagattgatcacccatgatnnngttagttctaccacttcgaacatgctctcgtttattggctttacctgcaaattaggtcgatataatcaatcgtcaaatagtacagaaaattgaaaaacaactattaggaaactgtaatgcaacttaaagtttaaagagattttacattttctgtcaatgagtccacaaagttgttgactagcttcttctctgctgtaggtgttaaaaatgttgttgttttctgtgcttttttcctgtttgtgtatgtccattgttgtatcaaagctctcaatgactccattagtgttgtgattagtagttctctagctgctaagtttgttgcatttagagattcagcaatgttagaagtcatagttgaatacctgttgtatttgctgtggtatcttgaccatttatggtatccaacttgttgtaaatatggtctaacacgaatgtccaagttgtccagctcgctcatatggtattcaaatttcttctttgtgtatgctcttgctgctgcagagaatggtttatcgagcttgcttgcattcttcttgaaggttgcttaacaggtggtatacacaatagccatgcgttatttctgaaaatacttgagcagttgccttaattatgctctcatgtctgtctaagatcaagcactgttcatgtctgatcccatatgtttcacttagttttgtgaaaaaccattgccatgagttgttgttttttgaatccacaacagaaaaagctagggggaaaatgtgcccatttccatcttgtgtacaagcagagagcaatgtacatccatatgttgatttaaggaaagttccatcaataactattataggtttgcacttcttccatccttttattgaaacatctaatgccacaaacaagtacttgaagctgttgtcttcctctgtttgcatgtgtacgatagttccgggattatttttctgcagcagcatgtgcaaaaaacttggcagcagcttgtaagattcgtttgcttttcctcgtaattcttcttgnnngtgctctttgcttctccatgctttcatgta

SEQ ID NO: 109859 - DNA, 899 bp, Cannabis sativa
gaaattacaatcccaatataagaattatatagtaaatcacctatagtaaaggtacctagacgaggaatggaaacatgcagtacaaatggcattggctgttctatcatcaaaccacaccttcctcctgtgaagctcacatagtgtgataaaggctcttttcgctttggcttcatcctcttgctgtgtacatatccatattcaagcattaatcaaaccaaaatcttcaaaaacataggaggttacaaccaataatgatgaaaagaaattgctaaatcagaagaaaaggaaaaaacctgtagcatgggaaatataatattttgaagccctcgatttttagcttcattcttgtgtttctgattcattcgcctaatgcattgaactacatgagagaatgccaatttttttaaattcctatctcctagagtctgtagctccatgaacaaagcaagattttctccagtatcaagtatctaagaacaaaaacacacatcaaactcaaataagaaactattcacctacaatcaaattatatccaaacattttaagaatctaagcaacaaaaagaaagcactgttaacaagcacaaaattgactaaattagcatcatatttaccttcctattgatcagaagaatgagagcctgaacaaggtggcaccgaaggcctgaagggagggttcgcgcagaggagcggagcaactcagcaagctgatttgggaattctgcgagttttttacggtaaaaaggtgtaacgtgagctaagaacatggcccaatcgcccagatccttagccacagttgggtcattaccaacgccactgatggatgtgaacttgaaagctgcttgctgcttaaacatctccaagaacgacttgaactggctgtacacagtcgccagttcc

SEQ ID NO: 109860 - DNA, 1058 bp, Cannabis sativa
attttattaattaaaaaagaagtatttaataaaatttaatccgtcaactatttttataagatactaaaaagtatttgttatttcatatttaaaagttaccatatggtatgtattttatataaggttattttataaatttatttcaataagtttttaaataaatttataaagaaaccaaataatatcttaaatattataagaaaaaaagtttacatattacaaaaatttatacatattttgctaatgagttatttggtaatttttttgtaattattaaagctcagtatattcaaaggtaatataaaagttgttataaaaataaaaaataaaaagttacatatatgtatcttgattaacaatattatataactagaaaataaagtgacataaatgtatcttgatcaataacattatataaattaaaaaaaaaattatagcttcaaaacttgaaatttaactaactgaaataataataataataataatgtatatatatgataatattatctcaaaaagaagcttattaaaacaaaactaactagtattttagtgattttttttaataatatttactaaattttaaatatatttatttggttaacaaaatataagataaaccacagtgttgcttttcatttcaaatagcttatcattaaaaattatttcctacacattaaaatagaccacatcatctttaaaaataataaactacattaaattatgatgatactattcttaattccaaataattatgatgcaattataatttttttcaaaagtatggtaaaattaaaaaaaaaaaaaaaactgaagttgttgacacaaacaaaccaaagaaaaaaaagacaaaattaaaactaaaaaagagctagagaaagtcaaaagggctgacaaaaaaagaaaaaagaaaaacctaatagcatattaaaaataaaagaataaaaaaaactaaaaaactaaaacaattgaccgctagacaacaaagaaagatgaaacaaaaaagtatacctaagtaaaagagaagtcaagaagagtaagtatatattaattttcgcata

SEQ ID NO: 109861 - DNA, 834 bp, Cannabis sativa
aatgcggttagcgcggccctagtacgggaagaggaaaaaactcagcatcccgtgtactatgtcagcaagcgcatgataggagaggagacgcggtactcggtgatcgaaaaactagttttttttctcctaatggcctctagaaagctggccttacttccaagctcacccaatcaaggtattaaccaaccacccgcttcgtcaagtcttacaaaagccagaggcatccggaaggctcctcaaatgggcaatggagttaagccaatttgacctacactacattccacacatttccataaaagggcaggtgttggcagacttcatcacggagtgccatgaagttgaagctaccgcaaacatactcacaccaccagtcccagcgtggaaagtattcgtggatggcgcctccaacgaaaacggatccggagcgggggtcacgatgatatccccgaacggacttcgactccaagcagccttacagtttgaattctcagcttctaacaatgaggccgaatacaaagccctgatagcagggctgagattggcaaaaaccgtaggggccaagagagtagaagtctacagcgattcacaactggtattaaaccaggtgtcaggagaataccaaacgcgtggagaaaagatggctgcctatgtagccatagtccgggagctgctccacgagttcacggactataaagtagaaagaatccccagagagaaaaacgctcatgctaagtgcctggctaagttagcttcagacagtgagattgagaaactgggggtggtacctgtggaacgcttggcagagccaagcatcaaagtaaaaaataccatagc

SEQ ID NO: 109862 - DNA, 721 bp, Cannabis sativa
  modified_base (103)..(105): a, c, t, g, unknown or other
  modified_base (184)..(198): a, c, t, g, unknown or other
atccattgttataatcctaataagcaatgatcctctatagatgatctacattgcatggggacaaaattagcgttactataaagaccgcttagtttaaatttgnnnattagcagataattagggtttaataatgaaaattatttattaatattaaattaattatttatgatgatttatttaaatnnnnnnnnnnnnnnntatgtcatatatagaaatttcatatttttgcatgttcagtgcccggcaacatggaacactgtgtatggctcggtagaatcacattttagtatttttgtatagcggggcggtttttttagacattggaaatgtcgggattggtcgggaatttagagtttcctaaaataccctaagtgacatgtatgactcttttagtgtaggcatggggattatggtcttttgcctattgagttttgtcttttagtgagggtttaatattaagttttaaatctgattttattgcttaatttggctgaagcaatttgataaaataagaaaatccattcttttactcattttatacaaaattagaaaagctagaaaatcattttctctctcaagctctctctctctttcggccacccttgagcagctagggttcttgattttgcttcctcaattcagtgtttagcaatagttctaagtataatccaagctaaggtaacccttgtgcaactcccttgttagtttccttaagttgtaa

SEQ ID NO: 109863 - DNA, 508 bp, Cannabis sativa
aatatatgtatatatttttttaagatgtaattattcttatatagaggtatattttattaatacgggacttaaaaaatgtataactaattacaatatagacgttattcttatttataaccggctcaaattgggacttcatttttttataacaaattagaagttattcttgagtagagtattcttaaatagaggttctactgtataaacaaataagtcattaaagcctggaaaatgttatgtggttttcctcgctgcttccttaattatagtcttagtaaagacaagaacataagagtttgaccacgtctctgccttatatgtatagcacaaaattatatattgtaaatatcttatctaccaaaatacacgaaaataaatgtaaacatataaaaaaaagaaaaattgtatggttggtgtaccttttgcaggagtatattatgagtactgtagttttttttttcaaatgggttgttatttataacaatattgtatgtgcaaatgttttttt

SEQ ID NO: 109864 - DNA, 2265 bp, Cannabis sativa
acgtttgtgctgctccttgttcatcgtgtatgcactttaatcgatctctcatggcttcaaaaactgaagaattttctgacgaaactggtcgtgttgtaaatgttgctagccagtactctgtgaatgtgggtgacacctcatcttcctttaagaataagacatgtgacagtttacagcaagcaaacagtgaaacaagcaacctaatgagtgttagttctagtcatgattcgttatctgaaaatgctgacagcaaagcaggcgtaagatctaaggctttagacactgaggtgcctcccgtggtctctggtggaattaatggagagattggagttccccctaaagcagttcgtacttacccacaaggtttctcaattaagtgcgaggattccaaagttgtagaagctcatgatgatgacatttcatgtgttagtagagctaatgacacatatgttgcaatcagtaatagtagcaagaatgtagacaagaaaactctttcatgtagttcagcttcagttagtaatttaggtttagaagaatcaaaaaagagacacgagtcaaaagtatgtgagacgccagtttcaaaagatgcagatgctagcagtagctactctaaggtgcaatgcttctacttttgtccgtgcagtgttaatatttgccccttaaattacactttactgacttttgaggaggtttgatgcgtatttacaggaaaaattagttgattgcacttctgaacaaattggtgcctcatcgaaaggagctgcagcagctgttgatggtgtttcttctcagaaatctcctgtccatactgataatcccacaacaatatcaccgaagctggaagcagagatcactagtgatattcaggagtcaacaggcaaaactttgaaatgttcaggtcaaggtgagagagatgagaagtcaagtgaatttgacgtgccggaacctcctttgaaaaccgaatatgatgatagtgatgaatcggacattgtggagcatgatgtaagtagtgaagttattttattccattaatatatctcatagtgacaatttttttttttatttcatttcccttgtgaatatattttctatgaagacttttgttgcatttttcatttactttgtatattatggttcctttggtctcttatttgttatagggttataacatgagacttcataaattgtttagacattgactcactgaagtgaattgtgaattgcatttaaaagaggaaaaagaaaaatgtaaactgatgtgctctttagttttgtgggtctcagtaggactgaagaaggagtttgtgactcggaaatgtagttttgattccagtcatcttggtctctcttcacctttttttcttaactcatttctgaatttgttttgaaccaacacaacaacattgtgttccactccaaaattcttgaagttcttttatgtataatttttaattttgttatttatctcggggtatttccaaagattttccaataaattcgaatttattgtatattacatatttcttcactacagagttcaaattttgagtcattaacttctctgatttcttttgttgagaacaggttaaagtatgtgatatttgcggggatgctggtcgtgaagatatgctagctatatgtagtaggtgtagtgatggcgcagaacatacgtaagattaatccatcctcttcacatgtattcttctgttggtgtattttttgttgctttgtttgttaggattatttgaattcacattttgacatttctattgctataatagctattgcatgcgaaaaatgctgaggaaggttcctggaagtaattggatgtgcgaagaatgcaagtttgctgaagaaatcaatagccaaaagcaaggtaatgcctcaagagtaaaaaatgctttaaaattctattctgttgtgaaaagacacttattctctatcgatatgtgtgtaacttttagaagtggagggaaagagaatgagcaaagccagttcaagtacacaagttccgtccaagagacatttagaaaatctagaagcaacccctgctgcaaaaaggcaggcccttgagtcaagtgtaggatcacctaaatcctccagctctaacagagtgccatcgctatcacgtgagtcttcatttaagaactcagatagggagagaataaggcctgcgcgaccggcatctttaggcaagcaatctgctaatgatatgcttgaaagttcacgctctcctgcagctggtcatcacattcaaaagggtga

SEQ ID NO: 109865 - DNA, 501 bp, Cannabis sativa
atatttgtagaaaaaatatttgtaagtgaaagtaagatttcttgtagtgtctgttgtgcaattcaaagctcggcttgttgcaaaaggatttctgcaacagtatggttatgattttacagagacattcagccctgtggtaaagccaaccacaattcgagtcatcttaacaattgccttatcttatggttgggaaataaggcaattggatgttaacaatattttcttaaatggtgatctaactgtagaggttgggaaataaggcaactggacaaagatcaccctaactatgtgtgcaaactcaataaagcattgtatggattaaaacaggctccaagagcctggtttgataaactaaggactgctccaaaaagctttggttttgcctcggcaaaggctgaccaatctttgttccttcgaataacttcctctcacacaacctttgtctttgtttatgttgatgatatcatccttacaggcagttccaattcagtaataactagt

SEQ ID NO: 109866 - DNA, 555 bp, Cannabis sativa
tcaactatctcatatagcacccctttcgacttctacatgcatgcaatgttcgctcaaccatccaactgattcacacttgcatcacgctatgtactaagtactaagttccaatgatgcaaccctctggctatcatgccaactctagcacccctcttgactttcgtaggctcacatgactactaagtttcactagcacggccctctggcctccacacaaactctagcgccatctcaatgcttgcgctcagtcttctcagccctgctggcttctttgatgcattcattccacaacttcacatctctatcgatgcctctgtgtgacttacgcccactttgcttttacaagccaacacattccactcaactgcctcgacgcttcatatggatcaaataaaactcacatgcgaacacctccaagtacaaccatcctttgacgattacagcctccaccgctttagtctccatgtgcatccctcttgacacacacacacacacgtagcaactgaggcattccatgtctatcccaatctgaactatctcggtcatcagctctcg

SEQ ID NO: 109867 - DNA, 1376 bp, Cannabis sativa
  modified_base (765)..(765): a, c, t, g, unknown or other
tactcttgcactcgttagttttctcttaaaatctcaccctacacatctcaaaaaatgatgaaatttcacaagcacaaagcaaagaccattgtgcatcacttttttgttagttatattaagagaaaaatcgttttcaagcagtaataatcattctaattgaaatagttaaagttttacatatctaatagttgtacccctttgtgaaatgtggcgcggacccatctcgaaatatttttccccactagtcacaatgaattcgtactactaacacttgattatgaagattggtttgaagttaaattttgttaaaatgactcctttttcaaaaattgaaatattcttttatttaggataaatttcaacaagttttttccttactcttacagtccttagtgttctttcaaaatcaaaacctacacatcttaaaaaatagtgaaatttcataaggacgaagacaagaccgttgtctataacttttttgttggggtttgggggtttacgatttggggttttgggttcgaggttcgagggttttgggtttaggatttggggtttgtggtttgggggttcggggttaagttgttttacattaggtgtttgggtttggggttttgagtttggggtttggggtttttaagttttggatttaaggttttgggttttgggattaacgggttgtgttttgttgtttagagtctttggcttttggggtttcggggtttgaggtttagggtttgggcttttatgactagggtctagagtttnggatcttggaccaagtatttggggtatgagattttaagtcttgggtttggtgtttgggttttagtgtttcaaaattttgggttagggttggggtttgggattttgggtatggtgtttttgtgtttggggttttcaggcttgctgtttttggcattagggtttggggtttagggtttgatgtttggggttttaaggttttactgtttagggtttggggatttgggatttagggtttcgggtttggggtattgcagttttggcatttggggttttggggttaggggaatcgttatgggaatgggctggggaatgggaatgggaataggaatagaaattggaatgggaatgggcattggtcgaggaatgggaatggagattgagaataggaataggaatgggaatgggccaaggaattggaatgggatgggaatcgcaatgggaatgggaatgggctggggaatggaaatgggaatgagaattggaatgggaataggactggaaatgggaatatgaatgggaatgggccagtgaatgggaatgtgaatgcgaatgcaaataggaatgggaaagggaatgggaatgggtcggggaatgagaattgaataaaataa

SEQ ID NO: 109868 - DNA, 544 bp, Cannabis sativa
cctcttctacttaaaatgtgtagaattgctttctttcttctatcatgaaatttagctcgtatagcctatttagaagagaataaagtaaaacaaactatatcaaaaaaaaaaaaaagttcaaaagctagttatagtggactaaaaaaatattatcctgtaagagaatattttcaatttactagcaaaaagaatagtggtgacataacttacagaacactaatagatatacaagacttgataacttagaaatgctaagtataaaattcacctgaaacttaatatgtatatacaaaatatacaatttttatgtaactaaataaagagaaaaataaatatataaataaataaagagacaaatatatatgtaccatgtgtttttaactcattttctgtttaataaaagtctccactctacatcgctcttgacaatctggttttagtgcttgttgtttattatcaattttagcattgataatatttttgacaagtctaaattttgaggctctctatagatcaaccattatttgaaagtattttttttccc

SEQ ID NO: 109869 - DNA, 558 bp, Cannabis sativa
  modified_base (112)..(113): a, c, t, g, unknown or other
  modified_base (221)..(221): a, c, t, g, unknown or other
ggatggttctacagcgacttcgggaacataagttatatgccaagttcaggaagtgcgaactttggctatctcaagtgtcctttcttcggcacattgttagcaaagatgggannaaggtggatccaggaaagatagaaaatgttagggattggccaagaccgaaagcagtgacggaagttaggagcttcttgggtctggctggttattaccgtcggttcgtngaagggttctctaaaatttcaacatccttaaccgagcttactaaaaagaatcagcgttttgtatggacgaataagtgtgaatcaagttttcaagagctgaagcaaaggtttattacagctacagtgttagctctgccttctaacagagagaagttcgtgatttattgtgacgcatccagacagggcctggggtgtgtactgatgcaggctgatcgggtcattgcatatgcctcctgccagttgaaagattatgaacaacgatacctgactcatgacctagaacttgtcgtagtagtgtttactttgaagatatggcgacattatctctacggagaga

SEQ ID NO: 109870 - DNA, 549 bp, Cannabis sativa
ttgttgttgttgggttatgttttcagtagttaaagtatgtttatttagagtgatttgatcaggttttgttaggtagtttgttggatgagaaagctttgagtttttaaactcaagcttggctcatcaatggtgattttgaattttgagtatgggtggttgttttatcacttggaaaatgtttattggggtgtgatatgcaggtctggaaagtttggttgagtttcgaaacgatttggttaggggttttaattttgttggttttctgggtaaaaccagttaaccagttttacactgcttgtaaaatcgattacccggattttgcagtagggggtgaaaaccactttttcagcctgtcgtttcgtgtcagtttcaggtttctaggtagttgattccctgctagttttggttttaaaccttagtcccggttgtgatttagccactcatttatgttgttgttatcgatgtgatttaggagcctataattccctgagcaatggttccactcaggttgaccgacacacctgaattcggaattgaggtaagattagt

SEQ ID NO: 109871 - DNA, 748 bp, Cannabis sativa
ccagctcccgagaaccttaccagcaactactcaaccaatgagcggcatacaattttccgctaccccagagtataatcagaatcaggcattggcctttgcatcttctcattatgggaatccttctgggataaatggacaagtcccgtctcactccgctcctaccgcaagcttagcaggtccttctcaaggctctcagagcaagaggtcctcaaaaggtagcaaccggacggaggacaagtggcaaaaaagggggtacactccccaatacacccagtacacggaactgacggactcccaggaacgtgtgtatttcgctaccaggcaaaatacgcactactggagaccgcctcctctgtacagggatagctcccgaagggatcccaacaaaaggtacgagtatcataacgacatcggacacaacaccaacgaatgcaaaaacctcaaagatgagatcgaaaacttgattcgattgggccatctttacgaatggatcaagaaccggttgcctcatctcaactcggttcaggcaacatgaccttttccccaaggatcactagggggtgcgcctggagcattagcaccagtcgctcccccaggggaacctcagcaaattcctggcctgccaccaagatccaacggaagagtagttatgatctctggaggaccccatatcggagggactacctgaaaggaactgaaacgttacgtaggggtcgtaaaacacatgaggtttgggaagttactcagc

SEQ ID NO: 109872 - DNA, 670 bp, Cannabis sativa
cacaggaatggaccaaagggttttccaccaatgaaagtatgggttaggattggaagaggaaggaacttgagcagaatgaagagtgcaggcaagatggtaagcagatttgactgttaaaatacctgaggagtgaaagccccaaataagcgaatctgaagatagaggatcaatgggggttgtgaggatacgatcaacttggtaaggagggaagtaatgtttaagcttacgggtgttccaagttgagtcatcattaatgaagaaagagacaaaagcttgggattgatggagagagtgcaagagaatagggtgcttagtgttgggaatccaattaggtgcagataagggaatactagttccagtgccaatcttccaaaccaaccccttttgaagtaaatggcgaccccaaagaatacttctccaggtgaaagaagagttgtgaccagaaggggcattcatgaaatcagaatttttgaaatatcgggctttaagaacagaatggagaagggaattcctatcattccaaatacgccaagcctgcttagctaaaagagcttggttatgagaagaaagaatacggaagcccaggcccccaaaaaattttgaaacagaaatagaatcccagttcttccagtgaattttgttagtaccttgagatccccaccaaaattta

SEQ ID NO: 109873 - DNA, 875 bp, Cannabis sativa
  modified_base (57)..(69): a, c, t, g, unknown or other
  modified_base (257)..(265): a, c, t, g, unknown or other
  modified_base (316)..(318): a, c, t, g, unknown or other
  modified_base (660)..(663): a, c, t, g, unknown or other
  modified_base (840)..(850): a, c, t, g, unknown or other
tcaactagtgtgaggaccatgggcctatataatcaagcttccaataagtagctctannnnnnnnnnnnnaaattctctaacttattaattccctctgactctattatagattcagaatcacactcttattatataaaacgttctatatgttttaagatatagatacgctactaattatccattgttataatctaaatagtcaaagattctctatagatgatctacatcaagtagagataaatttaccgttctacccnnnnnnnnnttttatccttagaacacttagctaattgtaaataatatttcagtaaactannntaattactgaaatgagacctcaatcatttatcacgttaagccaagctaaaaagaaatcaccgtttcacttgtaaatacttatagaagttatagatttcatatttatgattagcgcttccactcaattgtactataatgttcttaagatgtaagtattgagctgattcaattggtcaggtttgacgaacaagtcaaaagaacacaaataatacatttaagcaagaacctaaccatcttaggattaagatctattgacctaagatcaatgatattgacttggatagatataacaataagtttatgatatcttatctaattgtcaatatcggtccagtccaatgnnnnctccatacattcgatactagcatattttactaatattctggaaaagacataacacttattcaaggtgtaagtaaactttatcgttgattatcatgtcagtataaattcagtgtactgacaaattattggacaagaaattttgaaacacataatcatgattatattccactgtgttgnnnnnnnnnnnatcatgaataattatatgttctgaa

SEQ ID NO: 109874 - DNA, 614 bp, Cannabis sativa
tttatagtgtttttatgggggatccctagaaatagatcacttgtctttctgtgttagcttcataggggcacatattcctagtagatacaaaataggaaatacatgacctatatcgtaggtatcttaggagttaggtggatatgatcttttatccgctcttgactgatgtgattcctcataaggtagccgtcactagacttatcgattattgtgtaatcgctgtaaaaaggggcttacgccatctgtcatgttgtttatggaggtttcaatacgtcttcccccatgcggcattaaatgcgaagtgattgttcaagtaatctctttacctcccggaactgccttagcatggctctagcctcccggagagtaaagatgtgtcttatggtctcctctgggaggaaccttccctgaggtgttccttttttgtctaagacttagttgattttcgtgagtgatggttctttcagatccacgtgtcacccttatccgcatccacttattttgggaaaagcaaaggaaacatttacccccaagcctcatttaatgacaggtaagtgaggcttgcttgatgcctccggttagcttgttgatataacggcacgtgccttaagcgc

SEQ ID NO: 109875 - DNA, 775 bp, Cannabis sativa
tgaatgatgaactttggatcgattactgttatgaaagacttccggacttttgttacgagtgtggaatcattggtcatgtttttgacaaatgctctctgtttttagaaaaattggatgaaggtgttgaaccaaatctgccatatggtccatggatggaaggatcttcccttccaagatctagttacgatcgctacagacaagacttttctaaggagggtccttggccttttctcactcgcctggctcgtaatacaatcaatccgattcttgagcacccgcgacatcttcctgctgcccctgccaatgttacttcttctgagaaaggcaaacaagtattagatgccacaaacatcatagaatccaataacatgaatttgcactctttgcaacttactggtgtctcttctcaatctcccaaaaggctctctattaaggaccatgcttcttcatcatgttctaaagaaattccaattgataagttatctccttcaactcacggtggattttctactcctgcttctactactgaatatacctctcgaagtacagcgatatgtcccacggtaccacatataacacctaatattaattcatcactaccttctccaccagtggccacatatcctccccttacatctacacacttcaaaaaaccaatatctctttctatgcaaatccctccagcctatatccacatgtccacggaattcaatacaagttccacaatgtcttcttccactgttatctcagcgtctactgctgcaacttcaccacc

SEQ ID NO: 109876 - DNA, 1640 bp, Cannabis sativa
cataacaacatatacatacacatatacatatacacattttatactaatcttatctcgtttattaattcacgtgtgtcggtcaacttggatagaaattatgtgttgaatggaggccctatgtcacatttacataaaatggataaataacttgctaaaatcttttcgaggacgtaaactcaaaattaaaagttttcctatcaataaatagcatgaaaataccctaaatatcgagaaaaaatgaaaattaaggctcccaaaactacctaaactgattcccaaaatggtaaccattttttagaatcatttctgggaaaatggtttatcatttctagaaaaactatgaattgtttttctgcagatgtccccaagaactttgaatctcactcaattctactctaaatttcacaccaaactccagaacacctaattaaaccataacagacataatccaagcaataataacaagcaaaactcttagaatcaaaaattaccacagttgagtcaagttggagttcttaaactcaaaattgatcaaccactcaaccagccctcaaaatcctttcaaataagcttcaaacaagtcaatactaacccagaaaacaatctccaaacactaagggttcagacagaaccattccctcaaaattgcatgctcaaactcaaagaaaaaccatcaaaacccaaatggaaaagttctagggttttaactcatattggaatcacttctacatcttgaattctagctgagttcactgatattgatgaagaaattgtttagttcttaatggtttcttaaggttgaagagatgagagagaaatgaagagattcattttgtttgttttttattaattgaataattgtttatctaggtttatcttagattaaaattagactattattataatttattctacaataatacatcaaaacaacattattttaattatgcaaaattactattttgcccctttctccatgcttaagtaatcttaagacttaggggtaaagtgatcaaacactacaacctcgtttaatcttgacactccaaatgtcaaatatatattccccactaaataaaggattttaaatcttacccatgtaactctaatggctaatttgtcccattatcatggttattgagaaaatcacaaaaatcataaatttcacatataacatatataacactcctaaagtttaataaaatctctaaaatcgagaaattataaccctaatgtcatttattaaaaatagagcccatataataactaatcacacatataatcataagttatacttgattagttctaattgcccttctaaatcataacttagtatgcggtcattacacttacctccttgtcaaaatgattttgtcatcgaaatctaacttgaacaactttagatattgagtcctcatgtctgactgtaactcccaggtagcttcgtccaccttactatagttttaacaaatatctatgataagtatgaatttccattgatattaagaaaaacaaatctgatatttcattaaaaagaagaagaaaagtgtttgccaactctcccacaattccattgtggaatgagttgcaaaatttaacaacgttttacttgttaactgacaaagtgttgatacaggtca

SEQ ID NO: 109877 - DNA, 2174 bp, Cannabis sativa
agtctccctgtaaattctgttcaagaacattcacaaaatgagactcgtaaagttaagactagtttaagaaaagctactgatccctcgaaggagcgttcagatcaatttgaggttcagaatgcacaaccgaaacgcaaaatgaggaagccattaggctctgctgctcctgatatttcagagcctgaagctaaagtttgtgattctactgagaagttgaaagatattgaggtggtagcaccaaaccaatctgaactcgaggacttggaactgcataaatttgataatcctggtgataattgccaatcttccattagtttgcagccaatagagattatggggaaaaataaagatattaaagaactaaatcaggagttaagctgcaaggatgattgcatacgcaatgatagccagaaaaccagtcaaagaagagcttctttgcctccaaagtttgaccctcaagagaatgttgtacatgacacaccgaaactgcctagctatatggctccaactgaatctgcaaaagctagactgagaggacaaggttcaccacagctttcacgggatgttgttgagaaaaatgctttattgagacggcattctttgtcttcatccaccaatagcatgttgacttcactctcaccacgagcatccaagcttgttcaagtaacaggcaaaggagtgatcagaggtgacagatctttgtcatcttctagagatggtggaggtaagttttaaactcgagaacccatatgcttttttattttgtctggttgtatagctttgttaataagttataatgactggatctcatagggggatgtattcctttaaccttgatcactccttcccgtgcctgagttttaatcagagatgcataccttgcatagtacttagtatggtgccatcaaatgaggagtccatgggcttgtggtttacaatcacttgtaaattatccttttctactgggctgtaaaatctaatgatctttaaacttagtataatgggtgtggcgcagcctaatgattatctccgataataattatgtatgacatcttatttgttgagaattgtatgtattatgagctcaatctattgtatcatgaagatttttcagcataagcaaaagtgaggtttatgatgttcttaggcagttaggctctatgaccctgagactttcaaggataattttcaggaaaaagttttaggtgtctttgaaaatacatattttcttgttctccacttattacttttctaattaactaccgtgttataaagattgacaatgacgatccatcatgaatttttataaggtgtttgctttgttcatctatctattaatttatttaagaaaaaatagtgagaagaagcctacttttataggtggagtaatttttttttaattgagtacgtattctcatatctaatggtccatcatactgtattaaattgtcaatttttagataagctgattcaagccgagtggagaaggtgatttttccaccacatacatggaaaagcattagagctggggaaaaattgaactaacgtagcaggttttacaaaatgttgtcgtttgtttacatgaaaatgggtttagttgcagtaaccttctttcagcatgctcagcttgttttcttactttcctggctttgtttgtttaggtaggtaacactcacaagtcttagtgtttggactggcatcttataggcttgaactgtataattttcatctgtcatcacattgttatgtttacaaaaatttgagaactgggaagcctttattctttaagcagcttgtgatattcttattatttgatgcttgagttttgttatatgtgggtggaataataggacaagatttagaacataccgaaggttattgattattcatgtccattgacattagttatttactttattacatttagctttttgtcaaatgctccttcatcatagagcgcagaaagcaaaaagagaagttccggtggtccgagtagggtggaactttgctaggtttacagaatattcaatgccagtgtcagtcaatgcatccataacttgctgaggcaccccaaaaaaatagtggcatttgtaatggttcctcccatcaactaggtgatattgaattgaatagatatgacggtaagtttattatatctgatccaagttcaatat

SEQ ID NO: 109878 - DNA, 964 bp, Cannabis sativa
gcagcgattgaacaggaaataagcacatagaaaacagtttcctcacttttttgacaaactggacacatgatttgaactgggatcctcttaccacttaattgagtcaagatgggcaaacaatttaaagcagcccgccataccaaattgagagctttcggtggtaccttcaaattccaaagcttgtgccaaaacctaaaagaatcatctgcaatccaatttcttttttgagcttgtatcaacttgtatgcactacgcactgagtagaaaccatgatgctccttagacccgaaaaaacgatcatcggctacattcagactcaatggaaatgcaaaaatatgttgttgatcgcgcttgttaaaaaaatcattaataatatctgaatctcattccctcttatccgtacacattaatgagctcaccttatggcccaccaaatattgggcatttgaagtaacaaaaggacacacatcaaccagaagccatggctgatgcaaaatatcaagcatcacactagaacctattgcccaatgaactccagacttgagaagctcctgcaatttgaagacgctcttctacataaaacttagattattcccaaggaatgctgaaagaaaattacccctaggaaaataacgagccttatataacatactcaccaaagagtttggttttgttagtaaacgtcacccttgcttttctaacattgccaaattaaagtcatgaaaattacgaaagcccattccacccatagttttatgtttactcattcttttccaactcatccaatgaataccgccaccatgagaagaatttgaatgccaccaaaacttactcataattctctccaagtcttgagacacatcaagtgggagcaagaaaacactcatggcatacgtaggcaatgactgcgcaaccgttttaatcaaaaccttttttccaacatagaaagaagcttcccatccca

SEQ ID NO: 109879 - DNA, 651 bp, Cannabis sativa
taataagttaataaatctaactacaagttaacctaaaaaaataagttagggaagaaaattttttaggcctttcagcatcaatcatctaagccttcgtgaattaccgccatcaaccgttctatccactatcgttgtattggtaataattcagtttttgaattgtattcctgcttttctccaaactgtaaaaaaaaatatattattttatatatatatatattattatttgttattataataaatactataatcaataattaaaactataactttttgaccttgtatataatgattggagtttgcacgtgcgacgatgtcagtcatgtattttaaaacataaaaatcacattctttgtttttaggttgtcttggacaatttgttagtgaaattccgcgccacggcccaagatacgcatttgatgcccctatatatttgtatgctctgtttgaaaaattatattaacgtttcaattcattagttaattaagtaatttgttacataaatagtcattaaattattaccttcccaacatttcagtaatttgatgggaactttatggccacgtatagagtctaaatggataattttccttggcgcaacgacctctagcatccaatgcacactaaaaaattatattgagatataagtaa

SEQ ID NO: 109880 - DNA, 806 bp, Cannabis sativa
gtgatattgagctcaaggtttggagcatagcttgtatgttgctatcttaagatttggtgtatgttagctgtggtttaagcttgaattatgtgccctaaatactctgttttgatatctatgaatctttgggaatgattttgaggttatatgcatgttttggttgaattaggtgtgagtttggcttatttttgaagctgaaaattgggtgagtcccctgtttgggctctagtcgcgaccatggcattggcagtttattattttttttttatttttatttttgccataactttttactcgggactctgtttgggacgttctttatatcgttggaaagctcgttctgagctctatgtgattatttgtaatttgaatgcaaattttatattttgtggaagtggatttagggattaaccctatacttatgaatctcagaatttgtgactaggattactagtacttggtcaagagcacctggggatttggaatctccacatttacgggacatcaggtaagacaatagttagcacgtagagttatgcgtggtggcacttatattgaatatgataattaagagtaattagaaattgggattagggttattaccctaacatgagcggtttaagggcctatggttattaccctagtgattatcaatgtgtaaatgttatgtcatgttatgtatgtattgaaattaaggattatgcattaaaggcataattgggttggactcggtaactagaactgagatgaaccgttctaaggccttattgtatttagacatgtgagtgtaacacgtgagtctatgc

SEQ ID NO: 109881 - DNA, 693 bp, Cannabis sativa
atttatcaccatataggtaatgccgcgaaatctttaccgcaattaccactgctgcgagttctagattgtgagtagagtacctctcctcgtaatcctttaactacctagacgcataggctattacctttccaacttgcataagcacacagccgagaccctgtctcgaggcgtcacaataaaccacaaacttttccttatcagaaggaagagttagtactggagcgggaatcaggcgctgctttaacaccaaaaaaaatttctcacaccgatcaatccaaacaaactttaggttctttcgggttagttccgttaagggtacaacaagctttgaaaaaccctcaacgaatagacgataatacccagctaaacctagaaagcttctaactttagtagctaattttggtgttggccaatcccgaacagcttcaattttggctggatccaccatgatcccatctttatctactatatgccccaggaaagagacacgagataaccagtattcgcactttttgaatttagcatacagcttatggtcccgtaaccgttgcaaaactgctctaagatgcaactcatgctcttcttctgatttagaatataccaagatgtcattgataaacacgatcacacatctgttcagctaatcctagaacattcgattcatataatccatatgaaatatggtatgcagcc

SEQ ID NO: 109882 - DNA, 559 bp, Cannabis sativa
caagctgcccaagctactcaggaagctcagaattgggaaaacaggtttgtagaaatgcaaactagaatcaacgaacaagaggaagtgattaggcaattaagacagcagggtgctcctgccaggtgcacctgcccctgctgtgcaggccgaaccagtggttgcagtaaactggatggaacctctgtatgaaaggttccgcaagcaagcacctccagttcttcggggaggtccggatgttatgaaagccgagcaatggctaacagtgattacaagaatcttgaatttcatgggtgttactggaaatgatagagtggtctgtgccacttttcagtttcaagaagatgccttagtttggtgggacatggtgtcaatgatacatgccgtcactacaatacgtgggaaaagttgcaggaacttttcaatgcaaagtattataatgaagcagttacgtgtgctaagagaaaggaattcactctcctgactcagaaagaaaatatgagtgttaccgagtatacaactcagtttgatcgtttggcgaggttggcctcgggaatcgtgc

SEQ ID NO: 109883 - DNA, 792 bp, Cannabis sativa
gcggttgcggtttgaatttttcctaaaccgtgcggtgtggtgtagtttgcgattttggattattaatatgcggttcaaatcatactgcatcacaattataaaaataccaatttttatacttatttaggtccaatatgtgaatgtccaatccaaagcccattaattattgtattatttaaacttaattatttttttcatatttattttcaaatcttatggtatttttgacaagtgttgctcaagtttaattgtatttgtgatattttatttatcgggtgataattcaaaccacaaaaaccgcaccgcaccatcttttgtaatgcgctttcaacaatattttaatttcatggtgttggtatagtttagaagattggtttgaaaaaataatcaaaaactacaccagcaccgcaaacaccctattatatataataaaaaattttgtcatataaaagaaaattgtgggtttgttagctttcgggtttgggttgggttgggcttctgtgttagctggcagcccatcaactaaattttattctttttaataataataataataataataatataggctaattagtaatttttcccccgaattttgacatttactaaatcgtgtcctctgaacttttctggctgttaaaaattctccctgagctattgagattctttaatttaaggacttttgtttaattttagtaaaaatattctactatgatgaaagttcagggaacataatttagtacatgtcaaagttcgagaggcatgatttggtagatatcaaagttttgggag

SEQ ID NO: 109884 - DNA, 861 bp, Cannabis sativa
tgattgttaaaactaatgtagaaaaagtaaaactaatgtagaaaaagatgacgtggtaattcattaattgatgtggcaaaaaatagctgaagtgacgttctaggagtggttgttgaagcaaatacttgaaaagcctggatttatgacatgtgtagggtttatgctgggaaaaggataagattttctttggaagagggcagcctccattataccaaaaaaaaaaggaagaacacaattcttggcagccattattcaaagaaactcaagaggatgaagaagaagaaaaagaagaaatggaggagaagtacaagaaatgaaagagattgagattatgctagtagtttgttctctttatcttttactcttcttgtattttattttctatttctaaactttgtaatagatgatagaattttgggtatttttgtgtttttgagcatgaactaatttatcttagttagaacttttaatgaaccttggattgtgaattttgttaatgttttatgaatgttcttagtaagaaagttttcttcattcaagaatgcctaatgtttgtctacctacttttgcttgatcaccaattgtaggttgttagctaatcttgattttgggaaaaataagattagagaaaatacttgaatgatgcaagattatcaccttggaaaagtgtgatttgtagatggtataggaatatgttattgactttgtatgacccatgggacattggtgcttaatttgtattctctaggtctagattttcataggaatatgttaacttaatcttgagagcccataacatataggtttggaaaaatcatatgttcatttatattttcggttgacaaaatttaattactaatg

SEQ ID NO: 109885 - DNA, 546 bp, Cannabis sativa
aaattttttaaataatattttaatcaaaagtactattacattttttattattttataaaattaatttatatataataaatttaaatgggtaaatagcggcataagtactcaaagttttatgtttgtaagcggcataaacctaatgtttatttttagcggcataagtatccaatatttgtaaaactgtaattttcttccagtttcgtcagtacatacttagttttgaatttattaaaagaacattcggaagtaactgatattacatatttctatttagacccaatgataaaaaatttaggccttatatgtaccatgtttaagacaataacagaatctgtactgataaaattagagaaaaattacagttttacaaacattaggtttataccgcttacaaatataaaactttgagtacttatgccgttatttactccatttaaattataaaatattattaaaataattaactaaaaaatatttttgaaccaacaatgattctattttaattctttttaactattatagctaaaaatagagaaagtaaaa

SEQ ID NO: 109886 - DNA, 722 bp, Cannabis sativa
  modified_base (31)..(40): a, c, t, g, unknown or other
  modified_base (282)..(305): a, c, t, g, unknown or other
ccctaatggaggaacgttcatttgtaatttnnnnnnnnnnaatctcaaaagataagtattatttataagtgttttagttatagtatggatcaccctaatggtggcgactattagtacaacttacaaaagtacgaaacaatggtagaagctcataagatagaatgtccttgactctcgcctaaacgggacaacactggattctcatcttgatcgaataaaaggttgctagaatgtttatcagtttagaggagatgaaacctctattcaatggatgatgctttnnnnnnnnnnnnnnnnnnnnnnnntatcagtttgttgaaaatcttggaaaataaaatatgtttcaattttggtatttttataaacatgtttgttttacttgttattttctgaatttgtgtatgaatttatttgaaccaaatcatttacttctgtttattgatatttgtagtgccaaaatgaataacccacaccccgacccactcctagtcgatgcctttgctaatgaactctatagtgtaaaaatgcaccctggaagttgcattaactcacacctgttgatgatgaatctaaagtttcaaaaagcaaacttgcttggaattgaattatcaaaagaatagcgggttcagttcatacttaatagtcttcctccagagtataatggatttgttgtatcttatatgatcaacaattttaactcttccgacatggataagctagaa

SEQ ID NO: 109887 - DNA, 577 bp, Cannabis sativa
  modified_base (174)..(183): a, c, t, g, unknown or other
acgactccttattcagttcatccagggtcaacaaaaatatatcaggatttaaaggccatgttctggtggccaggcatgaagaatgatattcttgagtatgttgttaagtgttttacctgtcagcaagtaaaggctaaacatcaaaggcttgcagggttgctgcagccattgaannnnnnnnnntggaaatgggaagatattgctatggactttgtggtaggtttgcctagaaccacgggaaagttttaatttgtgtgggtcatagtggacaggtttacatagttagcgcacttcttacctgttcggacgaatttctccattgaccagtatgctgagttatatgtcagagaaatttgtttgtcttcatggtgccccaaagtccattgtttcagatagagatctgaagtttacatcaagattctgggagagtctacatcaagctatgggtactctaaaaacgttcaacacaacatttcatcctcagagggatgggcaatccgagaggactatacaaattttagaagacatgctatgggcatgtgtgcttgactttaaaggatcatgggtaaagtacctt

SEQ ID NO: 109888 - DNA, 985 bp, Cannabis sativa
ctagaccatcatcaggtaacatatcgcgtgtattaactagtgccttaaaatttatttatacttatcttttatttgtcctcgcagagatgaatttcttgaagtccacgccagtcctcaaccgcaagccaaaatctggaacagcggcaacttcccctatcattcctcagaataggaagagcgatgtggtggttacccctgtcacggattcttccaacaggccagctaagggcatactagagaaagggaagaaggttgtgattgacccagctgtccgagcccgcaacatattgactctccaagagaagttcgtaagcgatgaattccaatcgaagatcgataagactcctgctgaggagctgttgcctcgctctgcggagttagcttcgcagttcatcgccatgttctcaaaggcctttgttactggatccaaggaggtcgaactcgtgaagagacagaacgttcagcttcaggaggacattaagaagttgaaacaagatgcgacttccaaggataaggagctcgaggagctttgcaaggccaaggagcaagttgagctcgtggctaagagtgctcagacgaaaattgaggagatgtctcgcgacttgtatgtcaagaaggagaatgggaagaagcagtatgaccaggcggtctcggactacatatacaccactgtctccaaaattccagacttcgacttttcaattctcggagcagaagcagctgaaatggctgaggcctttcgcgccatgtcgcccacacaaactcaaggcggtggagggaatcttcctgaggaggctgaggttgcggatgctgaagaagtcgagaatgaagccgtcagcaaagtcgcggatggatctgctcctactgctccaaatgcttgactttccccttagtattttcttgtgttaaattatatcctttattattttttttgtttatgcggtacaagggtactcacaccttgtacttagacgaatttacactt

SEQ ID NO: 109889 - DNA, 1202 bp, Cannabis sativa
acctttctttgaccaactcgactcacccaaatttctcaccatccaaacaacctttaattctgccatcaaaaccctcccccaatctattaattatctcattcatttctgtccaactatttttattcttgttgttgtcaatatgaatgatttattttcaggctccttctctaggtttcggaacgaggatgcatcgccggatcaccacgtgattgagatgtcgtcttcatcggccacggctggggctaccaatggagtcaatctcgataagttttttgaagatgttgaatcgatcaaggaagagcttaaagaactcgagagacttcatgagaatcttaactcttctcatcaacagagcaagactctgcacaacgctaaagccattaaagaccttcgatctcgaatggattccgatgtttccctcgctcttaagaaggctaagcttatcaaggttcgtcttgaagccctagaccgagccaacgccgccaatcggagcttgcctggttgcggacctggttcttcctcggaccggactagaacctctgtggtcaacggactccgtaagaagctcaaagactccatggagagtttcaacactttacgccaacagatctcgtccgagtatagagacaccgttcaacgccgttatttcactgtcacgggagaaaatcccgacgacaaaaccattgacctcctcatctcaacaggtaattaaacaaaaaatcctcgaatcctccattgaattcatatctatcaaaactcgattgaaactcattgaatttgtttccacgattggattcaggggaaagcgagacgtttctgcaaaaagcgattcaggaacaaggacgagggagggttctggacactataaaggagatccaggaacgtcacgacgcagtgaaggacatggagaagaatctgaaagagctccaccaagtgtttctggacatggcggttctggtccaagctcagggagagcagctggacgatatagagagccacgtggcgagagccaactcgttcgtgaggtcgggagcacagcagttgcagacggcgagaaaacaccagaagaatacccggaaatggacctgttacgccatcattctattgctggtcatcatcttgatcgtgattctcagtttgaagccatggaattggggcggtaatggcggcggcggtcaaccgaatccgcccgctacaccgag

SEQ ID NO: 109890 - DNA, 576 bp, Cannabis sativa
gtatgatttagaatgtcaatagcggggtactattgttaggcattggagatatcggggatttgtcgggagtggtaaatgactaaactacccttgctacaattattgagttttcaatcagagataggaggtccaattcaaggtataatgcttagccttcttctttatggttttctttagctcaagataggttaattgcatgattttagtgatttgaggttctgtagtgtgcagctagtttgggtttgaattctggggttaagataggtttgttttagttgattttgtgctgagatagctagttgtgctacggattactcaaacttgaagttagagagcctaagttggctctctaatggtgtttttaatttctgagctatttgatgtgttctgttgcttgaaatggatttagtatagtatatgcaggtgttctagagagtatggtaaagtttgggttcgatttgagttgtgggagatatttttggggttccttgcactgaatcggtggaccgattctggggagcctgtaacaaccggttggtccctaggaactggtcttccggttgggaaccagtctgc

SEQ ID NO: 109891 - DNA, 536 bp, Cannabis sativa
gttctgttcttgaagagggtcaagaacaaggggtgtactcgggttggtagagagaaaactgtgactgttttctctggtgtgtttcgagtactaacagagctgagattgctcgtgttcttgaaattatattgatactctcttattccacatgttaatgaagaattggtgatgtttctcagctggagtatggccagggatcatgttgatctctaggaccggaactaggataaattcttgtgttgttctttgtttgatttctggttttgattcattatgttgttaattagtttgttttcattattgctgtcaaagctgtgagtttattgcacgttttatgattgaattcttggtgttattgttgctggaattacaacaaaatcagagcttcaggttcaagatcgaattgaggaagtcaataatcaagattgaatcaagactcatctgcaaccagtcatgacaggatcagcaagatttgaacttgagaagttcaatgggacaggggactttggcctatggtgtaacaccctaactaactt

SEQ ID NO: 109892 - DNA, 653 bp, Cannabis sativa
taaatattaaagaaattaacaaatttttaaatctggccataatttaaaaaataaaataattaatttttgaatttaaatatcgaaatatcaaagaattaataataatctattaaaaattaaatattattaatttaaaactgatatttaagtttaaatataataaaaataatattttattttgaaattagggtttgaaaattgtaaaaattaaaaattgggaaaaaatcccacaaaaattagatttttggggttggctgccaagcaggaggccgcatgcagcctccttacgtgcgcggagaggggtgatgcagggtgagccgccgaggaaattcgacatttgcagccttaggagacgggcgcacgtagcatctcgtgtctgaagacacgggcgtgacacgccttcagacacaagttgtgtccaaaatgcgcgcgcgtgatggtgtcttgtccaaacacctggtgtgtgcgagcaccatgctcgacaccattcaaccccgaaatttcaaaactccataactttctcatttttcatcagaatagagttccttaaaaatcaaaattgcttaatttttcacaaggaatccaaataaattattttcatggaaaaatttcgtaaatcacattcaattatcaaataacacataaactaacat

SEQ ID NO: 109893 - DNA, 512 bp, Cannabis sativa
  modified_base (399)..(437): a, c, t, g, unknown or other
taattttttttaaaaaaagttacatgattttagtgtaggcaaaatgaattgagccaattggtggggataataagacaaaaagcaagttttatacttataataattttattttttgggcaaaagaggtatactaaaatcattaaatactaaaatttgacttttaaaggtataagatataggatatataggatatatttgtcattacaaataatacactattaatctaaggggtatatgtgtcattaaaattatcacatcattaagacacatttaaaatagtaagaaataagatgggctatagttataaaaaataatatttaatggggtaaatttagtaatgagatatttaactaaataactttgaaaagtttttgtattaactaaggtgccgtttggtannnnnnnnnnnnnnnnnnnnnnnnnnnnnnnnnnnnnnntaaaatttttgtttttaaaaattatgcttttgaaaaacaaaaatgcgttctgtaaccacttttgtttttcaattt

SEQ ID NO: 109894 - DNA, 985 bp, Cannabis sativa
  modified_base (40)..(63): a, c, t, g, unknown or other
aaactttatttaaagcacactttttctatgctagtaggtnnnnnnnnnnnnnnnnnnnnnnnnacacacgtggcgttcctgagagtcaggacgttacattctactaaggtttcatgtcttggaaccattgtgctttcacctactcttattctaaaaaatgtgttatatgtgccagattttcatatcaatctcatttcagtttcatccatgctagattctaacacttgcatattcaccttttattgtgataactgtgtaatttaggacagtttgaggacccagctgattgggatggctaaaaggcatgggaaacttttctaactgaaattgcataatgaaaaaaatcaatccttttgttttttctttagtttctgattctaagatcaataatgatattatatgacactatagattaagccatccttcttgtatcaaacttcattcattgaataaaatcttgcaatttaagaaccattcttgtcctaactattgtctattgtcattatgctaaacaaagaaagttatcctttgcttctaatcacaacattgctaaagaatgctttgacttaattcacattgacatatgggggccatacaatacacttactattgagggagataagtatttgattaccattgtggatgttcattctagatatacttggggttcattttattaaaactaagtctgaagcacaaacaaccattcccaatttcattcaacttgtgaaaactcaatatcaaaagaccccattaaaggtgttaggtctgacagtgctaaagaattgcaatttgttaatctgtttaattaccttggaataatacattatcattcttgaattcatagacctcaataaaattcagttgttgatagaaaacaccaacatttactcaatgtagctagagcattattattttaatcttatattcctttaaatttatgggatgagtgtgttgctactgctgcatatcttatcaacagaac

SEQ ID NO: 109895 - DNA, 866 bp, Cannabis sativa
ttttatattctttaacttatatgcaattaccattttatgtttatatgtttatcatgctttatgtgttttgtattttattactgatacaaaatatatggtattttaatctttgaaaatagataatatcacataaacacttagattttaaatcaatatttataaataattgtcatttcttaagcaatcattaagattttgtttaataaaaagatcttttgatctgatatgggtggacgaagttatttgatatatgtacttcaaagatcttttatatctattgaactctagactatattcaaaactccacagattctctataacacttaggggtggaagaagctattgatataggaagttcaaacaatttttttttttccttgaactctaaactatactcaatacaccacagtatctctatgacacacatattttgattagacatggatataatataataaacaaactagcaaactagtagaacttattcttgatcttgtaagtgttccaatagacgtgttactattctaatagtaaatagatgccagtaaagtccttggacatagaatcacagtaccttatcttagtgagaggattttaaaagtccagctcattattatttggatgacactagtgatagcctataatgatatgttcaagaaagaaattttaaaataaaactaagagaagttaatctgaccattcatatggataataataacttatcagaattataaggataagataggaaattttgcaaagtatgttcgaaacactcaagcataattcctgttccatatgaaatgttttatggtatctaaagtgattacttaatcttaagcaagtattttacattaatgttaatacta

SEQ ID NO: 109896 - DNA, 582 bp, Cannabis sativa
  modified_base (464)..(470): a, c, t, g, unknown or other
atatcacatagctgtgattagtccattttacttggtcaaaataaaatgtgtattaaatacattgcaaaccgtatcgttttgggacatctcgctgggaatagagcagaactaaccttgatggcgggatggagcttttcctatttcttttcaaggttgataatgaatctcgtcgcttttactctggaaacataacaccctatctgacaatcgcagattttggtgacaaggtgatctttttcgtgtgcatgtcttcgtatggcgaggtggacgccttgctatcacttgctttggtttacccgtctgttatacttagtttatatgctgcatattatacgctaagtgtcttcacagtcactatatctcatccacgtaatcgaggttagtgcctcgtcttatacacctgaagttacatggtttctcgttgaagtgcaaggcaactatttgtatatctttatctcgcatannnnnnntcagtcaaccgagttgtaaatatactctgtcaattatgcttttaacgagttattccaccttaaatgtaattataattatgtgccttggtttgtattcttcccagcttgacac

SEQ ID NO: 109897 - DNA, 757 bp, Cannabis sativa
tttgatagctaattggatgcccatccttaaagccaacacctctgccacttccaccgaagaggaccccttattctgatgaatttcagcagccaccacctcgcctaggtggtttcgaattaaagctcccaaaccgctaagagaaccttgccccgggacacttgcatcactattaatacagtaaactccagcaataggcggatcccatcgaacctttggttttggaatcgcctccaggttggtatccttcaaatgattatgattcatcaaaaacttagcttccaattgagcccacttttcccataactcatttggaaggagtttaagattgaggcgtttcttgtttctcctattccatatcaaccaagtaaggatgatgaaaagaacaaaatttgagtgtgttacctgctaatgtatgtggagaatcatgtccaaggttgttcctctacagtttttaagcactttccacacctaaaatttttgccagaaccatttaattgatgggcaaaactagaggccatgctcaatggtttcttcttcagccccacaccaacaacacatggagtcaattttcattccccgagatcttagcaccgtattcactggaatccagccattacaaacctgccatatgaagttccgaactttaggaggaacctccattttccaaatctcattccaccaagtccttgtgattttatctgaagatgcgccagcttcaaattcattagagacagccactttgtatccactactaacc

SEQ ID NO: 109898 - DNA, 1019 bp, Cannabis sativa
catgtgaaaattgttatgaaaactgtttcttttttaaacaagtagcatttagtactttctgatatttagaatattaagttttaaaataaaaataaatatagtgcatctaaaccctccacgtgtctatatttatgacttaacggaagtggtagtaacggtgtaagagaattgtaacattaggtatttttacctccaaaaataaacattaagtatttaagtgtataaaatccaaaacaataggtatttatgtcgcaatttacctttttctaaaaatatacatttttattattattttatttttataatttttaaatatttttttttataaaattttaataattaatattacgtggacactaaaaaattgtcatgtgtgtacttgtgtagatttgagcagtttactgcatttacttaactgaaatttttagacagaaatataaataccaaaccaaaatagaaatttagtaggttttgttattaaaaaatgaatttatatagttaagtactgttacaattgttttgctgcttacaatacctttggctagtttttcttagaaattttgttagttttttagttattttgagttgtgatatgggttgtgttcttttctgagtttgtataccaatttttattttgaaattgtcattctaatataactacagtttttggtttggtgttgtgatattttttcagtttctcttctctgacaacaactattaagaatgggaaagtatttttcaatgtgatggggtgctgattgaagattttatagatttattgtctaaactttcagggacagttttgtcccttgtggcttgcgataaaaattctacatctcatggtttgacaaaatatgcctttcggttagacaatgaactatcttggttcgatgaggttccactgccgattgtggtgtgctgcattgtttatcatgtgtgactctgtttcaaaaaaaaaaaaacaaaaattgttttgctgctaatatgcaaaagttaaaaaaagctatcttgctttaaat

SEQ ID NO: 109899 - DNA, 716 bp, Cannabis sativa
  modified_base (142)..(142): a, c, t, g, unknown or other
ataacttacaatatagaaaacaatgttcaaacagtctattttacacgcgtgtaaaataaaatagtcacgcgtataacatactgtttgaacgtagttttgggcatgttaaattttttcgatttttttaaaattttgcaggatntcttaaataactataacgtatatgcccatgagaaaaaatttgactaaagaattatttcggatgctaaaacagataaaagtgcatcaatatatttattttaagggggtgcattgtagaattttcctatattatattttgaaaaagtatttttatttcataaagtgcacatgaacactcttaaaaaaagaaaaaaaaaaaaaaggagaagagaagctaatttaagaattattatacatatttttttaaaaaaattattatttagttttccgattattatttttggtgttttccccattattatttctggtgtaagctcattagtaataaattaaaatattacgaaggattaatattataattaaactttttaaaaaaattgacttgagttaaaaaaaaagttatatatgtgaatcaatatttaatttacacaagtacacatttagatttttaatccgtacaagtgtatatatcaacactttacgattaaattaaattatatctttatatattaaaaatgtctattaacggtattttttagtttaacagaatatactttaaaaataaaagaatattc

SEQ ID NO: 109900 - DNA, 778 bp, Cannabis sativa
tcaattctgaccatatcctcatgtaaccaggcaaaaacgtccaggtttgctcttagaaattttatcaatgctgattttacttcgagcaacaaaccttttccaagttttagctttctggccagaatatcaagaccgatctcgatctcttctagttcttccacaggtccaacattgctgcttaggtccctaagtcgaggatccacatcttcatccccgccttgggaagtttcccactcaaaaatgttttttcccttgtccgtgctctggttggaggatacttccttcttagccttggccacaacaaggttataacattcccgagcaatttgctggtttcctcttaaacaccctaccccattctttgttggaaacttcaggcatgaatggaatatcgacgtaacaacctttaagtcatacaaggctggtcggcctatcatgacgttaaaggctgatggaacgtccaataccagaaattgtgccattatagttatgctcatcgaagcttgcccaagagtgaggggtaggtgaatttgacctagaggtgcgactccttggccggagaaaccatatacaggcagaagacagggggttagatttttgagctggagccccatcttttcatatgtggtcttgaataagatgttggaagaagctccattatcaatcatagctctggccaccatcttgttggctatctggacctccacgaccaacggatcgttgtgcggaaatctgatttcgacagcatctttgtcgttgaatgttatggtgggctctc

SEQ ID NO: 109901 - DNA, 1321 bp, Cannabis sativa
  modified_base (166)..(178): a, c, t, g, unknown or other
  modified_base (263)..(265): a, c, t, g, unknown or other
  modified_base (779)..(779): a, c, t, g, unknown or other
taataataatacaacgtaatataacagtcaaaattgataaaaaaaaatgacttgataaaaaaaaaaccctaaaattattcattgatgaataaaagaaaagacaattttccagcaaaaaaataaaataaaataaaataaaaaaaaaaaaagaacacactagtttaannnnnnnnnnnnnaaaaaaattagagcaacagtaatattagtacaaaaattgtgaagatttatataagagttatcttaaaaaataataataatttaannnaaaaattaataaatcttttaattattaatattattcaattttttaaaataaatatataattaaatattattataatatgtataataataaccacatgatctaaaatcaatgataaaaaatacttccctaccggtaaaaagtttatgctaagtcctaccataattttatcccatatatattatacacatatataaggcaataataataaatttgaacaagttctattagtacaccaaaatgagatgattattaattattaattgtgaggcacatgatccataatacactagaaccaacctccaaatatcaatcctggctcagccttagtttataagatttcaaagcacggaggacagatttatattgacttttatatttcatggctcacaaggcaaattaaggatttattgcaattaggcagagcatttttcttttctctcttaaacacgatatgggaggacttagcttatttgtgagaatatatgaaatttaaaatataatatatatatatatntatatatatatatatatcatgattcatgaaatgagaattttctggcaaaaagtttgggaaatagctgacttggtctagaagacaaaaatgaattcattaaacaaaacaaaaatattaagtatggactatttcttttcttttttatcatagcatatgaagatacaacttgtaaacgaatccgcgcgcggtgttacacggtactaaaatataaaggttaattagcatttttttctccataattttgacatgtactaaatcatgttcctgaacttttaaagtagttaaaaataccccaggaactattgagattgttcaatttaaggacttttgtccaattttagtaagaaaattctaacatggatgaaagttcaggaggcatgatttagtacatgtttagattcgaggtgttatattttataatataataagtgcagattaaaatgtagtaatatatattattatgtgaataatatatattaagtgtttggtaaataaattgtgtaatatataatttattaaacctaaagttgtaacctacactt

SEQ ID NO: 109902 - DNA, 507 bp, Cannabis sativa
ggtggtgacttgtatacgtacttgggagatggtggtggtggggatttgtagacgtaagctggaactggtggtggtggagacttgtagacatacttgggagatggtggtggtggtgacttgtaaacgtagaccggagtaggtggtggtggtgacttgtacacatacttaggagatggtggtggtggtgacttgtagacgtagactggagtaggtggcggtggtgacttgtagatgtacttgggggatggtggtggtggtgacttgtagacgtaagctgggactggtggtggtggggatttgtatatgtatttaggagaaggtggtggtggtgacttgtacacatatgctggggtagcaggtggaggtggagacttgtaaacgtacttgggagatggtgggggtggggagctatatacatacttaggagatggtggtggtggagacttgtacacgtatgttggggtagcaggtggaggtggagagttgtatacatacttgggagatggt

SEQ ID NO: 109903 - DNA, 900 bp, Cannabis sativa
  modified_base (487)..(490): a, c, t, g, unknown or other
aggcccatgttcccaacattgttgctttctatatatctgatgacatgacttgggatatacctcgcctaaaccactcactccccccatatggttgctgatgtcctttctatccctctccctcttcaccctatggaggacaaacccatatggaagtttacgaagtcaggaacctactctatcaaaattggatatctattaaggttctcccaccactcaccaccagatatcccttcctcgtcttccctttccccctgatggaaattcttttggcatcttggtaccccgtctaattgaagcacttcacctatagagcctcctcatcaactctccccactaaacaataacttttcattagaaagattacccactcccctgtttgtgagctttgtactagaggaggaatctaatcctcatgccttgttcttttgcaagcgaataaggagagtttagaaagctagtatcttcttgttgggctttgtgccctaannnnaactctatttcaatgtaatcttttctattcaattatcaataaagaaacatatttatttttattacttatttagtgtgttatttggttcatgtgatcatttatttgtttatttaatttataaattcatctaaattcttatcacattgatattctcgtttattgtgttgtcaacacagtcaaaagtaatcaaaattatgtgattaaatgtattcctatgatttatcagtacatagggtttaactgataggataatctacaatgaagtttacttgcaccttggataagtaatatgtcatttcactgacattggttaaagtaagctttggttagatgtgagtatcagagtatgcatcgaaagggaccgatattgaacttgaatcagatacaataaacttactgtaatatctatt

SEQ ID NO: 109904 - DNA, 970 bp, Cannabis sativa
gtttgaacgggaggtacatcagcattttggccggaggaagaagcagtcgcatcaggctcaccgtaagccacttgggaagaacaaaactcgagatacatgcatttggcttcacccaagtaatcaaagtttgcctgagggttagccttccaaaagtcataaaagagctcaaggtcggctgtctctaaggcattgaccttttctcccagcttctccacctcgcctgtaagctcctcctccttagaattcttctcctcttccacctgacggaggacagctcaaagagacgtcctttcatcctgaaggctattcacctctgcagataaggtttcgatggtctccttaagtcggtcagaagcctcgagattcttagtcaactcagttattttcttctgagcaataaaaagcttcttgttgacttcaccgaataccatccgaacagctctaagttccaccctagcgccattagcgtccttcttggccaagtccacctccgccctcatggtgttggacagagccgcgttcttggaagcagcagacttagcctgggagtatgtgtaagccaacttcagaccagcctgtgcagagaaaaaactttataatctgagctaaataaagacgattaaaggaaactgtcaagaaaagcttaccctggtgaattccttcaagactcctcccatcagcaactccaaagaagagtcgttatcagcaccggccagtttctcactaaccttaggaaccaaccggttcatgtagtgggcaagcatctccttgcctttcttggcctctagaagcactggcaaaggaggagtaggagcctgaatcacctcggatccacctttggattgctcaggcctgtccgaacttcctcctcgagaatctttggacttagcagcttttagagtagaggggtttgtaatagttagttcctcggaaaggtcgataacctccccggcaggcgccttttccttgg

SEQ ID NO: 109905 - DNA, 863 bp, Cannabis sativa
tgcgaaacatgagtcctgataagagtctggggattgatggtatctccgcgatgttctaccaacaaaactgggatttagtggggaatttagttgctgaagcagtgttgggagttctaaatgatggggctgaccctaccaaactcaaccgcaccatcataactttgattccaaagattaaaaatcctcagactatgaaagactaccgtcccatcagcctttgcaatgttatctctaagctcatcaccaaggttttggttagtcgatttaaggttgtcctcccatctgtcatttcagagacacaaagcgcttttttgccgaatcgtctaatcacggataacatcctcatggcctttgaactcgttcatgctattaagaatcgaacttctggtaggaaaggaattgtttccctcaagttggacatgagcaaggccttcgatcgagttgaatggtgcttcattgaagaggttatgaggaaaatgggctttgctgaacaatggatccgccttatcatgacatgtctctcaaccaacaccttttctttcactattaatggagagatctcgggttcattaacaccaactaggggcttgcgtcaaggttgtcccttgtctccatacttatttctgatatgttcggagggcctctctagaatgctccaacatgaagaacttgcgggacggttgacgggtttcaagctcacaaggaatgcttcaccaatctcacacttgtttttcgctgacgacagtttgcttttctgtcatgccaatgaaagctcttgcctagccattaaaagagtattggatatttatcatcgggcttcgtggcaacttctcaattatgataaatcagtgatgtctttctct

SEQ ID NO: 109906 - DNA, 614 bp, Cannabis sativa
  modified_base (535)..(535): a, c, t, g, unknown or other
tttaatatttacttaattattttttggaatattttacacattttgatataaatttaaaatgtcttttttaatttatttcaaataacaaatcgaattatgtcggcattattaatcccacaaataaaaatattttatacaacatcatgtatgaagaaataaaaaaaattaaatttgtgacataaaagtaaagattaatcaatttatttatactatatagtacaacacattgtgattgaaattgttaatattcatcatcaaactttctttacaaattattagaaatagaaaaaaaaaattgtataaaatatcacttaatttattttatacttttctttatataaatatatatatatatggatatatatatatttaagagaattttattaattatatattatatatcctcaatcttaaacctcaaatggtaagttatttaatgtttatattcaatcattaatattctgttagagtttttattagaagaaaaaataatgttaaaaaaataattaaatcaaaaatatatatatagagaganagagagagagagagagtgagtgagcgagaatatgagaacatccattaatatattaatattaggagcttaactgatttaa

SEQ ID NO: 109907 - DNA, 623 bp, Cannabis sativa
acatccacttagcccaagagaccacacctcttaatcttttatgtacaagttgttcacccattttacccaaagtacatctttctttgtagtaatagcccatagatacgttgccaaagccgctttattccattttggaccttctcaaaatcctaaacctcctagttctctcggcagacatactaagttccaaaggccatatgaaggctgctccgattatcctattcccgcccaaaggaagttgttacacattcggtcgatctctttggctattttttaaggtgattgaaatatgctcatccaataacatctgattccaattataagacactgcttattggaagagctctacctacaaaggataggtgtcggcttgcccaagaatgcaatttcagctttagtttctttaagatgatatcacaattgtcatacttccacttggttggcctcagagaaatacccaaatattttaaaggaaatgtaccaatcttgaaagaaatctcctgctgaatgagagttaccatatcatctggtatacctgcaaagtagatgttagacttctcaatattagctttgaggctcgaacatgagctgaaatgagtgtgagcctccaaaatatatttgac

SEQ ID NO: 109908 - DNA, 524 bp, Cannabis sativa
  modified_base (473)..(499): a, c, t, g, unknown or other
tggtaaaataatttccaacatctgtgcccctatgaagccaacacagaaagacaagtgatccattcctagggatcacccagaaaaacactataaataccccacaaacatactaaaggaggggtcgaggattctgggttcaaaggaatcaaagagagaaaataggagagaaatccaccaaaaacattctctgtaataaatactcttattaataacacagactcgtggactaaggctcgtgaatgcctcaaccacgtaaaaatctcatgcattaaacttgttacagcttttcttatatattatttaactggtttccgaaaacctcggtcaccattttgttgctttcattgagagctgaaggaagcgtcttcaaacagacaacaatcttacaaattgaagcaaaaattgtggaaactcgccacacacgtcagtattggaatttattttaccaggatgttagatctactcacaagtannnnnnnnnnnnnnnnnnnnnnnnnnnttctaaaacgataaaataaacacgt

SEQ ID NO: 109909 - DNA, 608 bp, Cannabis sativa
  modified_base (164)..(166): a, c, t, g, unknown or other
tctgtctcttttgttaaacgatctattaatatagtggctcacgactttacaaagattgctattttatttcctggtggttatttcagtttggaggatgttctaaccactactacaatataggcctttaacttcccttttttcaacccattttataaaaagggaannnaaagggtgtgaaaatacccgcttaatttgaaattgacatttagaggcagttttttgataaaacccgtaggtatagaaattaataaaaccaatgccctcagttgggggttgaaaatcctccagctgtatatataatacatatggcatcagtaattatggaaataaccgatgccatagatgcacggtttattggaggggcacgtgtcaataaaccgtgcatctatggcgtcaattatttcctaataaccgacgtcatatgtattatatatacgagcagcaaggcttcatcttccccacttcgcctccttcttcagcaagaacaatccaaaaaaaaatcatccgaaaccctcgccaaccaccatgaaaaaccccctatctccctcatttcttcactatttcatcccatttttgttttaaaattttttatttttaatatctaatcc

SEQ ID NO: 109910 - DNA, 1127 bp, Cannabis sativa
atttgtaacttgtttattttctctcaacatctggtaagtatggtttatatttgagatattaattaattatcatctttaaaagcataacatagttatttgtcaattttatgaaacttggaaagatgtttgcattagaataacttgatttttgtataaaatattttagtttcttgttttttttttcgaaaaaaatgatatttaaaaaaaaaaaggagtcgtgtgacttgtcttataggctaagaaaaattggtcatttgtttttcttttggtaagtatcaacatatgctttatttagtaaatttttgatgagttttctcttcaaatttgatttcttattctttgtattttgtttaattgttgatcatgattgtttttcagatcttaatttttggaaaatcttgatttccttttgtctttggcctttatagataaacaaaaagggagagtatttggattttaattttgattgtatactcaactgtccagggagagttgagctttatgtttgtgttcatctttggtcaaagttagatttttattttagtttaatgttgtgcttctcagggggagtttttatgtttgtttcgctaactttgttttgtaggtgtttgttaattaaaaatattttgattatccaaagtgccaaagctggagattgttaggtcctttttgaaaatttagttgtcaaaatattttttttaattaatgtgtatttttattgagcatttaaattgtttttattacattgattttgtgcatttaattactcttttcttcttaatgaaatattccttctcagctggtctcttttcagtttagaaaaattcttgtaagacaaagaattctcttatggaaaattgtctaattttgggaaacttgacttcccccttttctaatggatgattttagttttgcctttattagaacaaatcaaataaactttatttggcatgtttgaagtccaaattcgtgatcttgattcaatttggaaagtttcctttctggtcttgatctactgctgcaaaacacgattttgatactacaagtgaggaattttttaagaaacttttgtacagctggaaaatcgtttttgtggctgtctctagggttactatgttctataaata

SEQ ID NO: 109911 - DNA, 525 bp, Cannabis sativa
  modified_base (27)..(28): a, c, t, g, unknown or other
  modified_base (92)..(93): a, c, t, g, unknown or other
tagactaaggctcattaacgccccaannacgtaaaaatctctctcttaatttcttatagctctctaaactattattattttattggttgccnnaaacctcggtcaacagatagtattgcactatcggattgaagtaattgctatggatcgaattgaggtaattgctatggatcaattaggtacgcatacctaattattatatattattgatgtgttctatgttatacacaaattgatcttgggtttattattaatttttctaacataattttaaatatttattacgtggactaattaaattgtgccacgtgtacattgtgtacacgtagacattccaacgtgtcacttaacactcaaaaatagacggaaaaggctaactgctaacaaaagctgagtttaggaggttttaccacaaaaattttagaattgggggttagttgtaaatacctgaccacttaaggaggttatgccgcaaataactcgatttataattagttccaactttttcacttttagtcacaaatt

SEQ ID NO: 109912 - DNA, 507 bp, Cannabis sativa
  modified_base (230)..(236): a, c, t, g, unknown or other
tccatctaaccctaatttaagtgtttagctacacatgttcattgaagcacaattacacatattaacttaaagaaaagagatgaaaatagaaaagagaagagaagaagaatgatcaaaaccctaagcagtatgtctccaatattgctgttgatctctccactctgtatctgaattctctcttttttctctttgaaattgcttgatcaaatcaactctattttgctctttannnnnnnattcagggcctaaaaagatgggaaaaccgctcaagtttaaattccatttggatttaaattttgggaaacctcatgccagatattcttttctgttgacaaagaggagggccgcgacatgctaaacccatgccgtggccagtgtggccaaatgagggactccgtcgattttcttcatgtaggcgggtcgtggcatgctaataccatgtcgcggcccctgtgatcctctgctccaaatttcgcatgtttatatcctttctgaatctgaatttga

SEQ ID NO: 109913 - DNA, 549 bp, Cannabis sativa
ttgcttgtggttgttgcctgaatgtttgccactcgaattgctagaatattggggaagcttggcggacgttccagtagaaggagccttcgttttgttcttcttttgctcaccttctgctcgctaaatggcttcttcgagcttgatgaaaccttcgaccccgtcaaggaaatcactcattgagtcgaccggtccgtttttccttatgtccttccacagttcgccaaggacttcaattccccccaatatcgcatataactttccgtcctcggttacccgtgataccttggtcgctttcgtcatgaatttgctgatgtatgcccggagtggctagcctggtcgttgttttacttcgaccaaatctcccagatgcaatgggagttggcgtgaggaagagaattgtgcatggaaatccgaaaagaaggttttccatgaactaaacttcccaggagcccaattgaaataccattactgtgcggcttccgacagagtagcggggaagattctgcagcatacatcccctcgtaccccttgtaaatccatttgcatctc

SEQ ID NO: 109914 - DNA, 920 bp, Cannabis sativa
taaacgaaggaatcatggctgaacttgccatactccgaaaggacattgcccgagtctcccggagacaaaaaggtgataacactgactctgactttgaagaccgggagccttgtgccaggcacatcttggaagctgaactccccaaaaatttcaagatgcccgtaatggcagtttataccgggaactcggaccctagcgatcacctatcacggttcagccgagtcatgacaatcatgagagtcagcaacaatgccaagtgtttgtgcctcccgcttactttaagcgggtccgcggaagagttgttcaagaaactggagccaagatccgtggattgctggaataagctgcaaactagcttccagagacagtttgtcgccacaaggaaagttaatctggaggtcagcgccttgactaacatcaagcagctgcctacggagacattgaagaatttcataaagaggttcaaggaagaagcctcaaaaaccaagaaagtcgatgacggacaacaacttgctcttcttcaagcaggcatccgtacagggactccgttcaggaacgagttatagcaagaaggagcctccaaccttcaagacttccagaagagagtccaaaaatacatcaacctagaagaggcccagatagtggcctatgggggatactatcctaccgggatagcgggatatgtacccggagctcagctcccaggaaccttaccaacagctgccccaccgatgagcagcatacaattttccgctactcccggatatagtcagggctaggccttggcccctgcatcttctcactttggaaatccctcaggcatgagtggacaagccgcgtcgcactccgctccggcagcaagcttagcaggcccctctcaaggctctcagagcaagaggtcctcaaaaggaagcaaccgg

SEQ ID NO: 109915 - DNA, 833 bp, Cannabis sativa
acaaattcatttcttttcggtcttcctcttttcgaacaaacacctaaggtctctcattgaactcactgatgtttttcactggacaaccctgcaagtcaccccaaagctcacctccagcagttgagagatgagtcgtgattccaacttgaagagcagtaagctggacactgctgttcaaatttctaaccctcgcagcagctgtactgaaataacttaagtaggccttaagcgtctcgtctggctgctgcgtaagggaagacggttcgggtcgcctgtctcttgctgcctggaaatgtttcttaaagtctttagacaactgttcccaagaagtgattgaatgatggttgaattcattgaaccatctgcttgctgccccgactagcgaggtagagaataaaatatagcgtaagttattcgtaacattactggctcacattattgtgttaaaattcttgaggtgagagatcagatccataatcccatcatattatgagatgtgggggtttttaaatcactgagagaattcagcgctcataatgtctaggtagaaaggctcaggctccttgtccgagtcataactaggcagtttcccatattccccatcttaatacctcctgaatttgtcttccaactcaatgattttaaattggataggatcctctcgcttttgattgagttgttaacgtaagttaggttttttcttgttcaattgctcaagcagatccgaccgttgtcgatcatagttacttacagacctcgtccttgtgtaactttcagttctagttgtgcccgtactctctcgatcagtactgcgacgagttctatcccctcct

SEQ ID NO: 109916 - DNA, 1315 bp, Cannabis sativa
atctcgtagggagacatccctatagtactctgataactgttgttgtatgaaaactctatcagtggtagatacttactttaggagccttcaaaatccaacacaaaggcacgtcacatatcttccagtatctgtattgtccttttggactgtccatcagtttgaggatagaaagttgtactgaacttcagtttggtacccatggcccgttggagactctgccaaaattttgaggtgaactttggatctctgtctaatataatggacttcagagccccatgtaacctcactatttctttcacgtataactctgtgtactaatccactgtaaaggttgttttcaccagtagaaaatgtgcagattttgtaaatcgatctaccacaacctaaatagaatcgtatattcccgtggttctaggtaacccaaccacgaaaatacaaggtgacatcctcccacttccactcaggaagtgttagtgggtgcaataatcttgaaggtctcttatgttcagtcttaatctgctaagaagttaaacaccaagatacaaattctaccacatatctttcttcatcctgcacacctagtagaagggtcttaaatcttgatacatcttggtagtgccaagatgcagtgagtatggagtggtatgagcttctttgaacacaaactctggttttatacaatagcatccccattacttgataccgtaaaatatttattttgaccagctaaaaccccttcccagatctttaccagttctggatcagttaactgagcagcttttattctgtctaaaaaaccagattgcaatgtcaaattatgaagtttgcctacgacaaactcaatgcctactttgaccgtatcatctgctagctgaggggaaatcttaatcatactagttacctgtccaagatcctttctgctcagagctgccaccatattggcttttccaggatggtaaaggatttcacagccataatccttaatcaactccaaccaatgtctttgtctcatattcaaatgtttttgggtaaagaaatatttgaggctcttatggtcggtaaaaatctcaacacttctctccgtataggtaatgctacaaaatttttaaagcaaaaactactgcggcaagttctaaaccgtgagttaggtattgatgttcatattcctttatctgatgggagtcataagtgatgaactgattgggttgcatcaaaactcaccccaaaccctgtctggatgcatcatagtaaaccacaaacttttctttatcagatggtagggctaataccagagctgtgatcaatctttgtttca

SEQ ID NO: 109917 - DNA, 665 bp, Cannabis sativa
ttaaagtttaacatagtattatatgaaaatatgatatataatacaatacaatataatacgacctaatacagcgtaccaaacgagcccataatataataatctaaaatacaactcacttttatctcacttcacccctggaatggatatgtgaaagatgtcagaattggcccacaggctgctgcactcccaatcaatgcaaatcctttcttagtagcaactactattttagacaattttgatacagttggaagagaagacatatcatgacaggaccagccctgtcatgttgaaggggatcatcgaaggtcatctatatgtctagttttcctattcttttgagaggatttgagaggagaaaggcctccattaatctcttccagtgaaactgctgcactatgtgaaatgacaccagcaatagtatgcaaccttgcagcatcttcatccaaaaaaacatcctgcagtccagtttatctcctgaatctttcaacatcctctctgtcaatgtaatagtttctgggttgttaacaaatactcttgatgagtaaaaaaaaaaatagaaaagattctgtaaataaataaaataataacagtaaaagaagcaaaatagtagatagatgtgtataaaacgaaaaaaaatatatatatatatgaatagtagccgcaca

SEQ ID NO: 109918 - DNA, 1053 bp, Cannabis sativa
  modified_base (359)..(361): a, c, t, g, unknown or other
  modified_base (467)..(467): a, c, t, g, unknown or other
aaaaccagaaaaacttggaagaaactgaaattaaacatttgatttcggttttaatccttcaaaataactccttctaaaatcgaaaatctagattcatgcaatgtagatctgtattaaacaaatctagagctccccctcgaatccaaaataaggtatgatatgaaatttttttaaaaaactaaatctacgtgatatacagttgcattctggttgatttctagtttacaatgggcaattcagctttttaaaacacaataacaagatctaattctaattaaggaacgacgtgttacctataagtctattttttattttttggcgttgccttacagttgcattatcgttttataatagtttannnattatggaggaatttcagttgacgggtaccaacaaatagcagttatgcaaggtaagatttatgtaaatagttgcaaattagttttataatagttgaaaattgatcngattcaaataaaactgatgaaaaatcacaaggataacaactatgttaatttgagttaagtatcatagtttttcaagttgatttacagttgcatcatcatttcataatagtttaattcatttttttgcaggaatttattttggacataagaaaaagagaaaacacttggacaaatggttaattgctgaaataaatttaaacgtttcttaatagtttcattttagttttattatagtttaataacagcaataaaacaaaaaatgacaaaaacatggttcagaactggaaatacaagacttgaacaaaggaaaggaaatagaagtaagtatctattctatttcataaatataattttttttattatataacaattagagtaaaaaatgttagtctacaatactaacattatcaataacaaaatcaaaacaatttcaaaatcattgccttgcactaataacaatttcaaaatcacaggaaaaaaaagacattccactcctaatcttctgccatggacaatttgatgattgaatgaattatgaaaattatgaagctattggacatttcatttcagttaattgtaagtatga

SEQ ID NO: 109919 - DNA, 640 bp, Cannabis sativa
  modified_base (43)..(45): a, c, t, g, unknown or other
tctgctcgcctaccgctgggcccatgagtggaactcgtgaccnnngattgggcggctgaccatttgcagcctgggaagtgttcatcgttggatcctcgtacgtttctcccaggggaatgatatccgacggcttgccgactacgatcttcaatctctgcatggtgagcccttaatgcttccatctctttatctctccattcggcgaacatacgcctttgttcgtcgaacgtgagatttacagcagcacacagttcctcctgattttgatgcagggtgttgttatgaccctgcatgagtccgagcgcatcacgaagattttgtaattcaatggcatctccgatagtcgtctgggcgttggatccaggcgaaacagtcatattatgaatgccctggtagtgtgcagaactgttattcccagtctcttgcacacgaggcgcaattccatctataggaattgtttcaccaatccccacgcttgccggctgttcatgattaacagcaggcgaaacccttgtgctccctgggttctgcgatgtaggctccagcgtctctgaattttctggatcagtctagcctctacgagttggcaccatcgtcttggcggttggatgatgaataaagaacgattctgttggaaatt

SEQ ID NO: 109920 - DNA, 1534 bp, Cannabis sativa
tttttcgtcatcagaaataataaagattcgagcaaactcagggagaaaaccacaaacttgagcccttggaagtggagcccagcgcccaagttgacctagtgttgcgcctagtgcccaggttgacaatcaacctggggtgctaccttcgattgctcaaatgtcaaatctaattcgaccaatgaatctggaatgataaaaaatggggtaggagacctcatcctcaagttcaagaaccttaggtgtatcaaaacgagatcacgggagctcagggaacgagtacccaatgcctaggttgacaaacggcctgatgcactaattttctgcttatccaattctaatttcgttttgaccgtccatctagtttttcacaataactaagatccatgaagtcagagaagtcaaattcacaatttcgcatttctcatttctcatttctgacatgggaaactcgctcggaaataaagagtttcgagtctctcatttttgcagaacagcaacatcttcgagaagtcgtgaccaacttcaccagagcacataaacaaggtaaatgatgtcaaaatatcacttaggcatcttaaagtacatctcttggacatttttacacttacccagcttccaagttgacgttatatgttaacctgggctctgggaagtcaacaaaggtgctggatgttaacctgggcgatgggttatgaactaccttcaataaaacattcataactcactcaatattgattcgattgacgcaattcaacttgagttcaaagataattcaatgctctatcaagtcatgtctcactttaatcaaaattttgaagttatcatcgtcaaatttcatcccaaaggacttacaaaaataagctccaagttcccagcagtaggacccgttggcctccgaaaaatggccatcgccaccaagagctaatttttatcattagatcatcatctacggtcaaaaacatcaaattttaatttttctcctatttttgtgggcctccttcacctacaaaaggagcttgcttagctcattttttaagtttagaaaactacccacaatgtcagagcttctctctttagaaattaggggttttgatacttagcatttttctgtaataccatctcgtgaaaaataaaaactcaaagtagatgtagctccattattgtcgcgatatagggagtaaactactataaattgatgtgtctctcttataattacttaactactttattattatcgcaatctagcaagcgggtgtggcttagaagtttagtgcagaaatctaagtcaacaccttctccctcatgcagcgtccaaacacaaaccggagtcaccatctctggtcccccgctcacctcaagtggacctcgggtcccttttcacgaaactcagaaccccgaaaatccccaaccccaaagcccaacctccctcgctttccctttctcttctcgaccctttcgttataacagcgtcaccaccaccatcagctcaagcgaaagccaaacctaggaacctaaggtctctctctctctctct

SEQ ID NO: 109921 - DNA, 1821 bp, Cannabis sativa
atatcataccttaactccggagggaacggggcttcatcacacgccttcatgtagtccatgcaccctttgttgtagctgtgccccattcggccacaaaagaaacatatgtcggggagattctcgtatttcaactcaagccagacaactttattaataccagtgaaatggacgggaactccgcgaggaagtggctgagcaacatcaaacatgaccctaattctaaagtagtgtccccaagtttcccggaaagaaggccggtagatttccaatatgtgaccgagggatgacgagacaagaactgccaactcttcagagcgtttaagaaagggagtgttgaacacttgaacccagaggggtattttgagcaagctatctccattaaggacatccaaggaatttggaatatccattaggatagcttggttaaggtaggtccaaggttgttgtagcaaaccccggcgcctatctccatcacaaccaaactcaacaaggaagaggccgttagaccgatcggtgataaccacggggttccgagatatgttgttccaatctctagtcattttctccatgaaatttttgcggaaaaaaggatttaaccgtgtgaactttaacaacaaggtagagagggagagactgtatatcgaactcgagagtgtttgtggggttaggctcacggagagtttggatagtgcactcgatttctgtgagattaagagcaacagacagagagtttgttaactcatccatgatattgaccaagagaatgaagcagtagggaaagaacaatatgatacagtgggggtttgggatattagaacagttatagtgtgattattaatggaccacaaatatattatgctgacagaatagttataaaccaaaagaagaagtaaataatgacttatttgaaggttataactaggaaatctaggaacatagcaattatgggtcggagataagatgatagtgaaatgatgatgactaaaaacttgcaacaaagaatgagggatgaagcgatgggttagtgacaaagtgttatgcagagtgaagaatatgcagtaccaaaccagggaacacgtgatattgatataaagcaaaggttgaactctaatatgaatatgcagaaatgtgactaagtatgtgtgaagagagattagccagggaggggaatacgtgcggttatgggttatattatatatatcgtataaaatatgggagagatgaggataatgatactgagtgcaaggtctatgaacgactaaaatgcagatgaggaaacaaaggaatagcatgcccttatatacaaaaaatccgttgtggctgatgcaaacaaatttggtaactatcacatctgtgctattaatgtttaaacagagatgctgcatataagacttacttctagtaccaggcagaacacacatacagacgggcattaatgagattttgaatttacttgagcaaaaggaattatggctttactgagaagagattttataaagaaattttcagtaactaaaatccccttcagattagaaatgtcaaagggtagtttaatggctataccaaattggtatcgaaattgctcaattgagaagccaaatctctgattcgatttgacagtgaacaagagaatagggaagaaacattcaatacctgtaagagattgtttaatgcaggtacggatcaacgcttggggaggctggccggagttattgttgattcgactggggtggttgggctggatctgtctgcagcggctggatcggcttggacgagtcgagctgccttgggtttcaattgaggaagagtcggagccacctt

SEQ ID NO: 109922 - DNA, 1011 bp, Cannabis sativa
  modified_base (790)..(797): a, c, t, g, unknown or other
ctaaaatctcttcaatctcagaagtgatcgagagcaatcgcaggaacaacttaccaaaactaaaggttagtttcgaattccattgcattttcaatttctgtttgaaatgcaaagttgttgttttttctggatcttggtattttgagggattttaaaaatgcatgcttgtaggaaatacacatagggttatgttttttcagtatagaactgggtaatctcagaaaaattgacctgaaatttgcataaccgtgaactttaggaagaatgtttgaataatcgcatccttatcttttgaatacacgtgggtatttggatgaacactttgaatactcacatgtttgcttatcctaagtttcacagagactttattacttctagtcgttgttttaaaccttaggattttatactatgtatattttattgcgagaacattggttaagtctttcaaatggtgggcgtgtcacagtattccaatgctcatatatgcgattatatgttccttgaagtactgtgaaacgcccagccatttgtggctgcgccagtgttccgatataagcatactctttggctgacagattttctcgaaacggtgggagtatcccaataacttcagggtcatgcttgggaacgcatgccccttgagtcactgggattctcccagccgttttttgagggacatcgccagctggagacgcgtgacatattcccaggttgtgattagttaggttcctcgaaacggtgggtgtctcccagtcactttagggtcatgctcgaaaacgcatgtcgcttnnnnnnnngggatacacccagccattttttgagatatccttctattcgcacacctgacttttcgcgccttggtgggatgattagttttcgcaagaattcaaatcatccccttaagaagatttcatattttatatgtgagtgaggtcacttattttgttttcgcacattcaccacgttgaaaagatcttctatctttcagatgagcaatctatcggatagcca

SEQ ID NO: 109923 - DNA, 819 bp, Cannabis sativa
  modified_base (776)..(776): a, c, t, g, unknown or other
tttactgaagctccattatctactaaagcacgtttaattttcaggccattgatcttcgcctcgacatataacggtcgattgtgaaggaaagaaaacgtttgtatgtcagcattggtgaaaacaattgttccttcagattttttagcaatattatgcattgggcgccccaccatataacaagaagggccgtgttattaggaaattttaagcaaaacttctgtagcctcagttcttgcatctttcccaaattctaagcaatcaagaaagttacgaaacaatttagtttttaacaacgaatctaccatgctgtctggttttggtggttcttctataatttcctcgatatgtatgccctgtgatatccctattgaaatgaggggaaactcttctgtgcacgtcatagcagctcctccgttttgatgttggggaaacaacatttgttccacttcatcttgatccaagataatttccccttttgctaatcgctcatgaaaaattttcctcagagtgtagcatcccatggttgggtggttaatctttcggtggaagtgacagtagagttcatgctgcttttcctctaaagtaggtagttttgtgacaaatggtagtattacctctctatccctgatccatgcctccaataggctacagattctttctttgttacaagggaatttcgccgatttatcatttcgtcgaccttttttatgaacttcaaatttttgtttttcttgtgccattgctatgtcaacaccacgttttgaacccttccatgnccgattttgatcgttttggttagacggcttggccagtcgacag

SEQ ID NO: 109924 - DNA, 888 bp, Cannabis sativa
aaaattaaaaaaaaaatattttggcatgtgatttcggaagtggaggttgactaaaagattgtaataggaggttgtaattagcattcctcaaattatatttagatttagtttttgaaaacacaccaaaccaatcaagtattttcatgtggacccccaccttttaagtttccaaaaacataaaattattttcaaatctcaaaccaatcaagccctaagtgttttaaggataaaatacattgaggggtagaacaattaatttgtccttactagatgtaaatcatctatagggatctttaattattgagttataacatggataattaatagcgtatctatatcttagaatatatagagcgttctctataattgaaagtacaattccaaaattatagtggcacaaggaattaataagttagagaatttactcgataaattctaggtctacttattggaagcttgattatattcctctcgtttctcttgaagaagaaagctctctaagaatttcgatagagtttttgtaagtagaattcttcaccccttgttcataaaaaatagaggtatttataggcacatatgtgggtaagggcataccctttgcccacctagggttttgtactctacacgttgcaagggctggtactacaacagaacgatctgaccattggttgataagaagctccccattgtgtggtgtatagctacagtgagggattttgggtgtactaggacacgtgttgcacaaaagtttctcctttgcaaaatacaactagactgttgggcgaaaggaatgtctagaggtgcatacgtgcactaccatgatctgacatgggggacaatcagatcttgtgtcagaaaaagtgggagtgggagtttgttgggttttgt

SEQ ID NO: 109925 - DNA, 893 bp, Cannabis sativa
  modified_base (689)..(708): a, c, t, g, unknown or other
attcatacacatatacacatactttatgctatttttaccttgtttccgaattcagatgtgccggtcaacttgagtggaacagcagctcaatgctttacaggcccctaaatcataatattcgtaaatctaatgagtgacacgctaaattattttttgaggacttaaaatcaaaactcaatttccctatcgatggataacataaaaaactagggtttcttaaacaccaaactccacccaaaaaattcaattcgaccccaaattgcacaagaattttcagaacacctatttacaccacaacaaatccaatccaagcaaaactcaataattaactcagaatctaaaaacaccattaaagagcaaagtttgagttcttaaactcaaagtttgagttcttaaactcaaaccttacccaaatatcataacattcaacaaatctaacttaaaagcagctcaaataatctcaacataacattggaatccaaaatcaaacaattcatacaaccacagaaccctaattctaaaattcatgcaataacttaactttgagctcaagaaagtaaggagaaagatgctaagggattataccttgaattgaaacactaaattccagctagaatcctctaaaatgaagttgaaaatccaaaatctctagtcgggttcttgatgatttgagagagagagagagagannnnnnnnnnnnnnnnnnnngagagagagagagagagaagtttcttttctaagtttttcatcttgccaaataatcaacctaagtttatctattattaaaactaaataaaaaaataagattactaatttagaataaatccacaagacaaatgaattctttggttaaaagatcacttcacttcgcacactccaaagacatacatgcc

SEQ ID NO: 109926 - DNA, 528 bp, Cannabis sativa
atattttgtttttaatagtttatattatcattgtttaggataattaggatttttgcttcgtaaactttgacatgtaccaaaccatgtcccttgaacattttagatcataaattttttttccaaactagtgagattgttggattcaaaaatttctgtaaaattttattcaattttactaaggcaatgtgttatattcaaaatttaactatgtaccaaaagctgacacatgccctacaaaaagaatatgaattagctcaaagaatatagtaattaaattgtattattaaatgtgtcaagaccgcttaattttaatagcagataattagggcttaattatgaaactagattattaattatgatttatgaatttatgaaaatttatgtgaattcagggtgtattatttatgttacatatgaagtttcatgtttttcttattttgtgtccggcaacattggaacgcggcgattagccaatagaattacattttagtatttttgtaatagcgggacgacttagttagatattgg

SEQ ID NO: 109927 - DNA, 524 bp, Cannabis sativa
  modified_base (338)..(339): a, c, t, g, unknown or other
taagaaatcggttatgaatgcacaagaatcttaccataaaagaaaaaaatattttgtcaactaatttgccaaaaaaaaagactttacagaaacaattaaaatcaaaacattgtaacaatcccttaacatgtaatatatgtcttgagctcacattctcactgtttggtttatctttttacctgcacacaaagtactcgtgagctaacacccagtaagaagagttatgtctcccacatgttgatcaaacatgaagtgtaacttgccctgccttttgttgttgtcacactcggtatctaataaggcaatcccttatcacaagttgtacccacccatgatannataacctacaagtaaacccatacaagcagccaaaacaaaatatcctgctagtgctatgctcacacaagcagtagaaaacatatcctaaaagtgttattctcacacaaacagttaaaagccttatcactatcacatgctaacaatactaacataaacaacaattcataatacaaaatctcataagc

SEQ ID NO: 109928 - DNA, 533 bp, Cannabis sativa
aaatccagagagttgaaacttaaagttgataatggcgaaatggtatcggttagagctagaggaaaagccaagctcaagtttcaggacaaaatttcagaattagataatgtcttatttattccaaatttcagaagaaacttgaattctgtttcatgctttcaattgcaacaatacaaattagattttttgagttctgggtctaccatttctcaaaatgacattcaaatttgtgttgcatctatggaacaagggttttatgttctaagaccagaagaaccatttgcgcttaataacgagctgtttaaagtagctaaacctagaaaccacaaaaagcaaaagatcgataatgatgaaacatacctatggaacttacgtcttggtcatataggctatgatagacttcacaagttaacaaaaggtggtccattgaaaaataacaccttaggtgaattaccagtttatgaatcttgcctagaaggcaaaatgacaaaacgttctttctctacaaagggagagcgtgccaaggaaccact

SEQ ID NO: 109929 - DNA, 5185 bp, Cannabis sativa
  modified_base (3846)..(3854): a, c, t, g, unknown or other
  modified_base (5134)..(5159): a, c, t, g, unknown or other
caattttaaacattgacttgaaaagagtaccaggacaaggtatagtttaccaggatcatggacatgcccagattgagtgtttctctgatgcagattggacaagctccaaggtagatagacgatctacttcaggctattgtgtatttgttgggggcaatatgatctcttggaagagtaagaaacaaaatgttgtgtctagatccagtgttgaatcagaatatagagctatggcacagtctgtgtgtgaggtaatatggatttatcaacttttgactgaattcgtgtttaagacttatattccagtaaaattgtggtgtgataatcaagctgcacttcatattgcctcaaatcccatgttccacgagcgaactaagcacattgagattgattgtcattttgttcgtgagaaaattcaacaaggcctgatctctacaagatatgtgaagaccggagaacaaataggagatatttttacaaaagctttgaatagggtgtgggttgattatctttgtaacaagcagggaatgatgaacatctatgctccagcttgaggagtattagaatattagatgtaaaaattaaggtaacttgtatttagtagttttccatttagtctcctaattttgtatataaatatatactattctatagaatacaacacaatttgattcaccattctctacatataacaatcacgtcgacatatcatattcaaacctacaatgtgcgaacaattagggatgaaatcgacacaattaaaggtgaagtcaactttgtatggaaagatggcctaccaaagaatcaatagccttaattcttcttgattccttagctgtcaaaataccatcatatccaaatctaaaatgtgcgacagttagggatgaaaatgacacaattaaaggtgaagtcgactttgtatgggaagatatgcagtaattttgggaggaagtgaagtcgattcttaattcttggccaaattatcgacaaacaaggagaaggaagtgagtaagccaagttcgtagaacccattgctgaacccaatcttcgtagtttaggtgccatgaaaaatggtgcacaatagaaataggcgacaggttccaggaaaatgatgcttgtcagaacagggactacaatgctctcggggaggtcgaaacatggtggactagggaaaatagcaacaacaaaacctaacttccgactccatttttgaccatcgacgtgccttctgactctgtcaattagagttatccatatttgacagcaccgacctcgatggttggttgctccaagtgagaaatactttgctttctaacagttcagtaatgacaaaatggcagaagggattgtcaccatcttcgagggaaaatccttgacgtgttagccgatcgttttatgggaggacttgagcttcttttattgaataagttcataaatactagcaagggatcacttcaggaacagtttcttgagttttgaaataacaaaacagtggaagagtatagtgagggatttttggaatttcgtgcttctttggatggttaaatagaaggctaatcatttgtttaaggcaaagaattaatttgtgatttttttagagtaaaaaattactctgggagaactccaagcttcttgaattgcttgagaacaaattgtaaattctttgagacattaacaaacagcctcaatttttaaccgtaaactttttgtcaatcaccttctctatttttcttgctaaactataattaaatgtcagaaataaccttacactaacttctttcactgcccttctcttaaaggcaaagacgctgcctctaacattctagtcaagatcttcatgataaacctatcttcttcccgcattacccctaccccctacggccctaccttctccataattattattaaattgcagattttgtacctccttggatccctttttctttgaaaccaagctattaccattggaacaatcaccaattatatcactgttaaggacttcaagtcccatatgaaaaagaggttctcaatagcatacccactatcatttgcatcgttattaagtctgaatatattttttgtaggaagtatacatagatgtattttaaaaagggaaaaacttatgaatgtgaagcgtcattcaaacctgaaattgctgtggaacaaatcgaaaattgagaaattggaaaggtatccaaagttgccaattagcaacaacggcagaaaaccactcctgcaacaaaaaaaaaaaaaatccacacaagcaaggaatagttagaaaacacaagtaaattgaatatataccactagaaaaaaaaagtacttatactgcttgagtataaaaagtcgtcggcaacacctgttgaagcttgggtacaacttgttcaggtcttccttctagtgtcaccaatgtagataagaaaacaccgataaatataggagaaaaaaggaactgcaagaaagatgcatcacattcaaaggccatattaatgattaaaatttattgtcatttgttgaccataccaatgtactttagaagataacctgatcaagtaaaagccgcaaaagtgctcctgatcctccttgcaaagtaaccgatttgctcagaaagaaatacctacatatatgtcaatagtaagtaatcaacagatcaaaaaaattgtaattaatcaaaatagagccaatatgataataatcaatgcactagaccaaatttaggttttggttttcgtcctatacatttggggttacataaattaccaaactatgtatgcattttttgtgtacataatgaactgaataattttttacagaaattacagaaagaaatatgtccagataacaattctcaatcaaccaagacatttgaactgtagattagcagcaaattttagggaaatgcagtagaaactggttacaactatacataaaattacaaatacaagacatgagtctggagcattaccagaaatgtaatgttggacctactaacacaagccccaataaagtaaacaagaacgtccttttcaggtccagtgatggaacttgatcaattgcaatctgattcaaacaatagggtactcgagaagtcatgtaatactcgtgcaaagtagagcaccaaaaccaggattccaagccaaattataaaacattacaagtgaaaaccaacaaacaacacctggaccataagttagagcatattctcctagccaaattataaaacattaatcaactgaggaaaaaagaaatcgtgcaaatttgttattacattacaagtgacgtttccaaaatcaacaaacaaaaccttgaccataagttatagatactctcatgtgcaataaaaatttgtctaccaaaatatctcatacatatacaacagtgtcaaggagtaaacttaacatcggtgtagacttgtagctatatttagatttttatatgattgcacttaagtcttccatgctcaaataaattaattattcaatctttacaggttctattttccaattttcctaataataattaggacaaaaagataattttttttaaattttgatttttatatgattgcactttagtcttccatgctccaagaaagtaattattaaatctttacaggttctatttccaattttcctaataataattaggacaaaaagataatttttttttaattttgtaaacctcctaggaatataaaatgaaaaagggactgacagtatactaagaggctctggttcttttgtggctgtatcatgttttgtacaagtgatattagtgtagattttccacacccttgtctactttgataatattaacagaaggtagcttacacacacacacacacacacnnnnnnnnntatatatatatattaaaacaaaaagactaatgtgaaattttcaagacaaaaaaacagtaacctatccaaatttgaaaagaatgacatgagaattttgattctagtgtatttaattccattttctaaagagcagtaacatagtatattcacacagtaatattgatagcaacggaaggaagagaaaaaaagtgcaccttgaaaaaccaaataatattattttctacactgcagaatttacctggcagatcaaatctccaacaaaagttaacaatgcagatgtcacagcttttgttgccacgggatattttgcaagaagacccaagtacctgtaatgatacaagttccaagttaaaaatgcagaatgaggatctaattttagtttttttaaatacaaaaattagcaacacattggcataaagaagaagcaactattaagaacacatttcataccaataccacaaattgtttagaagtcgactaaagtacaatgacatgaagaaccatttggcatttgatatgtctatttgaatgaaacagcagcatgaatgccaaagcaaggaattctataagtatctgctatacaattcactgataacactaaattaagagttattaaaaatgttgtgtcagcggaagtgccagctgagataggtgaaacactcaaactccaacaagaaaaacaaagataaaacatgacagaactttagaaaaagaagagtaagagtaagactaccatgaaagaaaagaccaattgttctcaccaccaccaccaccaccaccaccaccactaccttcacctccaccaccataatgcccatcaccagaaccgccatttccgccagctccatctaacccaccacctgaaaccgcagaaactcggaaaccatcgaaacccaatggccgcaaaccaatccagaagaaactaaaatcccttttgagagcgccaccattaatagattcgacaggcttcgtcacgtaggagtgacacaaggaacaacttttaaattcctttacctgatatgtgcttgccggaattcgagtcgcgtaagaagcaggcgagatgggtctaggagaaaagcccacaaaacgggatatgagcggggatttacgtgctaccgcagagctgcccgccataactgttctgagctcaaaagagggctgagttgatatcgcacaaagcagggttcgtaaaaataggggttaaagggtttaagggtatggtttgagattggggtgggtatgccatccaatccaacattttagaggaaattacactctannnnnnnnnnnnnnnnnnnnnnnnnntttttaccttcttttttaaaatctat

SEQ ID NO: 109930 - DNA, 571 bp, Cannabis sativa
aagatgatttgacggagcaagagggaaaagaagtaatgggttatgttaaatggcttgattcctatgggccattaaacaggaagtattatgaagagttggatgtagtaccaagagagcttgcgccatctactgaaaaacctccagagcttgagttgaaggtgcttcctagtcacttgcggtatgagttcttgggagaagataagaagctgccagttatagtgtcagcctcactttctgatttggaaactgatagattgctcagagtactacgggcgcacaacaaggctattgcatggacactgggtgatttcaagggaatcagtccctcaactatgatgcatcaaattctgatggaagaaaatgctaaaccaacaattgtgctcaacgcagactcaatccacctatgaaggaagttgtcagaaaggaagttgtcaagtggttggatgctggagtgacttacccaatctcagatgggttagtccggtacaagtagttccaaagaaaggggggtgacagtgatcaagaatgagaagaatgagttgattcccacaagaatagtcactggttggag

SEQ ID NO: 109931 - DNA, 647 bp, Cannabis sativa
ttatatgagaaaatttaaaaacaatcgcggcaaagcgcgagttgtttactaatatatataaaaggagaagtataagacgttgacatgacgctttagaattactctaaatgcatctatctaatctctccttaactctctcactttttaattttttaataagtttataaatattaattatttaaaataataataaaaatctatatatataaagctattatgatattattattacgtatacaattcaatttttttaaaaatattattattattattattattattataaattagttaaaaaaaatataaaatcatgtatcaatcttctcttaaccgtatatctcaagactaagtatataaacctaaattactttcttctttctaaactataaatgatgtggagtgatgataacttttttgaatttagtagtgattataaataagatacgcagtaatgacaactttgaatatagtaataattatatacagtggtgataatgactttgaatatagcgataattacaaatgaaatatggtggtagcgattttaatttttttttttgtattctaatttacatagctaaaatatagatttttccttaattatattataatttcattaattacaccacataaattttatactttat

SEQ ID NO: 109932 - DNA, 4534 bp, Cannabis sativa
  modified_base (186)..(196): a, c, t, g, unknown or other
ggtcaacaatcaccaatactaaacaactctcttctcttgaggctagcattaatatttatatatacataaatatatatatatatataaagagcattgctattaggcaccagtggtgcctagcaccttctcgacatgtcacgttgcgattggctagcaatactccttaaaaactattatattaaattnnnnnnnnnnngatacttagttgaaccaatagcaatattgacacataggagggtgttaggcactagtggtgccctttagcatttctcttatataaaagaggagtgctaattaaagagattctctatccccctcttttttgcactctctcttcaatgtaattgtaaatgtcaaattttgaatatggttagttttttattaatatttagttatgatattctaatgttattacaattataccattctaactaaaatattttataataactaattgtttatataggataaatatcattttagaccgtgtgttttgcaaaagttactaattggactctctattttgttaaatgacaaaataaaccttgtatttttcaaaattatacaaataagtccctgaactgatttttatcaaaataaaacataataataatctaatctagagatgttatgacaaaattggttacattttttgtatttgttcatgttagaaattatcttaaagttggttatattaaaaagataaattattgaaaattaagctcagtgtcctatttttactattttaaaaaatatagggtccattttgtcattttcccttgatttttgatttcttccatcaccccttttttgtcttcttgccattaaatcgtaccatgtctttctacccttggagattgcaaaatggggtggacgattgggttcccaaagcaattcagatctccttcatcattgctgttatggccgagattagggatgtgaatagggggtccttgagaaggattctatgtgggttttggttctacctttttatatatagcgaagcttgggtatcatttccctcacctattctcttttcttcttgctttaatttctgttgtttccagtgattccttttctctgaatatggatgattttcttaataatatttcaaacacttttgtttttccacctgatgaaagtactatttttatctaagatattagctcctctatttcttctcctactacgattagtcctcttctcaagcttcatactatctgaccctataatcacccttctctcatgaaaaccctatctagtatctggtcatcacagtgtcggttccctgtgtcagtttttgagcatgcgaatggtcttttttggttactttttgttgtgagggtgataagggtagaatcttagaaggccaaacctaacattttgcccagagtattactatttttgttgtccgtaaaagttcctttcccattacccctgataatctatattatgttctattttggcttcaagtttatggcacaccatttatgtgcaaattctatgaacatgctaggtttatagctactgaggtaggggatcttattgaggttgataaagatactgtcaaggagggtactggcccttatttgaaaattaggatccttttagatgtcaattttcctatccgaaggggtatgagtataagattcattaggatggaaagagagtttgtcaaatggttagatttcaaatatgaaagtcttcctgatttctgtttcttctgtggcaagttagatcatactaaaagatactgtcatatctacttgcaaaagtgtgatgagaatctctctgctcctctctgacattatactatccttcttagggttaaagagaagaaatcagagaaatcaatgccatttcaatatcctcacccctgctgttactatggttgatgaggacttgtcaatcttatcccctcttctaggaattttcttggtaacactataaattttccttctttaataaatgcaagtgctagtttatcttcttagtttatttcctctcattccacttctattgttatgatccctattcctctcaacctaaatgcccatagtatggtccctaatttcaacagatctggtcttgatctttctatgcgttcaaatgctttcacttcttattccactgagtctttggtggttgttggtcgtgctagaagccctgtggtggccttctcctttgacactgctctctctgttacttgcagtagtagtttttcttccacaggagatacctttacgatgaggtctaatctctctttgttgtccagcctaattctactgtccgtgttaagtttttggcgtctgcttctgggattaaacacccttctttctaaccccaaccagttgttattggtggttctttaaggtctatgcttaaacgtgctcgcgctggtgatagggaggatgatccttcccctgattctattgatcacaacacacctgcccagaaaaatgagtgctttgagttggaatgcacatggtttggggagtacgcgtgcattccgaaaactcccgtttggttatggatcatagtcctgtggttcttttttgatggaaacccatttgcttgtgcgtgctgttgatagagttcgggttgctcttggttttgataatggcttcgaagttcctcagaagcgttttggtggggggcttttacttttatggaaagctagtatttttgctaatatattaaatttttactgtaatcatatagactctaatatatgttttaatgataatgaaatattttattttactggtttctatggttcccctatttcttctcaaagacattttacttggagtcttcttgaaaaaactttttacaaagctcctaatcttccctggcttgttatgggaaactttaatagttttctttttcatgaagataaaattggtagtagttattatgataataaggatatggataatttttctacttttttggataattttttcctctttcctcttccttatgtggggaataagtttacttggcataataattcaatttgtgaacaaattgattgggccattggttctgattcttggtgtaatctctttcctaatgcggtttgacaccacttaccattttatggctctgatcatagagctctaaaggtcattctttgtaataatagtcctagttgtcttccctttattaatcaacgatttcaatttgaaaatgtctggcttgagaattttgatttttaaagttactgttaagaactcctgggaatatagtataaatcacaatattaataggggtgccttcaatgggtttcttctctgtcaggactcttgtatatcttctcttaaatcttttaataagtctgctaatcatctcttcaaatctcaaattaatgatctccataaggaaactgataggcttcagggctctctttttcttgtggtagggatattaattttcaaattaaatatctccaatctcaacttgatgctctcctttataaagaagagatctattggagacaaagggctcgagttcattggcttaaagctggtgacagaaatactaaaattttccatcagtttccatctaaaaaaaaaagactaatactattaagtacctttaggatgattgtggcaatgttattactaattttgatgctatgtgtgatttagttgtttcttatttctctgatttgtttcattgtgatggttgtgatgctaaggctgctaatttaattttggattgcttaggaacctctttggaggactctgaggttgcttttattgatcaacatttctctgttaaagaggttcaaaaagccatatttaacctttatggggatagggctccaggtcttgatagttttaccaaaagaactggttaactattgggtttgatttgctaatgctgtcctaaaattttcttaataatggtgttgatttttctaccataaataccaccctaatttctctcatacctcagaaacagcatgctgacactcttaaggattttcgacccattagtctctgtacaaccttttataaagtcattttaaaagtcttagctaatcgtttgaaggttgttttagataaaattatttcccctttctaaagtgcttttgtgtctggtagagtcatttttgataacattcttattcctcaagaagttgtccatgccatcaattctaggaaaaatagtaagcatggttgggctgctctcaaacttgatatggccaaagcttttgatcgagttgattagcagtttttggagagtgttatgtttcattttaattttcctattaattttgttaatttaattattaattgcatttctactactattctttcttttttgatcaatggtgttgtcagaggttctcttaaaccttctaggggccttagggaaggggatcatttatctccttatctttttattctttgtgctaaagatttatcttctctttttagggctaggcaagatgctggttgtaacgccctaatgctaaggcacgctacagtgctttttcaattattgtgcaaactttgctaatcaa

SEQ ID NO: 109933 - DNA, 626 bp, Cannabis sativa
tatttcattttaaatacagtgttagggttgtgtgttaccacattttgtataagctatacaagttctgatataaatggtatgtaaacttagagtattattattggacatcaaatgtgtattcacctaggacatgattcacaaccagttgagaattgttgaatatgtccatgtggttagctcgtacttcatgtgccagcttgaggccggctattaaggcttcgtatttaggctcattgtgatttttcccagtgtgttaatgcgctggtaaatataagaattttttcagtgcacatttttgctggaaaaagttaagacttttcctagcgcgttaatgttctggtaaaactaagactttccctaacatatatttttgatggcaaaagtttaacttttactagagtatttatgcactgggaaaagttatttttaccgacgattttcgttttgtgttggtaaaagttctaataccaatacaaattttgctggtcctttttgccagtgcaaaaatgtgctggtaaaaataaaatttattttgccaagatattcatagtttttgtcagcataaaaaatgtggtagaaaagtctcatttattgttgtgagtagtggtatgtatcccagttttaac

SEQ ID NO: 109934 - DNA, 657 bp, Cannabis sativa
taattgaaactaagtatcaacatcctattcatacttgaggcatagaattaaactcaaccaatttgacatttgacataaaccacaaaccaaaactttatgatgtctacgctcgaaacttaggaggtacaaaggagaagagaatatatataccaacatcgacctcacccacaattccaatagccatcccagtagagaggccaacaagaccactagcgagaccggatgagagatgggcatagccatcaaagagataatacgatttagttttgggattaataccagtattgatgataacagctatgatgagatcatagatatctaaaactcctgccataatcactgcgacgatcgacttcatgacaagctccgacctcataatccatcgatgcaactccaacaccactcttagcggttccataagcagctcccatacctgaaaatcacaaggcacactcaataaaatctagatagatccaaatccaaaagaaccctagatccatatatgagaagaagaaaaaagctcaatctcgcaaaattggataagtatgaaattaaaataggtgttgtcggaggaatttagacaacaccaattttgtgcgagtattcaagggctacttgaataccaaaaaatagatatgctagtactcacttagaata

SEQ ID NO: 109935 - DNA, 857 bp, Cannabis sativa
ttcatcttaaattagaaataaccaaaaatcaagtttatcacttaagctctctcttttttcttttttttttttttttgaatcaaagatgattttatttaataactttcagcagaaacaatagactttaaagcaataggagcatcatgctcactgaaagtacaatctgacaaagaacaagaacctctcgcaacacaatgaacgaccttattcgcagatcattttaaaaaacataaagaaacattgtttaaacaggacaataaatctcgacaatcacacacaagcattccaaattgagatggcatattaactgaactttttatagcttgcacaacaactaaggcatcagtttccaccacaacattaggccattgctttcttttaatccaactcaacgcttccttaatcccaaatatctcagctactcctggttgtactactccaaaacggctcacagaaataacttcaataaggtggcaagtatgatcttgggcgacaatgccaaaaccaaacttgttttcctcttgaaagatagcaccgtcaatattaatcttgaccgtattcatcaatggtttcctccaaagctcactaacattattaatatcatctattaacaatgcaccaattttttgtaattgagcactcttccattggtcaagaaccactctagccgaccgcactacttcactagcagaacaagctttttcattccaaagaagatcattccgaactgcccaaattttccatcccaccatagccgcctctctaacattatcaataggttgcaaagaattgaaattgaagaaccaagtgccaaagtcttgcaaactgcagcacccatatcaacactagaaacattc

SEQ ID NO: 109936 - DNA, 1183 bp, Cannabis sativa
aattaatgggtagggtaaagattctgcactaaattttagtagtatttaaaaaaagaacactacgagcaagaaaatgagctaattcattaaaggaccgcttacaataagaaaggaaattgagaatcgtttctaataaaacattgttattggacactaattgtgcctaacaccttttataggtgtcaccctacaattggttagcgatattccttaaaagttactttcttaagttatatagtatccgataattaattacaccaatttcagtatgacatcgagaaggtattaggttccaataataccttttagcaattctctttttaatattgttaatattggctaatcccttttgaaacgcaaagtattatttagagggttaggatttgggaatcaaatgatttttgggaaattgggctttccactttggtaattgggcttcaaatatgaaacccaagcccactacaccctttccaatttggtctttttcttgttcttgatgacaccctaagcccactaagctcatacgtaaggttttttactttcattatcaattttaaactttcaacattttaccaaaaaataaaaaaaatgaataaatcaacacagaaaacaacttaaaacctttttttattattaaatttaagtttgaatattaccaaattatatatatatatatattttatcattagcacacttgatggttaattcaaactaaaaatcttaatacaaatttcaaaaatctaaagatgaaaagaaaaaaaaaattctaacttgtgactgtccatcatacaaatataatacatacaaaataataaaaaaaaagtttattagtatcaaatatttaataaatatcatcacacataatttaatgatgtaaaaattaagacttatatgtgctcgcctctattgttaaaagtgtctccaatatatctgatcttttatttagatcatactagtcttacataaccaaaactaactatacaaaattacaattaagaaaaacaaaaactaaccaacctaactgtacaaaattgaaaacagaccgtataagtcaaataaaacccttaaacaaccctttgaaagcaatgtgccaataaattaatagcacgtttactatacagtaatcagaatcggaataaattaatggagaaatgtaacggaataaatgaaaaataatcggaat

SEQ ID NO: 109937 - DNA, 2095 bp, Cannabis sativa
atatatatgtggcatttatgaaaaaagatggttataaaatggtataaatgtaaatgaaaaggaaaaaagaatagtgaaaagtaaagagtgtttggtttggttactagttactaattaccttccaagcatcataacagtagcttgaggattagtgccaggagaaagaataaaagttgaaccatcaacaactctcaaagaattaatcccaaaaaccttgaaatcactatcaacaactttgccaaccaaacacccaccatgataatgccaaatagtactaactgtccttgtacaaaaatcagccataacttgaaaattagtgtgatcattaggcaaaggaggtccaataaacctaaactccctattcccaatcccatctctaaacttaaactcatccattgaactactcctcaaaacatcaccaattgccttagtaccattcacacacttctccaaatccaaagggttatgaaaatagttaaacctcacaatagggttgaccctaacatcagttgaggccaatgaaaatgtcccaattgacaagggaccattgatctttgacatgagtgttgcgacggtcaaatagagcggcgaagagggtgtcctaatgaaaaccgttcgtgctggggccgcaaaaggtatcacattggaagctgcttcgatgtaagcacccgaaggagtaatgccaacaacttgaattagtgattgttctaatggcattggtggtacaattgagatactatttcggggattgtcatacaagaatcttcccacgtagggaagatcatgggtgaccgggattcgccacgaagaaaggtagtttcttgagccaataccacttaacataagaagttgtggactaccaattgcaccagctgacactaaaatctcaccattctttcttaacattgcattgtgacaccttcctcttctgtctctaaaaacaacaccacttgctgatttttctgagtaactctttggatttgatatcataattttctcaacacttgcatagatcactactttcaagttacttattcttgagtagaatagtagatctgctgcactgtgtcttcttccataactgtcaaatattgtaccaccaatttttgtaccaaatttgtgctctaaactaaatccattgtatgggtttacacctgtttaacacacaaaactttcattcaaaaactaaaaatgtaaactttgaattactaagtaaataaaaaaacactaacttcaaatcaattagtaaaagtgcaatctttcaattactaagtaaaagaatactaactttaaattactaagtaaaaatgcaaactttaaattagtaagtgaaaatgcaaactttcaattactaagtgaaaatgctaactttcaattactaactaaaaatgcaaactttaaattggtctctcttcttcattatataatcataaaataacattttcaaatataaataataataaattattgattcacacttgttaagaactaaaaacaagtgaaaaaacaaaaattttgaatcatttctcaatcttaactttttttttttttctaacacaaaatttcataccaaattccacttaatttcaataaattaaaaaaaaaatcaaattcaaataattaattaaaacactaacttgaatcaatcttaactcaaatcaaataaaaatctgaaaaataacatatttttattcaaaaataagaaaattaccagcttcttgtaacccatctcgaacacccatttgccaagtcttaatctcaggtctaaacacaattttcctctcaacccattcatatgaatcgttgaccattttcctatcccagtcaaccccagatttctcaaagaactcttcctcggctcggctatagaagccggcgttaatggcgctactcccgccgagaactctcccacgtgaattaggaaccccatcttccgacgtaaatgcttgagccgccgactcgtatgcatcagcgtcggctaaagccgtcaagaaaccctcttggaacatcacatttcgatcggcgtacggcgcgccgccgcgttccaaaacgagcacgcggaacgcacgtgacagagtcgctgctaatggacaac

SEQ ID NO: 109938 - DNA, 877 bp, Cannabis sativa
ctcaaacgaactctggatatgagatctctaccaccaaaacttcaaatgctcaaatgaattctgttgcaattggagatttagaaactagttttctaaattgaaaaatcgttttcataataaataaatcttatatgagttttgatattcgtaactggtttctttattaagaaactaattttaattatatgaaagtaactagtttcttaatttattaccttaacaaaattacttttaaccagtttttttatggtgaaattggttctttatgaggaaactgattttgattatatagaagtaatatttatatacaagttttttatgatattctttcttatttatataatttatcttatattttattttttttaaaaaaatatcatatttagtgtaattaaatttaatttttattttttttcgagattgttgcaagtagcccaataaacagcattagtttaaaattgggccttcataaagagcccaacaatcctatccaaaagcccaatgaagcaaagtatgatccaatagttgtctgttattgttatttgaagaaaaacagacctaaaaaccaaacaccatttccaaaagccctttcagtttcagagagatacactttcatttcaaagctccaacgaatcctaaccatggcgactgagatagcagcggccaccgaggccaacattttagcagagcccgaggctgcagcggctattgtggccgagaacaagacgcaaggcgagccacacaagttggataagaaatggaccttttggttcgataaccaatctaagcctaagcaaggcgccgcctggggcacttctcttcgctctgtctacacttttgacaccgttgaagaattttggtggtacttatcaatagc

SEQ ID NO: 109939 - DNA, 601 bp, Cannabis sativa
agggccaaaaacaattgcctacttcctgctaccccttagttattcatttcattcattccatgatcaaagttacaaccaaactgtcagagcaatacaagagaaacccaactctctcactcgagtatttcaagaacacaccttgaacaatactcctcactctgtttcttcactctccaatcagactaattacttctctatctcacttagtaatagctaacatgcctttatatataggcttacatgaaaacgaaaaacagaattgtaacaaacttaactacccaagctcttgagagtgtgaacataaccgaaataactaactgtccaagaaacttggaactgaatgtaacaacctgtttctttatttggattaccataaaactacgaattccaccttaatccaaataaagcagacattctggagtttcacctctctctttctctttctctactccttaggaggtaagattccattaacatatcattacaaattagtttcaaatatatctcaacaatcactcacaatttgttagtttgaacatatttgttttctctcatgaatcgttttcatcatcaaatgtttcttcatatccgttactatggt

SEQ ID NO: 109940 - DNA, 635 bp, Cannabis sativa
atattaataagagaaagagttagaccttgcggtcattacataacaggttccccggtatagaggaaaccggaataacaccaaatgtcttgtgggtgaaagtccacttggccatgttatgggccgccaaattacatgttctactaacataagaaaatacacaactggaaaataaaggagtagatctattacaaaatgagatgtagttctcaagcgcccattgagactccttcccaataagagcattgataaccacactcgaatcattctccacaataataaattttgcctgaagagccagcgccgtctcaatcgccaagcagcaagctgccgcttcgccacacagagaatcaacaaaatctagcctggctgttgtaatccgaagcaccctgccaagatgatccctggccaccacagccgaacacatgctatctaaccccactttgatatcacaattaagtttgatccaatccggtggaggaggcctccagtcctgcaaaggtgggggactaggaggaggggaaatggtagcatgcatatctgcaaaagagtagcaaatagagtcaatacatctgctaacatcaactggactattgttgtgtaccttatcattacgcattctccagatggcgtcaaca

SEQ ID NO: 109941 - DNA, 933 bp, Cannabis sativa
tacaactttgaacatatatatataaatggagcttttttttttattgaagcgtttatatattacaacatgttttacctgggactcgaacccaagacctccaacactcacacacccacctatggccacttgagctacccccaagtggtttatatataaatggagctaatacaataagtattgtgatttttacctatcaataggaatagtaatttgtagtctttgatttaatcaaatggctcaaattaattcttaaaaactacaccataattaatatatcttttttatttataattaatcttaaatattattaattacaagttcaactaacataatccaaacctataatttttttttacttatttatcttatgactatttataattttcaattaattatttttttaatttgaaatttatatattatttttaattaattttattttctacttaacacaataactgtagctagaaaaatacaaaatattcaagttatttaatcctacaataatcagtacaaccaataatataataatggtgtaagtggtaaaattattgtatatcaagtacaatgacatgagttagttcaatcctttcaaaagatataatttttttttaatttaagattttaaattaatttaataatttgaattttttttattttttttttcaaaacaatagtttatttattttttaatatttacttatatggaacaattcttatactataaaaattttaaagtttctaattattgtggtggaaagtcttaaacttttatttgttaatatatattgatggttgtattacataaagtataatagtaaacaataaaataacacatgcaataataataataatcaaataaaaagtttatcaagtaaaaattgaataataaattttgtcaaataaaaaaaaatacattataaatagatgaaa

SEQ ID NO: 109942 - DNA, 2110 bp, Cannabis sativa
  modified_base (1887)..(1891): a, c, t, g, unknown or other
tgcagcctttacttcactaaacttatgttttgaattgtgcctttcaaccttgaaacttggctctaaactgatactgttctctttctcttgatgatgcttcacaagctgggaatgtgatattggaagtggtgtctcttctttgaacacttcccattgagtgaaattttcaattgggctcaacactgaagaatgaccaaatcgagacctttttacgccattttgacttgacccaattgcctttactttctcctcagaaagactagggactggcattggactactaacctctttttcacccttctcaacatcacacacttgtttcctagaatctatagataaagaaaacagtgattcagaagattcctcttgcagcactagccctttatcaccagcctcactatcttcatcttcttccacattgctatcttctcctccaatatcttcacattcatcagtactttttctgcaattttggtacctattatttggaacataagacccaacaatagtatccaaaatgggtttcatttcttttagcttttcttcatttccactcttcttctcctcattagtttccaccaaatcacagctactttccttagtagatggctccacacaagtcttaacattcaaattaaaggttacccttttcttggaacaacaatttccttcctcctcagcctcatctctgagttattcaaacccataaacaaagatataaaagatcaataaaacaatgcccactaaaataacacaaaacccagataaatcccatcttaagaaacagcttactttgattctcttatgaattctgtgagttgtccagcctgttcttgctttggtggttcaatgagttgaggcgattcagtagtcttaagggcctaaaatatctcagataagatacataaatttcaataaaaagtgcccaagtaaaataaataaattaaaaaagtaaactgtattggtgagcttacttggtatttggagtgagttgcgttatctgggtgttgatgttttgggcgattagaagtagtgaagcaagctagaaagcagaccatgattaaagcagccgcaatctgagtgtgagttgagcttagtagagccttggaggtgagtgtgagtgggtacctttttgatctcgaaatgaagactggtttagaaagtttcgtcaatggagatgaaaaggggtctgaaatgtgaccgttgggagttattctctctctctctctctctgagttctgaaatgtgaccgttgagatttcattcaattacctttatttatctaccatatcatattattcactatcactgtcgaggtcagaggtcagactgaatcccatgttctaatcataaaatgcccacttcaaattattaccacattcaatagttactagttgagtctaaaatattttttgaaaaaatttgtaacatgattctttgtcatggtctttgatgtttttctttgtttttttttagtattttttaaagctaaataatagtttaattaatagcaaattcagattctgagtggaagaatttataggtagagactaaatattctaaaataacaaaatcatgaatacaagtaaatgatttacgtagctttggctataataaaagatatgttacccttaaactttacacattaacatgttttacaatctgaaaagtgatttgtgccgacaaaatgttttcgatcaatataattaccaattaattagtataagtatacaaactaaattagaagtaggaaagaaataaactataaaccccaaaaatattattcttttactatcaaaattttttaaaaaaaagaataaatagaaatttatttaaaaatatagaaatagaccaatatattatatcaggcccggccctgggcatagnnnnnctaggcctgtgcctagggcccacctatcccaggggcccaaaaaaaatatttttcttttaaaattatacaatttttttaactgattttcaaaagtatcatatttttttctaaataggggcccaaaataaatttttttttcaatggcctactaaaaattagagctgccctgtattatatatatatatatggaagaggtttcaatggttacatttttattgt

SEQ ID NO: 109943 - DNA, 5781 bp, Cannabis sativa
cagcgcatttatgcgctggaaaaattcatttttgccagcatttttcattttatgctggtaaaagttctaataccaatattgatttgccaacccccttctgccaacacatcacaagtaacttctattttaccagcgcaataccaacttttgccagcacaaaaatgtgctggcaaagtgacatttcttgtagtgtatgtgcaaagtttatttatcttcaagcattctactactagatttagctcaatttagagtggctaagctatttatgtaggatagagaaattatttcaacaacttatatgtcattttataattatttagtgctaattttatttaggtattcaattgtggtagtatctttcaaagaatttgcttgaacgctagcttgaagttggtaagctacttaaacttggtttctttatattttataaatcttaaaagtgtttgagtatcctagatattcatccatagtaagttctaggattgcatgactgcggtgaaagtagaatatgcatgttaggagttttaatatcttagatatttatccataatgaagtaggttttacgaataaaagtattgcggtcggatgggtggtaattgttgtcagttaattatagtttcatttgttcgtactattgtgaatgttttaataaattatttgcatgtctaaaaaaatttgggaacatttgatttataaatattatgctgctgaaattttggtagaaattttgataggattaatattttattggattaattaggttaagttgaaatagattattatattaaattaattaggttaattaaagtgttgttttattagaagtttcaaaatggatagaaataggatgagtgcgaataggttaacggtgaaatatagggaaggtgttgattgttgctattaatttttgcattatgtaattaatttatagttagtttttacgatacatggaatataagttttagaatcgtttctattaacaattttggtactatgtaatcagttaatagaatcgattattaattttatataagttttataaaggttatttaacttttttttttttgtattatgtatttactattatataaaattattctaaaatttgataatataagtagaaaaaattgcataaaaatttgcaattttctcttacctacatttatgcttcgttttataaccaatgcaataagtcaaaaaaaagtatttcagcaatttatgtgtcattttaaaacagacggtataagtttttcgtgacggtttcaaaataccacaaacgattttgcatcatttccaaatcgacatagaagataaaaaagaagagtgtatagtttgtgtcgctttttaaatgaagataattatttttgcatcatttaaaaaacgacactcggactatgacatatacgtcagttttttaaacccacgcaaattctttaaatgatacttagaaatcgacagaaattgtactttttgtagtagtgaattttcaacacttaggtgacgtttagttgggaagaattaaaatataggaaaaacaataggatataattaaatataaaatgcataaaaaaattggttaaaatttattaaatttttcctcatatatcttgcattagaatgatcattctttctattctaccaaaatgataaaaaaaatcattctatttgaataatattttaatactttaaaatgcaatcaaataaatgaatgcaataaaatttgttttatttttatttaattctattttattacctccaaccaaacagcaccttagagaaattatatttcgatttttttaaacgaaaacatacattatagtaatattagatattctgcatacttttgataaattttagaaaattcacattgttaaaaataaaatttaaacaatccgttatattatatttttttacacatattttattattttgaactttattttaatactataaattatttagaattttttaaaatacgtgaaataattattataattacatacaatatacaatatatataaagagaattagaatatgatttctctaggtgagaaaaataaaaatataatccttgtaatagtaatgccctaactacttaagattctgctaaatatatataaatgtttgtattatttctttctataaaaattatatttatgtatgttacttttgttttatgataaaataatttaaaaattcgggtttcaatggattttttttccttttattcccaatttcgaaaactacaagacaaattttttagttttgtaaatcactaaaaatgatacaacaaaataattttgagactttcccatcacatttttttcaaaaaaagaaaaaaaaaatattctatatcatatgagactatcaatgaagatgatgagtacggaccatttgtgaatttttgaccatatttgaaatgagggtactatttttaccaatttaaaattataatatttgtgtgaaaatgaggaaccaaaagtggtgtatcatgtatgtatatattatatacaaaattataatgcatgcatatgatgtatatttattggatcccattgtagttcaaatgaatgattggttcaggtattcatttgagccataaattgagaaaatatttgatctaatggttgaagacaattgaattaaatattaatagataaaataatattttaataaaacaaatgaaaaatgaagggcatttaaccagatacgtaacaggttggggcatttattattaaactaaataaatactattagttttttattaagtttcgcgcgctgaagcgattaagctgaactataggaggaggcatcatgcttttggttaagatcgatcaaaaacattttaagaaaaaaaagacgaagttcttttattgtcgaagctttctcttatcgtctgaagctttaattctcttattgttgaagctttcttttatcgttgaagctttcttttatcatcgaagctttctcttatcgttgaagctttcttttattgtcgaagctttctcttatcgttgaagctttctcttattgtcaaagctgaatctgtcgtagctaactccgatcgtcgtgaaaattgaaggtatggtagcgcctattttgcaaccattgaagctattgacgattcttattaaacaaatttgtgctttgtttatattagggttttcataattttgttcgttttctttttctttctcgcttttttgttctttaattttcatgtttttatcaagcaatggtaatgagataggtagtgattgaagcttttgataggggaaaatttggtaattgtttgttaattttgggagaatattgatttttggaaatattgatcggttcaattgttaatattagtctcactctcttgctgattattgttggagatagtgtaaaatattttgggttcttttggcttgcaatagaaatgtttgtttttaatcatctagtaaattatattgtaaataattttaaaactattaatatggatgttatcttattttttgcactatgacggaacatctagctgaacgatacgtgtcttgcattttttaacctgggcagacggtttcactctcagtagcccataaggattggtatgaaggtccaagttgtacatacatagcaggatgtctagacagagtcatcaacggacatctgaccagctcgattgagtgatcaacttgtgtgcaccagccaagagatgtgagttggcaatgtcagcactgatcgatgatatctccaaactttcatgacatgaagtaatctctatttgcttaatcttattttcattgtaattatgataatatatgaatttcctattttatttcttacagattaaagaaaaccattctatgtaattgttgacctcgattctaaccaatgacagtgaatcaaaaaaaaagtaatcaggtaagataattaaaagaacgcaaaaatagtagaataaagttaacactaaattttaaagaggttgggccccgttagtgtggtaatagcctactccccttgtattgtattgacttgagagaaggaaatacagtgttcttcctctcgaaagcttttacaattgatctctcagtaagtttttttcttagatcactcttttctctctagaatatatttctgcagcaattctttctatctccttcacagtgaggctaggtcactatttatagggacttattacatgagggatgattttcatttttcttataatgaataaaataggaaactatattaattctataattacaatatgagaaataggaaattgggatgtgttgctattattctctgactcaatcccgtgattatagggattttcttcgcgtctggacacaacgaggttgatctttgaaattgtcatcttccacgctttgctcggcataagcatatttgcatcttggtcgaacatctacctcaccaacttgagcgggcatctgagcgttgcaaatattgatcaaccataactgggctgctaggcgtatcttcctctgcccaggtatcgaaaacataagacacgtgtcatccactcctattgccacgtcatggtacaaaaaataggataacatttgccccaagtctgcgcaggaccttcttggtcgcacatggacttcactcagcccagagtcttatttggatgggtgacgcgtgtcctagatgtcggatgacgaaccaatgtggtcctgactaggagtctcttcaacttatgcccatttaatgccaattgacggttttacctcgaatcacggttcgaagcttgcgcgtgtctgacagttatactccctgtaatgagtacgtaacgttcacttttgggagaaaattcaagaaattcaaattttaaaatgattgcttctcttttcagattgcttataaataggattaaggatctctagcaatagttttagccatttcaaatcttaaacaccagagcaaaaacttttagccaaatttcctcccagattcatcgaagaattctcaaaaaaacttctgacgatttcatccgagttgagcaagaaagcttcaaatcagtgagtaagtttttcatttcttccttttacatatttacaatgaaatgcctatatgatttctggattttttaaatgaatcttgcctgttcttgaactgttctaggttaaccatagaatacctaggtttagggcttgaaaatcttacttatttttaatcataacatctgattgtctgactgcgcttcaaatttctccttacaacattcatttccactcgtccacatagttttagtgaaaatcatattccaatttgaagtttcgaacttctgggtttgaaaattctatttctgggtgaaacctccgcttttgatttcttagtcgaacttggtcgatatataacctatttttcattcattgctctgaccaactcactttcttgtctcctaccttttgtagatgaaccctggtgagttttggggaggcaaacatcatatcgactaggatttgcttcaacttccgggatttaatctcttgctaattttctctttagaaaatctatcaatattagacgtctccaaatcatcatcactactctcaagttgttcgtgtaaggtttcagtatcattgaaaggattttcagactcagatggaattattccagatgaagatgtccaagcatgctcttgtgtagcaacagttttcataaaaatcttatctaatttttcctctacttctggttcaattccccgaatgcaaaactttgcagcatcatgatgagtctacaaaaggaatttcgttaattaaatgtac

SEQ ID NO: 109944 - DNA, 554 bp, Cannabis sativa
taattttgttgtcataatatatattttaattgtggtatataatttgattagtatagtatacatatatatatatatgttagtaatatatatttttatcattattatttttagtatgtatgttttggtgaattgtatatgtatttttttgttatatagtatatcattttcttttaaaataatatttaagttttattttctattgtacttttgttgacatgatatataattttattaccattctatgtatttttatttattgttattattatatatatatttctattataaggtatatattatttattatatggtatatacgttttattgtatagtatattatgcatgtttagtttttattttattatacataaaggtaatatataattttattaataagatatatacaactttttttaataatattatattatattattttattttattattgtaagtatataatttttcttgtatggtatatagtttttgttgtctatagtatatcagttatttaagatgatatttagtttctattttattatatataaattttt

SEQ ID NO: 109945 - DNA, 747 bp, Cannabis sativa
ttggagggacagggttgagagaggaaaattaatttgagactggtgattttttttttttcactttaggaatatataaaagagccaaattaacatcacaaaacatcttacataataaagagcaaaccaatccaaatagccatgtatgtccttgcattcaaattttttgagatagctttcttattatttaggactaaattaaaaaagcactagaaaactcagaagagagagggaagttgaagaagaagaagaagacaagaaaggagtaggtggtatttgcaatgaatcaacactcccttcaagcatttctatcactttactcatacttggtctcttttcagggttagcttgtacacaccacaaactcacaattatcatcttcttcacttttattttatcttctttatcatttattctcttcaaacaaacctcttcatccaattctagcttcctataaacccaatgtggaaaatatatttcactagtgttattagcttggatattgacattttgtctacctccaactatttctaaaaccatcattccataactatacacatcagacttgtatgaaatcacaccaaagtttctactaatgatttcgggagcaatgtatccaattgtccctcttggacccaacatggagcttacactttcttgtctagtgcaaatcttagctaggccgaaatcagagatttttgggacaaaatccgcgtcaagaagaatattgtgaggcttaatatcgaaatg

SEQ ID NO: 109946 - DNA, 839 bp, Cannabis sativa
gtaacaggtcagctctcagttaacaactcttatttctctgtgttgtttgactctggggcgactcattcttatatggcagcaagaatttttagtaaattggatagaccgcacgatagttatgaaatagggtttggaaccatactgcctcccggagagttagtcatctccaaaaggtggattaggtctatgtcgatcagaattgaggatagggagttgagtgttgatttaatagaaatgaatttagcggattttgatattatactggggatggatttcttatccaagtatttgtccagtattgattgtaagaggaagatggtgatcttccaactagaaggcgaaccatttgtttttgtcggatcagttcggggatctcagatcccggtaatttcagtactaacagccagggcattgttacgagagggatgtctaggatttttagccgtggtattggataccactcggcctgactctgttcgaccagaagacattaaggtggttcgggaatttctagatgtttttcctgatgaacttccgggtttgccaccttagcgggaaattgatttcattattgacttggcatctggagcagaaccggtttctaaggccccttacagaatggctccaacaaaacttaaagaattgaaaaatcaactccaagggttgcttgacataaggttttcgcggcctagtgtgtcatcctggggagctctggtattatttattaagaagaaagatgggtctttacgtatgtccattgactatcgggaattgaataaacaaactatcaagaataaatatcctttacctaggattgatgatctttttgatcaacttca

SEQ ID NO: 109947 - DNA, 3575 bp, Cannabis sativa
gcccgaagcttgctcaaaaagagtgagaagttcccgtactttgatggcttcttccattgtagctttacaatagagataactatcatctacaaataacatatgtgacactcgaggagcaccattcgccactttgcaaccatgaagccaccctcgcaattcatatttccttatcaaagccgagaagccttccgcacaaagaatgaaaatgtaaggtgataacgggtcgccttgtcttatccctcgttaaggagatataggacccatcatctttcccccatgtacaatagagtaagaggctgaccgaacacattccattaacaaagcgatccaaccattatcaaatcccaatttcacaagaattgcttctaaatagctccattcgattctatcgtaagctttgctcatatctagttttagggccatgcaaccttcttttcctttcctctttcgtttcaagtagtggagaacttcaaatgacaccatgatgttatccgttatgagcctcccaggtatgaaggcactttgatagtgtgagacaattctatccatgatcggtttcaaccggttagccattacttttgtaattgttttgtattaaacattacacaaagcaataggacgtaagtccgtcatgcgttcaggatttcttgtcttcggtataagcaccacattagccttattgacatcattttcaaattaaccacttgtgaaaaaacgctgaactaaccttacaacatccgatccaagaacaacccaattcttctgataaaacgctggtgtcaaaccatcgggacaggggcttttgtcaggatgcattccaaatacagcacttcgcacctcctcttcagaaacagcaagaagaaacgagccattcatcacaagagtaaccattttttccacacaatcaatcacggcctggggggatgttgaggaagagctgaataaattggtgaaatagtcagttacaacaccttccaatcccgaattccaagtgacatctacaccgtattcattcttcaagtggtgtatggtgttggtccttcgtctcgtactggcagccgcatgaaaaaacttagtgttttggtctccttccttgagccaaaattgcttcgccctttgtttccaaaaggtctctttttgatcaataacattcagcaactgtttcttcacttctctgtatctctgaaccgaagcattgtccctcttattcttcaacaaatcaaggtctctcttgcacgcattaattcttgttttaaagttacctgtaatagtttttccccattcctcaagcttttcggtacaaagtttctgcttaaaccagatatctttgtcattgttctcctcccaacaaccttgaatgatttcataacacaatggttctttgagccaagcattctcgaatttgaaactacggatgcctcccctttgaaccggagcttcaggttccaaaaagatgggactgtgatctgaagtagagtgatgcaggttgtacaatttggcattcgaaaatttttgaaaccagctagaactgatcaagaccctatcaagccgcacctcaatccagttactacctcccctattcttttcccaggtataaggatggccaacaatttccatatcaattaaatcacaatcactcaaaacttgtaaaaaaccttcaataagattccttggatacctatttccaccatgtttatcctcttgactcactatgttgttcaaatcgccaatgatacaccaaggataatctatccgtgttttgagctcacggatcaagttccaggtttgccatcgaaggtgcctacgaggttctccatacatgccagtgattctccaactatcttggtttccatttgtaacaataaaatcaatatgattttgagaaaaaccatatatgtaaccatcagcttgatttttccaaaaaaaggctaagccaccaccccttccttgggcctccacaccaaaagccccatcaaagcccaaataacgaccaacccaatccaccctactattggcacacttagtctcacacagaaaaataaagtcgggcctcttttgagaaacaatctcttttaggaattgaactgtccacgggttcccaagcccacggcaattccaattaaagagattcataatccttggcgggcctgtgatccagaacccgccccaattgagtttttttgtagcagtgatgtattgttactatccaccacgtgtgtatccaagtcagaagtatcttccataaccatatcaccttgtaatatcacttcattattacccattgtcactctccttcttttctgatcaaaaacaagctggctatcctcctcattatcttctatatttatcattgttgacttttcatttttatctccctcaaatccttctccatcaattgctccttgagatcccatattcttgtcccccccatcaattccagcatgatttcctcccctaattttcgcccctgtcatcacagaattactgatcaccaccggagtaatgttcaccagcgtggtagatgattccccagacattttcacccccatttttgacctcaaccaccttgaaccaatggagtgtgatcgtcttcttggagctgctttcatatccaggttgtatctcttagttaacagatgaggaggtgtatcaaaggcttcctcacagaatctctctgaatggccaagcaaaccacagacaaaacagaaagtggtcaaatcttcatagcgaaaaatcgcattacattcgggtccattcttcagttgcagcttccggcctttcttcagcggtttgtcaacacgaatacgcaccctcacccttaaaaactccctccagccacctaagaagttgttcggatccatcttgacataagaaccaatataatttcccaagtccttcaacactctctctgatcgaaagcctgatatcaaaccatggacttgcacccaaaactccaaagtaatcggagtgacacatcttggattctcccctggtttaagcctatcaaagattaaaggaatcctatcaaaagtccaaggacttccttccatgactcgatcaatgtccatgtcgtgatagaactggaataaaaacagattcggctctaattctttggcaaataaaccacgaacgggacgccacaaagatgccattttgtgctgcatagcatcaaagtcaatagtcctttccgttaagaagcgtcctactagacaccaacgatcatccaaatcaacattctcccctgtatcattgtcatacatcaagtaaccatcatcatcctcccctagattcattgcagcatattgttcatccatcatcgaatggaacagcgttttcagacacaatcagcaagagacagaatcaccaacctcaaataaacaatacaaaccaattaaaacataagaacatcatacacatgtcatgagacaagacttcaacactcaatgtaagctgcaatctctgctacattctataattatagctttctaattgaatgtgttgactattgagaaagaattgatacttgtcttcttagttaattttcaactaagacttatttggtataatcaaagagt

SEQ ID NO: 109948 - DNA, 912 bp, Cannabis sativa
ggttttaggtccctggttcattttaatcaggccatgttagcaaagcaggcttggagaatttttcaaaatcctaattctttacttagtcttacccttcaagcaatgtatttcccacacacttcttttcttgatgctgttccaggtcataacccttctttctcttggagaagtatcatatggggtagagatcttcttaagagaggccttctttggaaggtaggtaatgggcaaactattaacacaattaatgatcgctggttgcctaattttgctcttaaggattctgatttgatagccgctcttccttctccttctttgtcatattttatttctccctcaggtgcttgggatttgaataaactgagatgtcattttcctgttttcatcattgatcatatcttggatatacctatagcaggtcatatgtgttctgatgttttaatctggggaaaggataattctgggatttttaatgttaaatctacatatcatcttgctattagtcatagagatatcccctcttcttcatctcctttgggaaataaacggttttggtctaaactttggttctcttccattcctgcaaaggttaagcattgtgtttggcgtattcttctgaattctattcctgttgcttctaacctttatcataggcacattatccctgcacctttatgccccctctgtcatgtagtaccagaaacggtcacacatgctttccttgaatgttctagagttaaaactgcctggaaaaattcctctttttatattttttatgctgaacacaaatctttgaacatctatgcctatatttcgaaggcagttgagacttttgataaacgaatgctatgtattttcttttgtttcctctggatggtgtggtcacaacgaaacaattatttgcaccatcat

SEQ ID NO: 109949 - DNA, 664 bp, Cannabis sativa
gttagggttatttgaagatgataactgtaagattttcttgcacccttggaaagtaattgatagtggatgctttaggtcgaagaggtttaggtataaccagaaatagatttcatcaaagtttgctggaaagataaacagagcacggattgagttcgtgataggagaacttgttggtatcacgttgtagtttgatctattagaaataataaaaatggtctagtagggtgactccgaattacaggggtacaaagaatgatttgggaaccggttcgaaaatggacttttgattacgtctgaaggaattttatgatataaagataaagtttgtgtaccgtaccagtgagataaggatattgaatagaaggttttgaatgagtcttatatcatgtaattttttaacatatgggagtaactgagatatatattacgatgttaaaacccttttactaattatgaaagacgatattatgaagaatgaattagatgaccaacttatcagcaagtctaggaacattaagtttctatgattctatctaggggccttttaatcatattcagtttggtacaatttagtacagcttttcatcctcaaaccgatggtcaatttgagaggactatcagatacttgaggatatgctgagggcatgtgtaatggattttaaag

SEQ ID NO: 109950 - DNA, 1164 bp, Cannabis sativa
ccaagccgtctcagctgcatcaaaacgatccgtcccaaccactccagtcgtatcaaccataactccggccaacttcccagacgatcgaaccatacacgcattaatcactctcttacaggtattaactcttttgatcatcttttcctattcactgtcaaatctcatcagagaaatgggttttccttagggtattttagatacaaatttgggcttcccattaaattacctcaggaaaatcgataccaaaaagggattatgggaaaataaaaagattttatattaatttccaaaaaaggtttaattccttttgcccaaaattttcaaaatatagcattaatgttagtctgcaattgtgatctgcctggtacatttcgaaatccttttgtgcagcaactctgttcgaaagtaaatgctacagatgtgatagttaccaaatctgctcataactatctcaaaatggtttttctatataagggcagaacatcccttcggttttgcatctacattcccatcatatctaagcctgattctctaaaaaagctttccaatattaactgtttctgtttatatatatactttattcactgtaatagccaattagtcccccccaggtctctctttcactacacacaaccgagctcagttctgcatactgtcttcagtatctctttctctgatctctcaaggttcctggtatggtattgtactggtcttaagttcactcagttgttccaatattcaggtcaatatttttccacagttagttggttattagctcatagtccccctattattagttttttgaatattattgttcaaatacactcttgtttgcccttgtctttggctcaccatattctgctcagggtcacttttcagactttctatagtcgtcattttaccttactcacacggtcctattacattaatattatttcattcgatctcagtcactatttattcacttgtatcatggatgagctaaacaaatcactatctgttgctctcaacctcacagagaccgaatgcaccattcaaactctccatgagtctgcccccaccaacacccctgaatccgagatccaacccatccctttattcttggttgtcaaagttcacacggttaaatcctttaaccgcaagaactttatagagaaaatgacc

SEQ ID NO: 109951 - DNA, 601 bp, Cannabis sativa
ctactgaagatgataaattgtttgcttataattgcaaagctttacatgttatatttaatggagtaggtgaaggctatattaagcttatatcttcttgtgaatatactaaggatgcttggcatatccttcaaacacagtttgaaggaacttttaatgttaagcgttctagatttattatgcttcagacaaaatttgatgatcttagaatgtctgaatctaaaaccttgtctgagttttatgaaagattatctgatatagctaatgaatattttgctcttggtgaaaagcttgatgaatctgttcttgtctagaaaaattgctagagttcttccaaacaggtttgatactaaacttttggccatggaaaaacctaaagattttagcacaatgaaggtggaagaattaatgggttctttgcgtacttttgaatttaatcaacaaatcaagcagaaggaaaaacccaggtccattgctaataaaggtaaatgtattgcttttaatgttgcgtaaaaagaaatttcagatgatgaagaagatgatgagatggatgttttaactaaaaactttgagaaatacatgaaaaagataagtgacaaaaaga

SEQ ID NO: 109952 - DNA, 849 bp, Cannabis sativa
aatataattagcctaatacaattatttaaataagacaaatgagccttcacatttgggatggttcatgtgagggaggactgtgttaactatgccgcacccactactattgaccctctatctaactctcacacaaggcccaaaaaagaggaatttaacctttaattaaatagttattattaattgaataagcctaatacttattgggcctaaataaaactatcaaaatgatattttatttttagcaacttagtctatttatatattcaaaaataaataggcttcctatttgcatctaagcctaataacaaacatataggctcatatatacaaattgattttggatgggtcctattatgttactaagtttatcacaaatgaaagaaattacaaaattatctattacatattatttatttgatctattaacaattgaactatgattaaaattagattattggatttatctacaagttaatcatagcaatttaaataaaataaataataggtttgttaataaattttgaatcaaacatttaaataaacaaacaaacaatgtaacaatatttagaaagttggttaacatatttctattttaaaatagaatatttaaaaaatatcttaacttgaattcaaattaggttgtttgaagatatttaaatctaacgaattcttaagatatcttaaatttaaatttaaatatccaactaattttcaaaatctagtttaatttaatttaatttaaattaaataaataactaataagatgatataacataatatcttattttgaaaattgaggtatttctaatattatatttcaaatcttataatctaataaattaaatttaa

SEQ ID NO: 109953 - DNA, 1149 bp, Cannabis sativa
aacctaagaagagtactacacaaacctcgagacgacttttcaccatgactcaggctgacgctgatgctagtccgtcagtggtgacatgtcagttgtctattaatggttgttcttatactgtgttgtttgactcatgagctacgcactcttatgtgttgagtagggttattaaaagttttcataagccatgtgatatttatgctttgggatttggtaccctgttaccctcggaagaccttatagtatccactaggtggattcggtctttgtccttctggattgacggttgtgaattaatcgccaatctaatagaattgcaactgtctaactttgatataatcttgggaatggatttcttgtctaagtatggggcaacgatcgactgcaagcggaagaaggtggtgtttgagcctgatagtgctaacccagcggtgttcgtgggtaaagttcagggggcacacataccaaggataacattattgaaagctaaggacttgatgagcagaggttgtctgggattcatagtcactgcagtggataccagccgacctgtgacatctggacctgagaatacaagattggtgtgcgagttccttgaagtctttcttgaagatttaccgggattggcacctacctgggagattgaatttgttattgagttggttccgggagtggacccagtatcaaaagcaccgtatcgaatggctccagcagaattgaaagaattaaaaactgtaagagttactgaatttgggattcattagactgagctactcaccttgtggttctccggtattgtttgtgaagaagaaagacgggtctctgcgaatgtgtattgattaccggaagttgaacaagcttaccatcaagaacatgtatcctttacctcgaattgatgatctatttgatcaaatgaaggggaaaatggtcttctccaagatcgatcttcgctcaggctatcatcagctaagaatttgagaggaagatatcctgaaaactgtgttccatactcgatatggacattataaattgcttgtgatgtctttttaactcaccaatgcctcggtggcattcatggatcttatgaatcgggtgttcaaggattacctggatagatgtgtgatcgtgtttatcgatgacatcatggtg

SEQ ID NO: 109954 - DNA, 750 bp, Cannabis sativa
  modified_base (390)..(393): a, c, t, g, unknown or other
tcgccgaaccaggaccctagaacaagacaaggaccgtgaccaggacccgaacccagacctagaaccgaacacaaacgtagactcaaacccaaacatagactggaactcaggcccgaacacggtcgtgtacccagaccggaactgatacccggacctggacctaaatctgggacacgatcccaaacacaaacttggacctagatagggatccggatacgaacctggactcggacaaagacctaaacttggacccgcactcgggacccgaacttggatgtagaccccatcccaaacctggaccggcactcgtgacccgaacttggacatggacccgaacctagacctcgatcggggtggagacctgtacacaaacccagacacagactcggnnnngaactcaaacatacagctagaatcagacccaaagctagacctggacacaaacccaaactcgaaccgagaccaggatcagaaccaaggacttagacccagaactgaatccagacacagatcggtattggaacttgggacacggacacaacctagaccaagacccaggaggtgaacccacacccggagcctgatttgaccctagactgaaatttgaacccaaacccaaactgagacaaggactcgaaattcgacccgaactcaaccccaaaatcgaactcataatcgcaaatggaactagaaccgaactagcactaggactaggaccaggacctaaacccaaacacgaacctagatcaa

SEQ ID NO: 109955 - DNA, 1222 bp, Cannabis sativa
  modified_base (296)..(296): a, c, t, g, unknown or other
gtgctctggctagaggatacttcattcttagccttggccactgcaaggttataacattcctgagaaatttgctagtttcctctcagacaccctaccccattctttgttaaaaactttaagcatgaatggaatattgacgtaacagcctttaagtcatacaaggctggtttgcctagcatgacgttaaaggctgatggaacgtccaataccagaaattgtgccattatagttgtgctcgtcggagcttgtccaacagtgaggggtaggcaaatttgccctagaggtgcgactccttngccggagaaaccatatacaggcagaagataggggttagatctttgagttggagccccatcttttcatatgcggtcttgaataagatgttggaagaggctcaattatctatcatagttctggccaccatcttgttggctatctggacctctacaaccaacgggtcgttgtgcggaaacttaattttgacatcttcgtcgttgaatgttatggtgggctctcctgctcgtgagattttaggattcctttcttctacggccaagattacttcttcttgctcgtgctgtgctattcgggtatacctttcccgagctttgcccgaatctccaactatgtgcgggcctccaatgatgacttgcaaatgtccatctactggtggaggtagcaagtcttaattattatcacccctctgattctgatcggccttgacatacttctgtacatgcgggttatttttccttatcaggaattcaatttcctgctgcagattgttccattcataggtgtcgtggtcgtagtctccatgaaatcgacaaaacttggtcatgtctcttttgctgacatcttttttcatgggccccggcttcttgtacggggctagtggctgagtggccatgtaaacactttctatatcctcagtcaagatggtaaatgtagtgtacctggattgactctcccggggagcttgttcggttttgccggtgaacttttccttttttcccattcccttgcctattattgttgctggaacgtttaccgtttgagcttgaattgcttgggtaatgggggaatttggcggatgtcccaatgaaggaggtttttgctcaccttcttctcgctgaatagcctcctcaagtttgataaagccttcagcacgatcgagaaaatcgctcattgagtctatcggactgttcttccttatgtcctt

SEQ ID NO: 109956 - DNA, 559 bp, Cannabis sativa
  modified_base (296)..(298): a, c, t, g, unknown or other
tcacaccctaaatagttctctatatagctatatttatatatctatctatatatttatatttatataattatacaattctattgttatgataggtgatgtaatcctttgagttttcaaagagttaatttttttattttcccatttttctttttcaaatttttattcattttctaattattttaattaattatctgttaattcatatttacattaattttatgataaataaagcttttacattcttaaaaaaaaaaaaaaaactattcaatatattcattttataattacaaaatttnnnttaagagacctttggttatacctcctcatatttgcatataatatatatagataagttgaagacataaaaaatacaaacactttgacacatatatgaggatggcaagggaaaagaattttaggaagaagattaaaaagattagaacaaattgccatggatgatcacatatgctaaaaaaaatagcattttatatgaggtttctttctaattatttattttctctattttttttttatatttatataatttttttattattat

SEQ ID NO: 109957 - DNA, 653 bp, Cannabis sativa
atctctatccaatggagtaggaagtccatggaggcgcacaatgtcttgcatgaaggttttactgtagccacggtgaaagggtgtctaagcttcaagaattgtgcatatttggacaacctatcaaccactactaatatggtgtcctacccttttgactttggtagtccctcaataatatccatggtgatgttctcccatacttgtgcggaaagcagaataggctgcaataaaacagctggagaagcaatgaggtatttatttctttggcaagtctcacaaccctgcgcaaacttagcaacatcagctcgcattccttcccaaaataattcagcttggagtctttcgtaagtttttagctcgcccacatgtccacccatgggggtgttatggaattcttgcaaagtagcactcaaaaagcttgatttttttgggatgacaaggcggtttttgtagtacagcagtcccttgtgtaagagaaacccatggtggggttggccttgttggatgtcggtagaattcttagtcaaaaaattgtcctaggcgatctcttcctttaatgcaagccataaatgccactcggcagcaactaagacttgctgaaactcaatagttggctgcctataaagggcatcagcaacgcagttgctcgctct

SEQ ID NO: 109958 - DNA, 607 bp, Cannabis sativa
actggctaaccataaacaaggacatccatgaaattgtcaagaagtgtgataagtgtcagagatttttgcatatacctcgcgtcccaccaacgaaactgagaatgatgaccttgccctacccatttgcaatatggggattgatctgattggcgcagctcccacaggacgaggaggagccaagtatggagtggtggctgtcgataactttaccaaatggacagaggctgaacctctagtttccataacttgcaagaaagtcctcgactttgttgtcaaaaacattgtctacaagtttggaattccaatgatgatagtatccgataacggaactcagttcgatggcaatttgttcactaagttctccgagaggaacaaaattatcaaaagcttctagttagtatctagacctcaggcgaatggacaagtggaagctgttaacaagaccttaaaggatactatcaagaagaaactagacgtcgccaagggtagatgagtcgacaaaatacatcaagtactttgggctcatacgacaattgagaagatagcaataggacatactccattctcgttagcatttgaatgggaggcaatactgcaagttgaagta

SEQ ID NO: 109959 - DNA, 736 bp, Cannabis sativa
ttgtgagtagatctaagatccctgtaaagtaatatccaacaattgaatggcgagtaaacttgttaaaccagatgtttgctgctccaacaagcgaggtggggaacaaaatacagcgtaaattattcgtcacattactcgctcgcattattgtattaaaattgttcaaattcgagaccggatctgtggttctgtcatacgacgagacatgcgggtttttaaatccctgaggaaaaggggtattcataatatctgagtgatatggctcaagcttctcgtaagtcgtatccagattgtctccctatttcccccacttgatatctcctgaacttgtcttccaactcgtctattcgtaattggatgggatactcttgctttggactgagttgttgacgaaggtcaggtttctttcgattcaagtgctctcgtagatccggttgggagtagttgctgacagacttcgtcttactcatagattgcatcctactcatagacctcgtcctgctcatggactttgtcttcgagtgactcacggatttactggtccccatgctttctcgatcattagctcgttgagtactttctcctcttcgagttgaccgactgtgggtccttgaccgcctcgaggtcacactttattcttcacgctttgttctttccccttgagtgtggtttgttgtatttccctattagggtctgtacaagccctcgctctatgggtttgggaagaacgttggtg

SEQ ID NO: 109960 - DNA, 728 bp, Cannabis sativa
ccatgaagacgaacaatttctctggcatataactcagcatactagtcaatgcagaaattcgtcgaaacaggtaggaagtgcgctgactttgtaaacttgtccactatgatccacacagagtcaaactgtcccgtggttctaggcaaacctagctaccacgaagtccatagaaatatcttcccatttccactctggtatgttcaatggctgtagcaactctgccgacctctggtgttcagcctttacttgctgacagataagacatttaacaacatactcaacaatgttactcttcatgcttggccaccagaacatagctttgacgtcttgatacatctttgttcaccctggatgatctgagtaaagagtcgtatgagactcatccatgatctcccttttaatatcgtcatccataggcacacaaacacgattcccaaatggaaacattcttatttcatccactgaaaaattggtagtcttcccaaccaaaaccctatctcaagttttcaccaattcaggatcttacaattgcatttctttgattcgttctaaaagagtagattgcagggtaatattagccaactgccccacaaccaactcaatcttagctcgggtcatctcatttgctagctgctaggagatttgtttcacagtgatcaacttactctgaccatttctactcaaggcatcagcaactacattttctttaccagggtgataaaggattt

SEQ ID NO: 109961 - DNA, 1313 bp, Cannabis sativa
ggattagatattgaaaataaaaaattttaagacaaaaatgggatgaaatggtgaagaaatgagggagacatggtggattttagtggtggttagcgagggtttcgtgggttttcagggggggtctggtgtggctgctgttatcatggggaataagaagacgatatataagggttttttgttaaagcctatgccgtcggttcctagcaaataaccgacgacataggatttaacaataaatcttaaaatttcccaattttcaaccgatggcataaggtttattaatatatacacctacagtttttaccaaaaaaactgcctctaaatgtcaatttcgaatcaggtgggtgtttccacaccctttagctttcctttttataaaataggttgaaaatagggaagctaaaggctcatattgtagtagtgagatcttggaacccaaacctggaccctaacttcgaccccggacccaaacccggcccctgatccctgcttcagaccttaacttaggactgagcatgtaaaccgttgggccgaccaacccaacctgaaaaataggccgaacatgctgtttaaaagtgggccgaataccaaatgggttcataaatagtaaacccatagtgtacaggtcggtgtacgggctaggcctttcctggcccactgaacccaacccacattaaattaaggcagaaaaaataaagggataaatagattatatacatataaaagcccttttctttctctatcataaattctaaccctaagcctagcacattttgccgcctacatctcttatgtggacaaaatctctctccctcagcctcaagtctcaagtctacatagctccatcactgtcacttccttggtagttcaactcttccaacaggacagtgacgacaccaccactacacgtcaatagcaccatcactatcttcttagctccaccaaaagaccaccacatctaaaatggtatatatattatattccaaaattttgttacacatttcaacactaactagtttcatttatcatattcttttattttattttttattttttagatgctaagatttgggtttatgtttatatatttgtaatattattttatttttgtttttcattttgaaagaaaaatggtattctagtccattgaaaatgtattttgggcattaaactgtgagaatgtggttattttcttcaattaaatgttccaactctagaaaaagagaacaaaggtttaacagtgaaagcctctgtgacagtcagtagtcccgtgattcgtaaggggaaacaccgggtaagctatgcaatcccac

SEQ ID NO: 109962 - DNA, 620 bp, Cannabis sativa
gaaagataaatcaacttggaaaaggagtcaaaataagtatgtagctgcgctggagtcaaaagtagatgatctagaatctcaacttgaaaatctgaagactatgttgaacaaccaaaacaatggcaatgtgatatctactgtacaggttaaataactcaaattttttttaataatttctaatattaacccaaatttgtactaactaaaattaattttttgcttgcagactttagatcgtggtgacattgccacatcttcaaatctggtttagttttattttattttgttgatttttaacttactattctatcgactatatacttgttttgttaatttattgtatatatatgtaggacataaatgctaccacctcacttaataaagaaactagacgtcaactttggttttcatctcctgcgtatgatactcctgtcattgaggtaactagtactcttatattatcagttttttaaaatattatctcattacttttgcatcacatttaaaacttgaacatacacaacaattttcatcactttattctcaaaatattctctacagtacttgctttgtcagtttgtctatatgtatgtatatgtatatcttatagttagcttcta

SEQ ID NO: 109963 - DNA, 1034 bp, Cannabis sativa
attatgatcttacttagggtaactattgagaatttatttaatgaaatataatatttttgggcccgacaattgtggaaatttaccgatgtggttagaagtgtcacgacgttaatggaagaattattttgagaatattccggattagtttagaaattttagaatgtcggtttaatggaattagtgaaattaccaaaatgcctctagggcttttttttaaaaaaaaaattatggaagggggtagattagtcttttggaaaattcaaattgtgcctttgaatttttttaggttgcagattatttttttgaaaaaaaaaatgaaaatgaaatgagatgaaatgaataaaaatcctatttaagaagaaaacttccaaggcaagaaaaccaaccttcttcttcctctctctctcacgtgacctagagctagccaaaaccaggggattcatcttaatttccttcagcttttgagcagattggatacccaagttcatcctagaagctttggaggtaagttcttttccttgaggattaaaaatttcactattttgggttggtttatgatgagggttttgggatttcgtggctttaggtttagtttgggttgagatgttgtgtttttaggtctgttttggagagtgttgaagtttgaatcaagtgattttgagaaaattgataaattatgatgaattagttgttgggttatgtcatgtttactatattatactgttctagaaagtttggttaggttttgtggaggttggatcagtttttggggtgaaaaaccagaaaatttcatggctgccaggaaaaaaacagtaggccgtttttcagacacacagaaaaacggccgaccgtttttcacagtagggggaaatttccggtttttctcctcaagttcgatctgattcggggtgtctttctgagtgaaattgaggtgttttagagatggttaagctagtttgatctgggggaaagtagggtgtgttcgattgtgagaattagagttgattatcagaaatttgattaagatttttatt

SEQ ID NO: 109964 - DNA, 612 bp, Cannabis sativa
  modified_base (34)..(40): a, c, t, g, unknown or other
  modified_base (139)..(139): a, c, t, g, unknown or other
aaattcatgctttaatcttgtacgaagattaagnnnnnnnttatagcctctcactattgattccatgtgaatcatccatgctaaaatatagtgttcatttcgtgaccactttcatccttaagtacttaagcttttaaanttcaatcataaaagattattttttcacacagctcaaattctcaataattgtgataccaggcttatcaaaaatacactaatttagacaccaaacatgtctcaattacacttaattttaagacactaagcatgtatcaaattcttatattcgagtatgaacccccacactttcacatttgactatcaagataatatcttgattttaagtatagaagacctcttaatctctataatttctcttgaatttaatttccttcttgaaattattttttccaaaatttgacaccaaaatatgtcaaaatttttgtagatgcacatagccaaaattgattttgaatttcaattcaataatcaaataaattaatcaataatttctcaacacattttgattaaatttgtggctcacgcccacaattctatcataaaggaaatttttcaaataactttaaaataaaacctctccatttttaatct

SEQ ID NO: 109965 - DNA, 3794 bp, Cannabis sativa
  modified_base (41)..(58): a, c, t, g, unknown or other
tcatgtgaaccatgccatattaaatgttatttctgatctannnnnnnnnnnnnnnnnnattatattgaaatgcgttttatttagggcataaaacccaacaagtttcataagctgggatcccgagttaaaaaccattatgaaaataaatataccatatatatttacatagcactttttttacaagccacatggcgatgtcaaaagggtgactcaaaatacaatgagacaagaaccctccaggttgcactgtcacgatatgtacaattcttaccgagccccatctcactactcctccactttagccttacccttacccacacaaggtagcaaactgatgaatcgacagactcggttagatatgcataaactatatataatgcaatatcagattgcacctaggccctcctgggcctaaatgcaaagctcaccaaatggttaagaacgttctcaacaaaagtacgacctttataccacatccactaccgactccatactagtgttggtagggccatattatacttttaggagttactgggtgttgtaccacatgcacttcgtacccacttgtactcgtgttggtaaaaccataactacccttaaaataccctctactgtactaacacacttagtcctacaactatttcagtgttagtagtgtaaataataataacatgcattcattcacatacatatatactttatgctaatcttaccttatttttgagttcaagtgtgccggtcaacctgcgtggaacagcagcttgacgctttacaggtcccaatatcacaaaatttgtaaacctaatgatgagagacacgctaacacgcttttcggggacttaaaatcaaaactagagattttcctatcgatgaatagcatggtaataccctaaatatcacaaaaatgggaaaaactagggttcacaaaactgccccaaccggcagatctgttccccaactagaatttcagttctgtggggtttcttggggaccaaccgaaatttttgttctaacaggtccccatgaatcggtcgaccggtttagtgcaggaaatcccaaaaatgcttccaacacctcaaatcaaccccaaactttctaataacctccaaaacacctgtatataccataatagactcaattcaagcaccaaaatccaacaattatctcagaaattcaaaacaccattagagaaccaagttgagttctcaaacctcaattttgcacaaaccttaccataattaagtaactcagcttaaaaccactcaaataatcctatcctaactccagaacacgaaatcaaatttattacacaaccacagaaccttaattctcaaaatcatgcaccaaaacctatcttgagctaaagaatatcaaagagaaggaggctaggatgttatacctttgattgaagcactcaaactctgcaagaatttcactgaaatgagcttaaaaatccagaatcctcagttggtttcttgatgtttcgaaagagagagaattgtagaaagagatggtaacttctaggtttttctaacttttgcttctaaaaagattaattataactttttattacataaataaacttattcaagttaataatgtttaaaaaatgacaaaataaagattctaaagaaaatgtccattttgcccattaacacaaaacaaaggcaaacatgccacctaagggtaatttggtcattttccaaaccctgtcaattttttgacacttttcatgtctaaccatgccctgctactaataaaattctaaaccatatgaaaatgtgactctctaatggcccaacgtcgcgttccactactaccgagcacaaatacggaaaataagaaatttcatacataacataattagcacattttgaattcaaataaatctccacaaatgtgtaaatcatgattaataacttaatttaataattaaatcctaattatttaataacccatcatactaaagttaagcggtctttacagccttgttcactgatatgtccaagtctctgatgctacagttgcatacctaattacaaccctttcaccatgcttgcttctccaactggattaattttttcttggagaacgtataaaccattgatctttttaccattcatcactaccaaagaacctttggtgatccttaagcttttatgcatggaattatatatgtatccttcatatttaagtgcacccagggatataaggttttgtttaagctctgggatatgccttatgcttgtcaccactggtgtaacaccctactagattaggcatattattgtgatttcttaacgatgtgcactccttttctaatcaaaggttttatgggaaaacatggataatttaaattttctttattaaactttaaacttgattaattaaacactttacttaatttgggatcccgtttgtaaggttacaactgttgtacaaaatatttagttacaaaagttgtcgtccagtgactaacaaaataaagcctgctaccccaaagattgaacactccatgtctatctgtcccgatatgtacaatattcatctgcttgtactcactactgtacaaccttaactttttctttacctacacatataaataataattttgagtcgacaaactcagtaagaaaagtataatcaaaacataaacataaaccagattataactagacacacatacacccaattataattctatcacgcgtcccacgcgtactgagtcttgtacaacagtactattgacgataatataagtctatactcggtactctagtcattaccgatatgatagcgtcaatcagtactttgccaaacatatatccgtcagtatttaatacaactctatgtacaccaataatgccattactaatatattatctaacaggtatttataaatatgcacgctaaacacgtaatcacatatggtagtattatactaatcttaccttgattccaaatttaggtgtgcaggtctacctgagtgggaactattgctcaacattttataggcccctaagttacaatatatgtaaaattgataagtgataatctaaatcactttttggggacttagtctaaaaactaaatgttttcctatcgctaaaaagcatgactaaaacctaattaccgagaaaatgttgaaaagtgagattttggaacaactaccccaaaaaattagcaagtcgtttctatgaaaatagtagcccatttttctgggttttctgcctagaagaacggtagaccgtttcccagaaacgacctgtcgtttctatagcagaaatggcccgaaatttcaaaactcaaccaaaacgattccaatctttcccaaattatccaaaacacctaattaagtcatagcaagcataaacgaccggaaaaattcatcatcaagatgctacaacaaaaaccactattaaaggtctaagcttgagttcaataactgaactcaagcttaaacacacccactgttgtggtaatttgcacacacaagtgtacgtatcgttaacaagtaataaactcaccaggagtgaggtcgatccgacaattgtagttaagtactttaaaattaaatctttacttctatttggctatataaaatctaagagaaaattaaactagaaaaaagagcaagtaaattaataagaaaaataacaatgattaaagttagtgtttcgatttcaattgtatcgattcattatggtttaatatgattatcttcctattatcaatttctatgcaacagcaggtttactaaggtaatttatagtcttctcagatatataaatctc

SEQ ID NO: 109966 - DNA, 1002 bp, Cannabis sativa
ggttttttgaccaacatttgtaacaaaaaattcgtaactctttacatgcatggaaaataccttatttataggcatttttggttaataggatgggctaacctggacccattagggttagtgatattgaataagcccactggtggggtaaatattgacttttgggtcgatttggtgaggcctggtgtagagacaattgtcgtttgtatgtgaatgtactattaatagcgacagttgggcatgaatcgtcagtttgttgagagaatgttagagtagtgggcgttggcctaaaaatgtgatcttctttttgttgtgtgtctttccgaggtctgacataggggacaagctgctagatttatcaagattcttgctatactgtgccatgtaggatggttcttgaacacttattcattcccatacgcctcttcaactacctttcctggatgacccctgagggtattcaccttcgcctatttgaattcttgttgattaaatgtgcaaaatccttacaaaaccatctgtccgacttagtcgcgaggaagccactatcggattcaaacactttgtccagttctactcatgagtggggtggtcaatccatttaggcctagtgaatgagcccgttaaactaaatggattgatttgaatatccacgtgtcacatatttaaaaacgcggataacatttttgaactcaaacaattctctttgttgttatgtctaaagacatttaaaataaaaacatgatcaaacttttcacgtcattgcttttgatcttgttctaatacatatttacattatgctcattattttgtaggacaaccatttaggtcaccatttataacttttgttttaacgtccatttgatcaatatgtaggttatgtataaaaggcaaaatgaacaaattctttattgaagttgtttgtgctattggcgcataagtatcaaaatatatcaattcattcacattgcctatattttaagtcatattaattagatctaattt

SEQ ID NO: 109967 - DNA, 594 bp, Cannabis sativa
  modified_base (55)..(59): a, c, t, g, unknown or other
aataactttttagttaagtttttttacgatataaattatagttatttaagatatnnnnnaaaattttaaaaaattaaaaaaagtttaacacgttaaaaactagattcaaatagtatcttgcacccgtgattattttattttataccgtataaaataaactgtttgaatattattttatatattgtaaattattccgaatttcttaaaaatttgtaagatatcttaaatagctacaatatatgagtattaaaaaaattagttttttccaagtaagtagatggtgcatcagtacactcctttataaggggtacattgtaaaatcatcctatatacatggccgaccttgagctaagacgaaggaggcgggtcgccttaggcttccaccgctcagggcccatttcagaaaaaaaaataaaatataattattaataaaataaagggaaatttgcggcaaaagtccccaaaaagttcagtttgatacaaataaatctccaacctcgaaaatagcagcaatagtcctcaaggtcatgtattttatttatccgttggtctccaagttaacagatccgttaaacccaattcaaatgccacgtg

SEQ ID NO: 109968 - DNA, 548 bp, Cannabis sativa
gagaatatctcaacaaccttaaaatatgtataacgaattttcaaattagatatttacctaattgaattaattaaataattaattaacacaaaaagacaaacgccatagggatatcaacaatactataggcgcttacccttgtctttaggacaaggatggtgtcttttgtcctaacaacttttgtcttgacaaatcttgtcttgacaaatcttatcttaacaatttttgtttttcttatttaattaattttaaaaaattatttgtttattacaaaaataaataagtactatttttccaatttaaaatttttttcgaatatatttacacaactctttatccctaaccctgacagtgtttcaaggtaacgatttggggaccatggacctataattctaagctccaataaactaaattatttttttgagtctcttcaacaaaataatcccttatttattaattctatgattactccactataaatataaaattaaactcttagtaattatataattgtatttaccgacttttactatagtatccattgatat

SEQ ID NO: 109969 - DNA, 521 bp, Cannabis sativa
  modified_base (204)..(208): a, c, t, g, unknown or other
  modified_base (476)..(477): a, c, t, g, unknown or other
aataacacattaaacaagtaataaaattaaatttgtttctttattgataattgaatagaaaagattacgtataaatagagttttatttagggcacaaagcccaacaagaaagtctacagatgagatggtgattactatgggcgtggagtagtgattttggagaagtgtacaaacctatttaaaatctctaactctaccagtgannnnnaatgttaaagttgtaggaaagatacttatttagtctatggaaagttctttacatttttggcatagtatcatcaatttattaactactagtgttacttcctcactaacacaaaagtagttaccaaaaagtaaagaattcagtttccctaaagagtagacatatagagaggaatttcacaatatcaaggattttgtgattgaggaaatgtaatggtgcacaaatggttgtattgaatacaacctatcagatcctattacggagagaatannacatactacacttgatctggatataaaggtgttgagattatttg

SEQ ID NO: 109970 - DNA, 640 bp, Cannabis sativa
caacatggagtacatcatgtctttgctcatgggattttccgatctttatgcacaagtgagaggtaacattcttgtcatggaccctttacctgagattaatagagtttttcatttagtcacacaggaagaaaatcagagaggaggacaaagtgtgtcgacagaccctaactccaacataacattttcctttcaaggagaaagaagctcgaggaaactagaacctcccaagaatcaaacccagaaatgaggcagacccttttgcatacactgcaacatgcacggacacacaattgagaagtgctacaaaatacatgggtatccaccaggatacaacaaggctaggaaatctaaagaggctgcagcaaatcagtttcagacttctaatgaaacttaaccaaatcctaataaaatcaacactcggatgcctctattgacaccaaaccactaccagtagcttctcaatctccttgcaacacaaaccacaaacctgcctcctactgatccaggaccctggataggtaatccaggtattgtcttgaccaattgctattttttgcctaaaaacaagccttggatagttgactcaggggccactaggcatatttgttcagacttgaatcttttccaaagtatccatccc

SEQ ID NO: 109971 - DNA, 835 bp, Cannabis sativa
  modified_base (152)..(155): a, c, t, g, unknown or other
tatttatgaattaaattatttgtggaccccattattagaaacgagcattagagttataatttctcaattctggagattttataaaactctaggggtattatgtgtcttatgtgtgaattatgcaatttttataatttttgctcggcgacaannnnaaatgcgatggatggctagtttaatcacatgggtaagtttagaaccctaattcttagtaggaaatatattagagaaaataaaatatcgggattaagcgtggttatggaatttgaccattttacccctagctttaaaaataccctagttttaaaagaaaagggcaatttagtaaattgccaaggagaatgatttggtggcagtcttaggtgttgacacctagtaagtaattttcagccagggtttaattaattaaaccattttttttagttagaaaagaaataagaaattaaagagaaaaaccaaaactcaaggaagctctcttctcccttcctctctctctctctctccgaagcagccttggaccaaggaggttgttgctggattttgtgttttcagcaaggttttagagggaatcaagcaaaggtaaaaccctagaacctttatttaagtgttcttgaagctttaattaagtttgagtttatgtttttatgttttgatggatgttagggttaggatttttatctttgttttctaagtttgatttgagttagaatgatgatctagcttctagttttgagctttggtgatgatattgctcaagtttgagctttgaagttaaagctttgatctttaatggcataaattgagttattgtatttttctgcaaaatactggctgg

SEQ ID NO: 109972 - DNA, 2795 bp, Cannabis sativa
aacattttatgcgtaagaagtgtttatgctcactggctgaatgtagacttctctttttctgcttcaccacaatgatagttttggtagctgccccactaaaatcaaggcaatgtcttcaatgtacaaacaatttaaaaatagccaaataaagatcataatctgaagaagataaaaagaacaggaaaagagaataaatagtgaaatgtaatctccattctaaactaattcttaatttctgacaaagtaagttctttataaacatcaagcataggaaagatcttattcaaacgtttaaaggaatgttctgatattgcttctagcttgagaagggagttggcgagccccatggcttcaactcgccaccctgcgaatccgattccttcaactaagagaatcaaagttgtttcatttggctggcaccctttcccaaccattgttgtgaaaaactcgatggcatcatcaatcctacgtgctttgcacaatccaagaagaacaatattataactgataacagatggccggaaaccaccactgtccatgtctaataacagtccaattgcctcatttaccaacccatctctgcacaagcaagatatgagtgagttataagtgatttcatcaggatcaatccctttgctaaccatctctgatatcatctccaaagccttaattctttccccacagttccacaaagcactgaacattgtgttgtatgagctgacatttggaggacaccccacttccccaagcttgtgaaagatttctaaagcctgctcagggttcccatttttacagaatgcggacaagattgtgttgtagtttacgatatccggcaagctaccatcagagatcatgtagtccatgaattctattgccaaatctaaccttccatctttgcagaaagcagatatcaatggatcataactataagcatctggggttatccccttttccttcatagccttgagtacattcacggcatcttcaaccttcccatctttacaaagtgtgctaatcaaaatgctgtaagtcaccacatttggctcgcatcctcttgaaaccatatcactcaataacttctctccatcattccatttcccatgattcaagagtgcccttaacaagatgttataagatattacatctggactacaacccttggcttctaagctcctaacaaactcaaaagctctatccaccattccttctctgcacattcccctgattatagcattaaaagtacacatatcaggaagaagccctcttgacaacatctcatccaaaagctccatagctttgtcaataccaccttcactaatggttgcctcaattaaaatggtgtaagtgatcacagaaggggcacatttatctttcaacaactcatccaaaacattaaaagccaattcaagcctccccctactacatagactcccaatcattatattgtaagtaatagtatcaggagaaaagccttgagcccgcattctgtcaagcactctattggctaattcaatcctattcgccttacaaaacccgctgatcatggcattataagaaaacaaatcaggctccccatgtttttccaaaatctccataacccggacagcattctgaacatccctagaactgaagaaccctctcatcacttttgtacaaaggataacatcaggcttaaaacccttagtaaccattaattggagaaagtaaagggcctccttgtacttccctgctctgcaagctctattaagaactttcaaaagatgaatttctttatatccataacggtgcaaaaggggtcctcctcctcttgttgtttcaatagaacccttaggagatctaaatggttttctgctgaagtctctacttgagctgaagcaatttatgtaaactgcacattctttaatactagagctgcggccagtgccacaacacagaccatcttgtttggaaaatctatgaagactatgaccaccaatcataaaactatgttgggtaattgtataccccatttctccacctacttttaagtaaataaacaccgaaaagaactacaaaagagcggtagagcatacactaatagaagggaaatggcatggccttaaagctgaaccattgattaacaactcgcttcagcttcctctaactccagcctaagaatgattttcacaatctgcacaaagtcaacagaaactacaaaaggtgacaatctttcagagttcaaacataaacatcacacagagaagacctttagcatcaccaaaaaacatcaacaaaactagaaagaattatgaccaccaccaacctcatccttgaagttgagagagagttgagaagtaaatgaatgagacattctgagaagagaaacagatcagagcaagaaggtcaggaataaagtattaaacaaatggaattagaattcaagacaccattttaaccagagaaaaagttgaaaaataataccttggaccgacccaagttaacacaatgcattgaaggaggagaagagaaggtcttcgtcccgtggaatgaattgaagtagatccgacggcagtgctccaccggagaaggagctgcagagttcacaactttaagttttcacccaaaaattgaacatttgaatgaggcacggcagtgacagagtctcctctcagtctcagtcagtctcagataaggatatgatattggatggatatctagtagtaaaggataggataataattctaacacaaaaacattttatattctttaaattaaaacttatttataacaaaatttgatttttcaattataaatat

SEQ ID NO: 109973 - DNA, 579 bp, Cannabis sativa
  modified_base (337)..(346): a, c, t, g, unknown or other
tctaggtcttatttggagtccgagtcctggtccagttacggttctggatcgaggtccaattttagttatgattccaagtccaagccctagttccagtccctgccaacttccggtttgggttccaattttgggtcacagggtacgtgttcgcgtccacttttcagtttgggactgggttcaggttcgggtgtggattcgggtcctcatcaaggttcaggtccagggcttcgtcccaaatcaagacaccgactatgtgttttgtccaagccctgggtcgagatccggatccaatcacgggtcaaagtctggttttatttctggtgtcgggtcacgagcnnnnnnnnnngttcaagttcgggtctgggtcaggtactaggtcccgggcctagttctgtttcccaggtccctatgctgattctgggtccaagtgcctattattgtgtgggtttgggtcccggtctaggttcggtttctaatcgtagtctcggttcaggtttaggtctttgtctcggttttgatctaggctcgggtttggatttttgtcctgctcctagttctgggttcgggtttgggtttagg

SEQ ID NO: 109974 - DNA, 1189 bp, Cannabis sativa
acttgattctcgtcaaagacactcctctgcgccatataagtttgcatgtgaatgtcttgttgaataagataattcagctgatcatgtgtgtactacatggctgggtcaagagggcgagcaacacgttgtggtacttcttcaacacgctgttcttcgcgttcaggaggagggttcggtggagctggttgttgaccatgtggatgaggtgctttaaatctaagaatcgttgccatgtcaatcatgcgttgtggtgcaaccttagtatcataggagtattgtggtaccccatatgcctcacacaaatcaatgataacatcagcgagcccaagtccaccccagcagcatccttcgaccatcaaagtaagactctgcctaataatatcccccaaattgatgttaaagcccttcataatggcatacacgtattttagactatccacttgagcatcaaaaaagtgcttgttagggttcaactcacaagggtacaactgatagggttccagatcatattcatgaaaccttaattcgaggtaacccaaagtctcagccatatcaacataatttaacttcttctcttcaataagcctttttagttgttgctattcacgggagaatgttggcaagtcatagatggcatggatagctctagtggaaacctgcacatcaacacccctaacttttactttgtcatccttcctctctggccagtaagcaaaaaattatagggctaaagtttggttgttcctctcagtgacatccacaaatttcatccatcccctgctaattacttgttctcttattggctcaaatataggagggatgccgattcttggatttctaagatcaccaatttccgtacccctatcttcaatgaatggcctattttttgagttgtaaatagcgctcttgtgcttcggcacttacaaacctcgccctattaacattagatcggcccgatgacctaggtgggttggatgaagaggcacctttctcactcactcttgctgttttgggtcctatcctcactcaatactcttaacacttaagaaaactcaagaaaattttcgacagcacttccccttaaaattcctctatttcggtgaatacccaatcaccaattactcaatcttcacttacaaataattttccacaataataaaccaagcaatagccaaaaatcacaccaagt

SEQ ID NO: 109975 - DNA, 581 bp, Cannabis sativa
tactaagaatttgtagtaacttgattttgggaatttgttattgaatgttagtaaaagggagagagggtatttggtatttggtttttggtttttttgtattggaatagtgttataaaggattttggttttggttttggttttgagtttgatatgatatatttagttttgtggtttggtttgggaaagagagaggagattgagagtgggatttgatgggagaatagaggggagcaattaaaattggccgacaaagatgatgatagtgttcaaaggtggccaatataaagggagtctatggaggcttgtggttatgatgatcacaactccatagactttttttattattctacatgagaaatggaacctaattatatatttcaatttaataactttatatataaaatattattatggttcattagtggtacttagtattatttaaaggcgtttttagttagtgataatctctaaattattaaattaaattatatagatttcgatacatagttacactaagatatatcttttagcatttataaggtggtgctacatcatcgtagtgttagtgcctaataataata

SEQ ID NO: 109976 - DNA, 643 bp, Cannabis sativa
  modified_base (206)..(206): a, c, t, g, unknown or other
  modified_base (358)..(363): a, c, t, g, unknown or other
ttggatccaatcattttctcctaattcctcacaatcgaaagcgacgaagctctgctcattttcttcttcttctagttttctcacatctccaaattacaataattactcccaaacaacgatcaaagtcttagtcaatttttttttgtcagtggtatatacattttgtattattgtatatatattttctatactatggtataccattnagaaaataaaataaaaaaacttggattgtgtattaattttattgtagcatacatatatttgtaatcaaagaataccaatctttagttttttctttcttttttatttcattcgtcatattataatatgtatttattcaaagaaccaccatttnnnnnnttttttctttatttttcttgtttgatatacatcagcacgtaaaaaagatatttttatagattaaatagatatcccatagtgtaaaataaatataccacgagcttaaattttttataagtttcttttttgttgtcttttatttatttttttaatgagataatgtaatgaataatatatataatgtagtaaaaattatatatacgtcaaatttaaactaattattagaaattgatacacatttctacaatactaaattaagtctagaattttctacacattt

SEQ ID NO: 109977 - DNA, 4563 bp, Cannabis sativa
  modified_base (98)..(107): a, c, t, g, unknown or other
  modified_base (320)..(325): a, c, t, g, unknown or other
ttttgcatttttatggaattctacatagaaattcctattccaattagcgctgcaacctacattgcaacaaaaaatcgtacagaaacccctattgcaannnnnnnnnnaaccactttagaaatccaaaccgtaaatttgaaaaaaaatgttaaaaacatagtatatggggtaattcccctaaaaatttacgttagttaatcgatgcaaacacaaattaacattattgtcagttgataattgatgcaaaacacgagagataattttttgtcatttgcagctgttaagaaccgatgcaaactataaaataataataataatannnnnnataataataattaaaaaaaacacagatttgaaactcctcgacctccacctacaagaccactctataccaccccaaacccaacccagccatgcctaacaaccccaactgagactctaccaccccaacaatccaaccccaaactcattctactagccaccaccaccactaccccaagcccagtctcacttgaaaaaaaaaaaaaagaacagagagagagacagagagaatatacctggcagaagggcgacgacgaccttcgaacggagaggcaatgatggtttttgggcaaacaggggttgaagcccgtgccaccacactatataacatgtcactgcataaataaatgtaccactgcactaatataacatgctattgcataaataatcgtgccatcacactaatataacgtgtcactgggtttttgatgatgccaccgcatccttaatctatattttatagacactacgtattacgctcacacgtctatttatgacattaggccttattaggatttatctcggttttaattgtcgaatctaacttagttataccttatctacacaactctccacatatatttaactagttatgtcttactcgcatatactcaattaatttatatattgtatggatagatatagaaactttaaggtaataactctaacttacttttctaactaagtattcacataacatacattattgcttacttaatcaaaaaaaatatactttaggtaataatcctaattcaccattctaaaaatgaacaatcatataacatacaagtgcaccaccatgctatactctatgtgcaaggtttgctttcttacttgaattctaaagtatgaggagaattctaaatccacatgtgatctcgagcaagtgtcggtattcctagtcacaatctcaggtttaaaccataatagggttaatccctaatcacatttattaaatattcacatttaggactccaactctggaccaagtaatagagctcgtagtgagctttccaatgatataaagtgttgaccttgcttctagccaataacagtgagtcaaaataaagcgattaaataagataaataaaagaaagcaaaaacagtaaagtaaaaagaacacaggattttagagaggttcggtcccgtgagaatgataatagcctactccccctgtatttgtattgacttgagagaaggaataaagtgttcttcctctctgaagctcttacaatggctctctgagttattttctctcttagatcactattctctcttgaatgtgtttctgaattaattctttcgttcccctccatagtaagcttatgccactatttataggggcttaacacatgaagaatggttttccttaatctataatgaataaaataagaaactatattaactctataattacaatatgaagaataagaaactaaggcgtaatgcttttatactctgactcgatttcatgattatacggattgtcttcgtgtcttggaagcgacaaaactgatctccagaattgccaacttatatgccttgcttgatatagataagtttgtatcttggtcagacgtcttctcgactatcctgtttggatatttgaatgtcaccgatattaagattaaccagtagtgggctgctaggaatacttcactccgtgcaggtagcaaaaatgtgggacacatgtcatccattctcattgccacgtcaaggtgcaaaaaataggataatattttcccccaagtctgtgcttcctggtcgcacatggacttcactcagctcagagtcttgctcggatgggtgatgcatgtcttcgatgatggatgttgatctgatgtgactctgactaggggtctcttcgatatctgactatttaatgcctattgaaagctatgcctcaaatcacgatttgatgtttgagcacgcttgacggttatattccctgcaatgagtaataacgtctacttttggggggaaactcaaaaatttgaattttgaaatgattaatttcctttttagatcgcttgtaaataggactaggaacctttggtgatccttttagccattttaactcttagaaaaccaaagcaaaattttccaaacaagttttatctcaaattcttcgaagaatttactggaaaactcttgacaataccatccgagcagagcaagaaaactttgaatcagtgagtaagttcttcattcctttcttttatgcactcgtgatgaaatgcatgcattatttttggattttctgttgtgaattttgcatattcttgaactgttctaggttaattgtagaacaactaggtttagggtttggaaatttaattgatgctcaaccctaatagctaattatctgactgcgcttcgattttaaccttaaatcgttcattcccactcgtccataaggttctgataagaaactaggttccaattgaggttttgaacttctgggactggaaattccatttctgtgttaaatcttttctttcgattctcaaccaagcctggtcggcatatacaatctatttttcattcgttactctgaccaactcttattctcttgtctcccatcttttgtagatgaaccctagtgatttttggggaggcaagcatcatatcaaccaggacttcttcaactcatgtacgaagaccaaccttgcctctgagctaatccatcttcatctagtgttgatctttcaaattctagtttcaaagattgagaagtaagtagcaagcatacaccttccctagaacccgaggtgcaacaccatttctatcccaagcagattcgtggtgagggatacggccgttttgtctgggaacttaagaaaggttagagatgttatcttcctgccagctggacgtatagggtccatctgagcgtggttgaaactttgcctgagggccgcccaatcccaactgttgaggaaaaatctattgccaaattttgtgtgaccattgcaaggcacagttttaataaagcgtcgttcaaacgtaaaatgatggcacgaaccaagcagactatcaaaaaaccttcatctaccgaccctcatatttcccgtctaactactctagccagggtggaataggcccgtcctactgtcaagggagaggacactactggagacgttgaagtccaggatgtggaggaccatggcgaggtccgtcctgcaacttcttctgaggccgaaggggatgaggaagcggggtagcttaggtgctaccttttgtggctacaatgaaaaaagagaacctgtgtctgagacaagtgatgtcatggaggttggctgagactatgttgacaaggagtacatagaggctcatcccataaataggagaggtccaaggggagctcgatggattcctccaccatttgtgctaaccatgaagagattaactagtatttttgaggatggtttcctagggaatgttgaatgcttccttccctctcccggtcagctagctagcgaccctagcgagagtttttaagcttggttggggccacacaccaaacagggtgcaatgttgccattgcatctgtacttcaaagatatggccaactactaccacataaatccaacccaattcacacctaagggccttaattatctatctactctgttcatgttgtacgcctctcaaggatgggatcagccatctgtccacaacactaactagctttgtaacctgaagtcgagccccaagagagcaagtttgggtacttttacttctctcagatcaaggagtcgtggctgacgggtaccacagatactgaggtgacgaagattggtggcttcgtggaggactactactttgtcaaggggatggacaccaagtataccagtttctagcatattctatcctactgccaaccttcattcatgctggaactcataaggagggcttaagaaattctccaactcccttcaaatgatcggaatatctctctcctggccactgaagccaattttttcaagtataagctctacccgtctgacttcgtaccaaaggtcgagtaggcagtaggggaggtagtatccgaatgggaggctccgagcaagaagaagaagaagaggaaggctcctccaagtgaccaagtacctattgagcaggccattaggatcagagatggtcttgagaaggttgctcgatcttctgccccggtggctggaaaggagaagcccattatggtcgagcaggaagaggaggattctgttggaaattatttta

SEQ ID NO: 109978 - DNA, 535 bp, Cannabis sativa
gcaaacaacccgaaagagctttccaaacaaaatgtaaaaccttaggaggagctttaatcttccacaacatcttccaaacatcatcctccataaaagagttccaactaccataaaccgactgtagatgattataggaacttttgataatgaaaaaaccagttggatccttgttcccaaaccaactatcactcgcaagattaacactcaaaggcacctgtttgatgagctcaacatcacgggaatcaaacaagtcctcaataagctccaagtcccattgtctactacctggcttcatgagttgagacactttacaattggtcagtgccagatgattagagaccacacacgggttacccccagacaaaagctaaggcgtgttaagcacctcagtagtttaaccaggtcctattctcctacgagcaccatctttgagcagcgttcgtgactcaaagatactacgccatataaagctcggattgccacccaactcggcctctaagaatgtacagttaggaaaatatcgagccttatatat

SEQ ID NO: 109979 - DNA, 640 bp, Cannabis sativa
  modified_base (566)..(586): a, c, t, g, unknown or other
tgtctattgagtctggtgattttgttagtgatgatgagaagatctcatcccttgtgaaagttgggatcaagaaaaaaattagtggaaagcaaccgaactgtaaaagacccgctaaaaaaatctgcacacacccgcatgtagatgaaaattgtgtttttttgcacattttttgtaatataattgtttttgttgtacactaatgaaaaaacccctatatatttaatattttaaatctcaaaaaaaaaaaaaaacttaatgcataaatttgtatgaaatacgatttaaataactagtgcaactctaatatatatatgttctgccaatatatatctatatttattttatatatattatttatattacctaacataaaaatcattatattaaaatagctagaagaaaaattatatattgcgaggattaattaattgttataaaaacatatttgtgggggctttttattaatatttagtaagagattaacaaattaattattaaaatatacattgcatatttcaaagatatttctacttttttgggaatttaagtgcatgtttggcatcatnnnnnnnnnnnnnnnnnnnnnttttaaaaacagaaaattgtttttaaaaacaatttgacttgtttggccttgttt

SEQ ID NO: 109980 - DNA, 608 bp, Cannabis sativa
gtctacttccggtttcggttctaattttgggtcacaaggtacgagttcgggtctaggtttgggtctgggactgggttcaggtccgtgtctgggttcgtgtctttgtttgggttcaggttttgggttggtcaccagatgcagacaacggctatgggttctgtccaagcactaggtccagatccgaatcacaatcttgggtcccagtttggttccatttcgggtgccgagtcacgagctgggtcctaggttcaagtccgagtcgggggtcgggtactaggtcccggtccttgttccggttcctaggtccctatcccaattctatgtcacaatcccagttctggttgtgtttttatcctagtctaggttcgggtttgagtcctagtcttggttcaggtttgggtctcggtctgagtttttatctgggttcgggttcgggtttaggtcttggtcttggtccgagtcctagttcgattcttgttctagttgtgattcagagtttgcgtttggattcgagtttgggtcggggttcaatccctggtctgagttttggttcgggtccggattttgttctaggtctggatcaggctccgagtgtgggttcgggtcct

SEQ ID NO: 109981 - DNA, 686 bp, Cannabis sativa
atctaataaagttttaacaataacaatacaaaaaaaaaaaaaaaaaaaaaaaaaaaaaatttattaaagaaaaaaaaaatttattaaagttttaacatcataacatatatactaatcatcaactcattatattgatcaattgtctctaaaaaataatgtaatatacacatatatttattcttatatgaaaaaaaaatcatattgtaaaaattcgtaactttatactatatagtgcggtgcgggtcgaaccgtaattattaaattcaaaactatacgcagcgcaccgcgcggtttgacaaaaatacaaactacaactgcaccacaaaagatttcaaattgtattttttatgcggtgtgatgcaatttgtgtggtgtgagtagtttggtaatacccctaatatatataagcccctaaatatagatatataggagaattatgtgcatagaataacatgtaaattttaatttgtcataatcgattatttaaaatttattaaaaaattccaaactattttagaatctttagcttgaaaagtaacattagatttcgtctaagaaaaatacactacaaaaaattatactttcaacaacaaaacttgtgactaattagtaaaaaaattgtgactaaaaggtccgtgactaaaggtattagtcacaaaattaaaatttgttgtgactaaatgtat

SEQ ID NO: 109982 - DNA, 1005 bp, Cannabis sativa
  modified_base (365)..(368): a, c, t, g, unknown or other
tctaatcacactgatgtggtagcacttaatccatacttctgatagcctagcatatatctgatggcatcccggtgcaactctatgtactacccactgttgccctgatatgctaatctgatgactatataaaatttgcctaacatatatctaatatgttaatctggcggcaactaacatgtacgctaaacatgtatgagcatatgcatcatattatactaatcttacctcgattctaaattcatgtgtgccggtcaacctgagtggaacaactgctcagcgaattacaggctcctaaatcacatcaatcgtaacattggtcagtgacacgctaaatcacttcccgaggacttaaacttgaaactaannnnttccctatcgataaataacatggccataccctaaacaacacaaaaatgggaaaaaagtagggttcccaaaattgccccaaccggtagagcggttccccaaccggaatttcggttttgggaaaattcttgggagccaaccggaattccggttcctacaggccgctctgaattggaattccagttcagagcatgaaagaccaaaactctcatatctcaaccaaatcaaccccaattcaaatcaaactttccaggcctgctatttagaccataaagaacaaaacccaagcaacaaaacaaccacaaaacctcaaaatcaaatttcaccattaaagaccaaagtttgagttcaaactccaaacttgattaaaaccaaccaacaaccactagaacctgcttaaatccatttatctaaacataattaagctttagaaaacaaaacaaaacattaacagcagcccaacaacataatcaccaagcatgcaaaaattcactttccttatacttcaagaaaataaagaggaggtgcaagagctataccttggctttgatttactaataattagctgagaaagacttgaattactgggaaaaatccaaccctagtagccccaagaaatttgcgagagagagagagaga

SEQ ID NO: 109983 - DNA, 784 bp, Cannabis sativa
  modified_base (160)..(161): a, c, t, g, unknown or other
  modified_base (231)..(231): a, c, t, g, unknown or other
acaacaaaacttgtgactaaaaatgaaaaagttgtgactaattataaattatcattcctatgttgtaactaaaatatctgtagctaaatattagtcacaaaaattacaatttattgtgactaaatgtatttttagtgacaatacttgttgtgactaaaannaaattagtgacaacttgtatttatatactatgttttaatcacaaggaacattttgttgtgactaaaagtnacatttagtcataaaaaaattatgttgtgactaaaaagttgtcacaaaaagtagcagttttgtgtagtgacttctcacaaacccacattggtcttgtcgtgccaagaaattctttcagataagttattttggtcttagttgtatctcacttgtagcgacttctcaaaaactcacattgttattgttgtgtcgggtattagagtagagagatgtcacttgtgaatgtttatttctcttattttcttctcttacttgttttgaatttgtgatgtccaaattattagcggtgcttaaaccttctttgaaaatatctttatcaaaaccatgcacatatactttataataataatataagtagaagatggaagcaaactattacttctctttcatatggttcttatggacattttgttttatgtggtaattaaccaaacaaattgagtaacataaaaaaattaaaatgataatgacacaaatattcaactaaaataattctaaaaatgtaattttataaactgcaagtggtaaaagaaaaaactaattcattttgtgg

SEQ ID NO: 109984 - DNA, 519 bp, Cannabis sativa
tatgattagtctctctattatcttcattggaattacaagactcaaccatattgcatgtattctcaatatcggcttgattagaagacttataaatatcaaacttaatttcttcatcattaacactcaaggttaagtggcctcttcgaacatctataagtgcaccaccagttgctaagaaagggcgcccaagaatcaatggcatatccttgtcttcttccatgtctagtaccacaaaatcagctggaaatactaacttatccactttaattagaacatcttctattattcttcttggataagtgaatgatcgatccaccaattgtaataaaattgttgtaggctttacttcaccaatacccaactttttgaatacccaaagtggcagtaaatttatactagtcccaagatcacataaagacttctcaaattttaaaccaccaatctcaaaaggaattgaaaagctacctggatctttaagcttttgaggcaacttcttctgaattatggcactacattact

SEQ ID NO: 109985 - DNA, 723 bp, Cannabis sativa
cacaaagtccagtgacaagaaagccaaagattgggagatctaacggttgggaatagggcaaaatatgaagaggcgattcataattacccttgaaaccatacaaccgtcagaatcaaaggatgcgtcttttaaaaaaggggattataacaaaaatgccctttgtaattattaaaaagcacgttttactaaaaaagaattttttaaggggcaattgttatacccaagattcagctgccatcttagtggaaaacatgtgttaagataaaagggaatatggatcgatgcaaccactttttacggaataactcattaattacataagcatcagagtatatttgtaacctgctggctgtaaagttttaggcaaggaaaaaatacacaaactgttgcctagtatattagcaagaaactatatgtcggttaatgtgaatagcaaggcatcaagtactttacatctaggaagacaaaagcgacacatatcgactgcgaaaacccttagtgtataatgtacagactaagtgtgacagtcgggttggctcgagacctagcaagcgagatgcctatctcgctatgggaggacttcctgtaactttacccagttaacttcagacattttctcagtaaggcttacaatcctgacaaagtcagaagctaacagtcgaaacgggcctcaaagaatccatcgtaaataataacagcggtcatcacaagacgtgcatcgtc

SEQ ID NO: 109986 - DNA, 877 bp, Cannabis sativa
aaatcagaggtttcaaaatacatcattggtagaccccaacccgcttgttatagtatggcccgcacatgtacaagcaccgccaagctctcgcactcatggctgatcacagactgatttaccctttcctgcatagtagagcaccagtgagccaagtccatcaagacaatatagatatcaacatatcgcatatataataatatcatttcacttattgtctatttgatatagacttgcgtgttacgctcacacgcctatatatgtctatgtggcatagacccacgtgttatgctcacatgtctaaatacaataaggccttagaacggttcatctcggttctaataaccgagtccaaccaaattatgccttgaacacaaaattcttaatctcaacatatatagaatgacatagcatttaaacatcaataatcactaaggtaataaacctagaccatataaccgctcactttagggtaataaccctaatcccagtttttaattaatcataattataatattcaacatgagcgccaccgcgcttaactcttcgtgctaactacctgtgttacctaatgttccattaaatgtggagattccaaatccgcgggtgctcatggccaagtgccagaaatcctagtcacaattttcgagattcacaaatagggttaatccctaaatccattctcatataattaattggcattcaaatccaaaaaaaacatatagagctcagaacgagctttccaacaatactcgaaacatccaaaatggagtctagatcactaagggtgttcataaaaatcgataaaccgaaactgaccagaccgtaaccgaatttttgattccacatcatcaccgaatttggcggtcggtttcagttt

SEQ ID NO: 109987 - DNA, 643 bp, Cannabis sativa
  modified_base (81)..(88): a, c, t, g, unknown or other
  modified_base (157)..(158): a, c, t, g, unknown or other
tatactaatcttacctcgattccaaattcaggtgtgtcagtcaacttgaagggaacaatctgctcggcgaattacaggctnnnnnnnnacatcaatcacaacactgataagcgacacgctaaatcacttccaggggacttaaacttgaaactaaaannttccctatcgatgaataacatggaaataccctaaacaacacaaaaatgggaaaaactagggttcctaaaattgccccaaccggtagaccggttccccaactggaattctggttctgggaaaaattcctggaagccaaccggaattccggttcctacaggcctctctaaaccgcaattctggttcagtgcaggaaagaccaaaaattccataattcgacaaatcaaccccaattcaaaccaaactttccagacctggtctatacactctagagaacatattcaaggtaacaaaacatccacccatacacagaatcaaaactttccattaatgagccaagcttgagttcaaaactccaaagcttgctaaaacgacataacaaccagtaattcaagcataaatcaacataataaaccataattaaacctctgaacacaacaacaatcaactacagcaaccacagcaagcaaaacctcaaagcatgcaa

SEQ ID NO: 109988 - DNA, 1089 bp, Cannabis sativa
gtgctaacagaacttgagtttagggagttttaccgcaaaaattttagaattgggggttagttgcaaaaacctccctactttagggggttttgctgcaaataacccatcatataatatctaaattatttgtgcctctcgttcatatttacttaacttttatttcatcttgttaatctagtgagtgttggccacttttcagcgtcaacatgttttctttgaaaaattaagagccaagatgatgatcacgactcatattcatgggatgaacatgagtcttgataataataaaaaaaaagatatggaatacataatagattaaatgatatgaattaactcaatataatacaatgtcataataatatgtatcaaaaccgtaggagataaaaaaatatgaacacaagtaaaaggaatgtaaagaaaaagattagagttagaaagatgtaacccaaattagtacccaaaggctagaaacatttgataaatgttgtctaaaatctctattcctaagcctccattgatgattgaagattcttcattatcgatgagaagcggaatacacaagccttgtgaaatttatggaagtcaagaacttcttgataaacttcttggagagaacaagtaacattgggaactagagaaagaagtgtttttagagagatgagaaaatgtgtacattaaattctaactctcataaatcttttatatacagtgtagaagtcgtcttagctctaaaccaataggatcatgatactttgacttaaatttggagccaaaaatgcaataaaaggaattgctaataaatcaacttttatgaaccaagtgacatgttacccactagtaggtgacatgtcacctagaacagtttgacagattcctaattacaaaattgcatgtcccgtgcaatgtgttcatgtagtttgaccaaggcaatatgcggcacgggcacacattaattgtgtaaatgtcatcttcgacatctccaaacgattcccaacttcttgagcaactttatacactctataaggtcaatttaaaccccaaaacataattaataattatattttacactatgtcaaagttcacatactc

SEQ ID NO: 109989 - DNA, 515 bp, Cannabis sativa
ctgataaatcttcaggacctgatggtatgaatcctaaattctttcaaaaatattggtcaattgttggtaatgatgtgatcaatactgttagaatttttttctgcaatgaagaaatgccgaaagggatgtatgatactaatattgtcctcattcctaagaagaagaagccggatcgaatgagtgagttgcgtcctatctctctttgtaatgttattgctaagataattaccaaagttcttgctaacagaatgaagggattattttccgagactatttctttgaatcaaagtgctttcatccctgggagattaatcactgataatatcatggttagttttgaagttttgcactatttaaagagaaagcaagtgggcaaggatggatacatggtgctgaagttggatttaagtaaagcttataacagagtggattggcatttcttgtgtgctatgttgagacgaatgggttttgcggataaatgggttcgacttattttcgggtgtctttcatcggtg

SEQ ID NO: 109990 - DNA, 1061 bp, Cannabis sativa
aataatttccaacacttttacggtagtattccaactatcctgaaaaggtataatattgaccccttaaaaaaatgtgggactcaaatatttcctcagttatattaacataagattaggatttttattaaataaaaaaatcaaatattaaatctgaataaaatagaatacgacctgtaaaaaaattataaaaaaaattatataatgctctttcttctgccattactattatccatcatcttcttctccttgctcattcgaacaataataaattagcacagcttttttttttttttttgaaatttggcatcgcactgctccctcattctagcttcggtcgctggttgttgcagtttgaattttgttcatcatttggaataggttagtgagttctaaaatattggatttcttaaaatatactgcacatatatatatatgtatttttatttaaatgaatcgaaattattggtgttgaagttttttctgatgttaatatatgatatccattatttgaggagttgggtcatctttctttccgaatccaacaacgacagtgaacatatatatatatatttctaaattattgttgttatcttaatatatatatagatttatatacaataatataatatatatatacttttaaatctttacttaaatatatatagtataatatatatgtgtattaacataaaattacctcaatatatataaatataataatatatatatacttttaaatcgtcactcattttttaaagcaatcgtcagtcatttaataatatatagggttaattacacatcctaacgtcaattcaaaattatttatgaaattatctccaactattttattgtttcaaataccgttaaaatcttttgtattattttaacacacgtaccgagattaaaacatgagatttttcccaatctctcttacttttctgttacattttctcactctgtctctcactcctcgctgatatatcagaaatgggttagtggatttttttttcaataaacatggcatattatagtctttcattctttattttttttaaaaaaaa

SEQ ID NO: 109991 - DNA, 1347 bp, Cannabis sativa
aaaagttggtgtgggccaactttaagtaaaagctataatgaatttcacgggaagctaaaatttgggtttaatgaattttttagttgacccaattaccctcattcaaattaaaaaattatcattttacttattttttttttcattcgtaaaatcaacctagagatagattgcggctcctcaccctcaatcgtaggagtcttctccatccccgatcacccacgccgccgttcgccaactccatcatcaacaactcctacacaatcaaggtttatctcttaactcttcccttcaatgccatgaaaatattttttttttatttttttctcctgtcgaatcaatttttttcttcaatttccttagtctggtgtgtaagagtcaattgggttctatgagaaaccctcctttttttgcttttcgcgtgtttcctgatctccaccactgcaatacaagttttttcctataaatatataagctgggcgcactcactttccgtacactgttattattgagaaagaaatttaggttataaatacatattgggattaggggttttatcttgtaaagacatggattagaagtttaattaacttatttttaagttggggattttagttttatttgtctcagaattatatcaggcattatttatacataaggtgcaagtaatgtttagttgcttgagtttcttggatagaacagttttgggtggagaattaatgtttaaatcttgtctaaagggctctgcttagatataattatgtgtacaagtggggccatcatgatatgcaaattatacattacatatgttgcaaattgtagctaaagccaacagtgaagctaaattttaatggagtgtgctttttgcaagcttctgtttaaaaaaaaatcggcaaaaaaggaatactggtatactagtattggtctcaaaaaaatcagtgtctctggtatactggtattggtattttagtgagtacagtttgtgccaattcaaattgtttagtgttactgcttactttgtttattttctttgtattgacaaagtcatattgagtaataataacaaacactttaatccacaaaaaaagaatactgatatatcatatcaagtgtttacattactttggtcactctttaaaatttttaggtacccaaatagaataggatgatgatgatgctttcatcataattattgtatgtttttcgtgttagattagtctttagttttatgactgattattttagtttttacttcttaataaaacttattattttaatttaattagatggagaaagaaaaaaatatttgtactaaaagtgatgtagcagtaccacgaggtaaagcaatat

SEQ ID NO: 109992 - DNA, 676 bp, Cannabis sativa
gaccaacttttagacaccatagctggccatgaaatcctgagtttcatggacgcatattcaggttataatcagataaagatgcatcaaccatgtcaagagcacactagcttcatgatggacctaggcctataatgctaaaaagtcatgccttaagggctaaaaaatgcaggggccacatatcaaaggctagtgaacatgatgtttgcagatctcatcatccgcaacatggaggtgcacgtggacgacatgcttgtcatgtccaaaaaggctaggggcatgtggaggacctaggcgagtgcttcaaaatccttcacagctacaacatgaagctcaaccccttaaaatggtcttttggcataggcttgagaaaattccttggcatcatagtcaatgccaggggaatagaagcaaacctagacaagatccaagccctttcggacatgaagtcacccacaactgtcaaggaagtacaaagcctaataggaagcattattgcattaagtagatttgtgtccaagtctacagacaaatgggtacccttcgtcaacattcttagaggcaacaaaaaatttgagtggatagaggagtgcaaaaatgcatttcgggagctgaagaaataatcggcccaaccactggtcttgtttaaacccctggacaaagaagagctaggcatgta

SEQ ID NO: 109993 - DNA, 702 bp, Cannabis sativa
agatatgtagaagcacttttggaaattaaaattaccgccaaaattcattcactttgcttggcgactcgtgttcagctacaaagcaagcatgtttccgttgaatctcattgtttgttatgcaatggagttgctgaaaccacttaccacctgcttattgactgtcctttttccaaatcttgctggaacagatcagtcgtggctctgccttcatcgactgttgctgatttccacgtctagtttgttgcaacgtggtctcggcacaagggtgatgctattgaagagattttgatggtcaactggtctatttagaaagctcgcaatgagctggtttggaacaactgtacacgttcgactgctgaagttgtgtctattgcacatcaagttcttggtcaatggaaatatgctcaaacatgtcgttttgagccgctgcactttaacactgattgtggtggcaacaagaattcttggactaaacctattgagggaatgatcaagattaatgtggatggagcaacttttgaagctgaaaatgcatttgggattggtttcattgcttatgactcaaatgaggttgtcatcttggctttttcgacccactcaattggttcctcaagtgctcccatcactgatataatgagcatttgagttggataaatgcctctaatctttcgaaaattgttattgagactgattgcattattg

SEQ ID NO: 109994 - DNA, 3683 bp, Cannabis sativa
  modified_base (3222)..(3223): a, c, t, g, unknown or other
gtggtttcaacaatcctttcagattgttactagtccatggggccacgcccagagataagattcattagatagatctcaaaagtacaaagtaattggcttatgcataaatagactccctcttattatatgttgcaagtttgatgtattccaccttctaatagaatcttgttgaaacttcaagtgctcgaactccctttgatctccttgaagagtgcttgcttcctcccgaggcaagacttgaaaaacaatctcccaaaagctttgtaaaaccttctctcgaaggtagcactgttgttcttcttctttgtaggcttaaacacagactcaagacaaaacaaaatacaaataaataaagtaagagtcgaacacactcttctctgcaaaacaaagactctcttttctaaagatatgagtgaaatataaagatacaaaagaggtgcatgataaagatacaaaagaggtgcatgacctagctgctataaggtgtatgacctagctgctataaggtgtatttataatcaatatacaccttatttacagctcacacacggtctgagaaagaccacaacccactagaaatttcgcaaaaaagatcttcaattagcctaagaatttctatttctgtacctacagaattgtgagcagtaagtgcgactttccttttatacaaaaggaaaaatttgctccagttttctcctcaagaaatctgatcaaacaaaatagaaaacttacacaagattagaatatcacatttggatagatagaaaataattgagtaaccaaacttaccatttttaccttattttttataaatagaaaagctacacaactttccttccaaaaataaattgattaatataaaagtcaaatacaaaatatgaaaaccaatgtaattactctagccgaatttaaacaataataacaaaatatttttgtcacattgaagattccaaaaatagaattaacacacataatattattatttaaaaattattttatatttattaaataatattttaaataataatattaggtgtatcaatataaaatgacacatggataatagtaaatataagccgtctatattaatagttaactgtgtaaaatagatgacaccttaaatttacaagcagtttagtagtttggagggttttactatcaaaatttgagcttagagagttaagtgcaagttgagagataattgaaagggttttactgtaaaaaactcataacattttagaaaatatcccaatttttaaaaagtgaaatatcccactttaatttcaaattaaatttaaaactaagctatctccaaatatcaaagtttgaaaataattgtaaatattttttataattaaaaaatgtagaatataactacaaatgtcataccataaattattcttaaaatagttgcagtaaaatattcttaaaaaatattattttttaaatttttttaaagcactcttaaaattttaatttttttgaatggaaaattttaattttgatatagggtaaaatctataacaacccctaaataaaattctaaaattttcttcattgacagaaacaaaatatacccagaagaaaataagagagaaaactaaaaagaagtgacacaactatgaaaaaatgaatgtaagacggtaagagtaaatcaagtaaactcattagatcttgctcctattttcccaacgcacacaaagagagcattaatcacaattatataaatgagaatgaacataatttcatcatatatttttagcttaggtactataacaagcatctcaagtatcaacaacatttcaaaagataaatttcaatttatcatttatcaaacaagaaatcaataaacataaatccaaaaaaatccttaacaagtataaaaacaatcagctaattatattaacaaagtagcgaaaccgacttaatgaatcaaaaacttttttaaaatacactctgataatgatataacttattaaataatccaaattaactaatctacagctccaagagctctcttgcaaagtttcttaaaggtaaaatatgtatatccgctgcagctagtggaacctattgaagcattaatatatatttgtattatatataagactaagtaattatatactctcaaatgccatagaaaaataaaattaggaaatacttgtaacatctatcttttgtggaccaatcttgtgtttgtttaataaggaaagtgaaataaatctttaccaataaagtagaaactttgctgatttcagtcaagtaatatagctcaaatatacatgacaaactatatagaagcagataaaatcaataccaaagttaatatctgtgaatttctgatgtagtctacagatgaaccaatatgatggacaatgcacctctcctgcaacaaaatagatttccaaattattgaatgaatgataaaagcatggtataagagatgcatacacaagcatagtgtagccgaactatcaataatcggccctccatcccctcctaagtaagaaacttgtgaagaacccaatcttgagatttcgccgaactataaaaatcggacctagcgtttgtgacgattcagcctcctcctccaaggacagaaatggcgaagccctcctcctcttagtcaattaaggtgttactttctccccaactcgttaaagaagttctgattttccctccaataatggccacggaaaatctgtttttctatttatactttatttgggatattgagttgggaagaaaaatcctcggatgcttattattctgttgataatttttagaacttctattcaatatttcatggaggagctcttgcagctgtagccgagtgtagccgatgagagtctttgggaagtaaaatggagcttctctcagggtaaaatataaagtaaaggttgaccgggctcgtaaaccgcccaaatggaataacccgcctaaaccaaactcaaaaaacccataaaaattacaaaccgaaataacccgaaaaaattacaaaccacccaatctattaattgggcgggttgaaattaggtcccacccgcccaattaagccaaccaacccgaccaacccaattttggattttaattttttcttttaactttttagtttttattatataacataaatgattaaatatatagtaatataaagttatatacttaattgttagttttaaagtaatatatattgtattgtactttggtggaatgtgatanntttaatttatctttttataattttgactttgaaactaaaaaaataaaaaaaaagtttggccagtttcgccggtttgggcgggttaacccgaccaaactgcccaaaccgttggtcggttgatagattttttttttttttttttgtaaattgggcgggttgcacttcaattttagcaatctgaattttagattggataaggataaaccgcccaaaccgaccaatgtacggcccattgacagaaggtgaatgtcttttgtttattttcattaaaaaataatgaaaatgttaaaaataaatcattaaaccaataaacaacgttagacagctacattttatatataaagatatattaattcatattttttttttaggctaattatgatttttgcccctaaactttgacatgtaccatatcatgcccaagatcgtcaaaaatactccctgaactattgagattgtt

SEQ ID NO: 109995 - DNA, 656 bp, Cannabis sativa
ttaacactaacttagttaataaattaagtacatacttcatttgagatagaaaaatacattgtttactccgagtaacttcaactcccaagaaatacttgtgtacccctaaatccttcatgtgaaactaggtatgaatgaaagacttaagagatgaaatgccttcagtatcatttctagtaataacgatgtcatcaacatacaccactaacaaaatgatataagcagttgatcttttatagaacaaagaatgatctgacttacttttcaacaaaccaaatttctcaatagcctaactaaatttaacaaaccaaacatgaagactttgtttcaatccatgtaaacatatgcaaagatgacaaactcgccgtaactccccttgaggaacaaacacaggaggttgctccatatacacttcttccttaagatttatgtgaagaaaattagtttgaatatcaagctaatgcaaatgcctttatcagtagcttccatggaaattaacaatcgaatggatgtgagtttagcgacaatagaaaaagtatcacaatagtccactccataggtttgagtagaaaccttggcaacaagacaggctttaagcgagcaattgtttgatcttgattaaatttaactgcaaacacccatttacaccctatggc

SEQ ID NO: 109996 - DNA, 506 bp, Cannabis sativa
acaacttgagcttgttttgcttgtgcagtcaccagctttgttaatgcctctacctgggctgtcaacttggttattgcatcaactgcatgcattcatgcaaccattttagttgggcctctctctgttgaccaatgttgattagttatggccatatcttcaagtaattcaaaggccccattagcactttttgtcacgaaagctccaccagcagcgacatctattagtgttcgggtgttgttcagtaatccagtatagaagttgtgcacttgtaaccacttttcatggcaatggttcagacacttcctcaataaatcctcgaatctctcccaggcttcataaaaaggttcattgtcatgctgggtaaagttgttaatttcagctctcagcttggcgatcttctcaggaggaaagaatttggagagaaattacagggccaattcctcccaattgttgatagaattggatggcaaagataccaaccaactcttggctcgctcccttagtga

SEQ ID NO: 109997 - DNA, 966 bp, Cannabis sativa
  modified_base (199)..(201): a, c, t, g, unknown or other
  modified_base (553)..(578): a, c, t, g, unknown or other
ggggactatgagcctatataatcaagcttccaataagtagctctagaatttaacagtaaattctctaacttattaattatttcttgcaccgctatagattcaaattatactcttaattatatagaacgctctatatattctacgatatagatatgctatgaattattcattgttataatcccaataattaatgatcctnnntagatgatctacatcgagtatggacaaatttaccattttaccgttcaatgtattttatccttaaaacacttagctacctgtagataatattttagtaaactaatataattactgaaatgagtactctaccatttatttctattaagccaagctcgaaggaaatcatcatttcacttctatgaatttatagaagctatagattttatttctatgattagcgctcgatcccacccaattgaactaccatgtccttaatctgtatgtcacgaaaagatccattggtcgactttaatgaataaatttaagaacataaataatacaattgaattagaacctaaccatctcaggattnnnnnnnnnnnnnnnnnnnnnnnnnnggtgatattgaattagatagatatgacgataaatttatgatatcttatccaagttcaatatcggtcccatccgatgtatactcaatacatccaatccaagcttactttaccaatgccttggaaaggacagaacacttatccaagcttggagtcggtttttatgaaataaccgactccataggagcttcctataattttttttcagctttaattaacatattttttttttgttacttttattaaaatctaatttttttttatattcatattattttattattaatataattaaattaaaggataaataaattaaattagaagttaaataaataaaaatttacattgctctaagtgtttttgtattagctatctttttattaatatttta

SEQ ID NO: 109998 - DNA, 579 bp, Cannabis sativa
  modified_base (308)..(308): a, c, t, g, unknown or other
attcatcgctggatcttcgtccgtttcacccaaggggatgacattcgggggttgttgcccgacagattgttaggctcttcgtatcagcacaatggcttgctgactatgattgtcaatctccgcatgatgagcccttaacgcttccatctctttgtccctccattcgacaaacatgcgcctttgctcctcgaacgcgagatttactgcagcgcggagttcctcctgatcatgatgtagggtgttagtatgaccctgcatgagtccaagagcagcacaaaggttttggatctcagtgtcatctccaatgnttgtttgaacattggtagcgggcgaaacggttgtgttatgaatgccctggttggctgctaaactagttttcccagtctcttgtacaccaggggcgatttcatccacaggagtcgtcacaccgtgacctgcgtttgacagttgtccgggattaacagttagtggaatccttgtgtttctcgggttctgcaatgcaggatccaccgcctatggatttgccggatcaaccacgcccctacgagtctctaccaccatcgtacttgtgattaaatt

SEQ ID NO: 109999 - DNA, 831 bp, Cannabis sativa
  modified_base (199)..(199): a, c, t, g, unknown or other
  modified_base (353)..(353): a, c, t, g, unknown or other
  modified_base (509)..(510): a, c, t, g, unknown or other
tatgacacaaacccgcgtgttacactcacacgcctatttatgtctacgtggcatagacctacgtgttacgctcgcacgtctatttacaataaggccatagaatggtcatctcggttctagttatcgagtccaacccaattatgccttgaacgcataaccctaaatctcaatatacacttatatataacatggcatagcncattcacattaataatcactagggtaataaccctagaccattaaactgctcatgttagggtgataaccctaatcttggttcccaattatccacatatatcattttcaataggtgccaccgcgcatactatacgtgctaactactgtcttacctnatgtcccgcaaacgtggagattccaaatccccgggtgctcctgaccaagtgccggtaatcctagtcataatttctgaggttaatccctatatccatttccacaaaaaataaaattggcattcaaattacatataatcacatagagctcggaacganntttccaacgatataaagaacgtcctaaacggaatcctgagtcaaaagttatggcaaaaataaaaaccctaaaaaaagaataaactaccattgtgatggtcgctactagacctatgatagtcgcgaccactgggtttaaaaactcagaaaacccagttttcagcttcaaaaaatgcatcaaaaacacaaattttcatgttaaaacagcccaagctcaaattaaactttcacctagcataagtcagataaatagagaagaattacacctaatttactctccaaataacaccaaaacatacatcaaaatcatcaattcatcatg

SEQ ID NO: 110000 - DNA, 553 bp, Cannabis sativa
ggataagctctaatacatctgcacatctgtctgacttacgctttctaaccttgatagtcaacttcccttttatacaatcaacataggcagtgaaatcgaagaaatcaagatcctaaagtacaacatctttcaccaatctttccattctatctttagaaatatggcctaaatattgtgccaaagcatggaagattttaactttgatcttgcacgtttagaaccaacaacaacattaagataagaagaaggacaatatgaataagtaataggaacaacatcatgtaaatcaagtttatataagttccacataaagttccattttcaactaacatagagtcatgatccaaagtcaattttccatttcaaaaatgaagactataacttagtctatccaaaatagatatataaatcaaattcctcctaatagaaggtaataagaaacatcatacaagtccaaaaaatggcctacagtttaacagttctaaaaaattcaactttaagggatgttataccaccacctttttttataataggttcggtttgatatatagag

SEQ ID NO: 110001 - DNA, 1179 bp, Cannabis sativa
aactaattgatttcttatcaacactattagtaactaaaaagttacttttaaaaatgaaagaaaataaaaaaaaaaaaatagaaaacttcaggttagctgatgtggcatgttagtaatagtagtaatattattattgtaaattagatgcaaaaagtgtaaccttaaatattaaatattattattgtataatttaatatacatttaattagctttaaatattatttttgaaattaatgagttgtcatgtaacataatttactatttttatataataattattttatatatatttttgttttttttttgaataatatatatatttttgttattttgaaagagaattataattaatttaatcactattccccattttctcttttaagtttttttgcttgaaagttggttctttggggattttatctaaaccaaaaaaaaaaaaaaaaaactaattagttattttatagtataatataattttttgaatggaattataaaatatatgttaattaagattttaaaaaatataaaataaattaatcactatattaataattaaatattttttttctcctgaaaataacaaaaaatatatactttttacattttgaaatgaacgaaaaaataaagatcaatatagattttgcccttaaactttgatatatactaaattataccacttgaacttttcaggtcgttaaaaattattccaaactattgagattgttggacttaaggatttttacccaattttactaaaaaaagtctgacgtgaaaaaatatttaaaagacaatttaatatatgctaaagtttaggaggcatgatagtatatattaaagttcacgagtataatttagtatacggagaatcgctacattataaaaattgaatgaaattgaacagaaatctttaaattttataattttaataatttggaaagaatttttaacatcttgaaaaatttaaaagacatgatttcatgtatattaaagttgaaaggccaaaaaatccaatttaaccaaaaaaaaaaaaaatatcaagataaggcgaaaaaattaaaaaccactaattttgacaattagatccttggtggtggttgatgtaaaaatcccaataattaatccattgcttgcggagtagtgagttttgtgggtgaaaagaaaagagtttgatcttagccg

SEQ ID NO: 110002 - DNA, 1717 bp, Cannabis sativa
aatcactgaaatagtaaaattgaatgaaattagacaaaaattcaagagacataatttggtacatatcaaagatcaggggcaaaaatcctaatccttgtttctttttaatggatggattggtaatttagtactcattgttatcattttagtcattgctgtaatttaatttagtaatgagttgtaaatattatacttatttacaccaattagtgtttgaagtgctctttaatttttctctagcagctagttatgtcatggaaattaattcatttacattgtcattgtgtacagtgtacgtgtctccaatgagcttggtaggaaacgtccaagagcagccaaatactcagtatacgtgaccttgtttcaagctttactaataggactcttcttcatgatcgttgtcttggtagccagacaatacctggctttaatttacacaaacgacgccgctttgaggaaatcagtctcccatcttgcttacctcctcggcttcacaatgcttctcaacagtgtccagcaagtaatttcaggtagtattaattagggacatttttatttttacacttcataacagttttttttacatttttataaaattttacatagaaacccatattgcaactagcgctgcaacctaaattgcaacaaaaaattgtatagaaaccccttttgcaactaacactacaaccattttgaaaaaccacatgtaaatttgaaaaataaaaaagttaaaaaaacagtatatggggtaattccccagtacactttgagtctgtgattgtccatccatcgatttttttcgttgatttaagcattaatgtagtgctaattttccactgcatctgcaggagtggccattggaggtggatggcaatccacagtagcctatgtaaacttgggtagttactacatttttggcctgcctcttggatatgttctgggtcactatgcagggtttggagttatggtatgttataatatccactttaaactatttacaattaataaaataaaaataaaaaatctacattcatttcgaatattgttaattttatttaactctgaattcatggatgaattatgaaattataaatgaagggactttggggtggaatgataatcggaattgcactacagaccttaattctgtcaatcatactatacaggaccaactggacaaaggaggttagtactcacagttatacttagaaagaccaatgtaatgttagtaggagtttttttcccccaatttatatatgaaaacctttaaataaattcgaaaaatgaaataatagtatatacatttaaaaagtacttgaagagagctatgttctttatcctttcttccttttaatttagctgtcattcaacattatatctgttgtcatcatggttctacttgcaatttttatggttcaataacttctaagtcttaaaatacagaatatggagaaagtatgaaataagataagaagtaattgaaccttataaattgggagtttgtatagataaaagtagttaaattaggatttttaccccttaaactttaacatttatcaaatcatatcctctgtatttttctggccgttaaaaattctcctttgaactattgaaattgttagatttaaggacttttatctgatttcatttaattttactatttcagtgattgtttatatactaaactatgttttccagactctgatatctaccaaat

SEQ ID NO: 110003 - DNA, 562 bp, Cannabis sativa
  modified_base (145)..(149): a, c, t, g, unknown or other
cccggttaatcatacacaaatgtctctttggtaattttaaagagtgaagctttgtaattacttaaataaaagaaatgattctctttattcataactgaagttaaaatattacatcagcaatgtgagttacatcactaatttattnnnnntagggtcgcaaatgttccacgtttctgtagttctttattagcgagccatttagccgagccaatttgtaaacttcaactcctactactacttcgattacatatggaccctcccagtttgggttcaacactcctgcatacgcatctctcatgtttgcaaatactcgcctaagtaccaagtatccgacattgaatagtcttttttttgactcttttgttgaggtatcttgtaactcggagttgatacgctgcattagtgatttgcgactcagttcatttttcatcaagcaaatacaaggacaattttaggagttctttgttttcttcttgatcataaactcttgtctatgagtcgagatgttcacttctacatgtaacattgcctccgagccaaatgttgttgggttttatgccct

SEQ ID NO: 110004 - DNA, 682 bp, Cannabis sativa
  modified_base (181)..(185): a, c, t, g, unknown or other
gagatgaaacatggatcaaaccagctgttaataccttgaagattaatgttgatgctgccatttttttagataatggaacttataacttcaccggggtaattagagacgaaactggtgcgttggtggaggcgtttagctactgtcgttcaggagtgttgcagcccgaaatggtggaagcctnnnnngttaaggaggcgctgagttggattaaggcaaaggattggaaggaggttgtcattaaaattgatagtctcacagtggtgcaagcgttacgtagttctcttcctatggtttcatactttggaagtattatttctgattgtaagatgatgttaaatgatttgagagatgtttatgtcaagtttattagacgttccgcaaatagtgttgctcacttcttagctcgagcatcctatttagttgttgatcgtgttattaggagtagtgatgttactccagattttaatcatgtaatcattatggattgcaattaataaagatgatgattttatttaaaaaaaaaaatggtattaaccttttattttaggctaatttataattatgtattgaggagtgctactattaacctactattataacttcttggtcaatctttgtgcttgaaaacatatgttgagatatttttttaaaaatttttttatggcggtattcgttatagtta

SEQ ID NO: 110005 - DNA, 814 bp, Cannabis sativa
aataaaattaaaaaaaaatgtttgtaacctgctatagtaggtcaccaaattgccacctcatcagtttttttagtacccattaatgggtattacccgtttagaaatcatcctaacatatatatcatatcatatacacataatatatataaatacacaagtatatatgttacatacctcacacatatataacatttacacacttaatatgcatgatatatatattatatatgtatgtctcatataaatacataaaaaataagtatttctacacatttaatctcacaatgtatatgtatattatattatatctcatcatatatataatacacataactcatattcatgctatatatacatataataacatgatataaattcaaataccatattatatactactatatatattaatatgatataaacacataatcacatgtacgtcacatatatataactcatatatatatcatatatattactatcatataaaatagtaaatcacattatacaccaccatgctcactcatgaatggttttcatataaaatctcttatccttgtattctcagaattttgatttatctcctcctccattgaaaagggttaagcttttgtttgttagagattttattacaatattgaaagaaaatcaagatattataattctattgtaatataatacaaggaccaacaaagagattaaataaatcttacaacaacataatatacaatatatatacactattatgtagaagaagatatgtataacacatgtaatataatatatgtatataaacactcactcacaaccttga

SEQ ID NO: 110006 - DNA, 751 bp, Cannabis sativa
  modified_base (395)..(397): a, c, t, g, unknown or other
ttctcttgctccattcaagttgaattactagatctagcccttcgggaacaagatctagcttagcaaattgttattaatggccaagaaacaacaatcaattcaaaaatgagagctcacttgaatgaacaaaggcaaaaatgctaaaataagctttaaaattgaccatacccaatataggagttcatagccactcaagccttaatagtttagctcatattcaagttagaaaataaaatccaaagtaaaaagttgtcttccatggctgctgcccttattaaaaattatcaagttttcggtatttaaagacaagaaagaaaagaacaaagtataaaagaaaagggaagagaaatgcaaacaaatagagcttttgtccttctcttctcttgcacttgggnnncccttctcttttcttcctctctgtactttctgcaattggttcccctaaaaaatggcagctgccatctttgtgatgatggaggtgtacttcatctctccttttctttcttgggtcttttgggtacaaaaggatacactaaaaatagaagcccccatctttttccactttggccaactaggtttagtctctttccttccacagcagccccctggggcattttaagtgacttggacgaatttgctgatgtggataagtgaaaatcgtttttttagactttttccacgtcattacccaaattgcctagaatgctatagcattccttcaacatttctgtccagttttcaacttttgttc

SEQ ID NO: 110007 - DNA, 3084 bp, Cannabis sativa
aattcagtgcattatcatgcttactattttctaaaaacgaaacaaacattaattcacacttctgttagtatgatcactaggttcattttctattgataaataatttgaaatgctaaagaatgcgggccattagcaatgtaaaaataataacattaggaataaaaggattaaataatatgaagaatgagttcttagtcttccacatcatccaaaagaaatggtaagtaagatgtaaacacaagtgtgagggaaagaaaaggtagcaactctaatcttagaagattatgaagaatggtaagtttagaaacttggagttttcatgattcactgcagcataagaataaggaagaagtttgagaccttaccataaccacagtgccccaacacttctgtgaacgcttcaactctgtcaaaccgcaagccaaattgctttcaatttgtgcaaccatgcctgacgaaaaatcaggtccctcaccctgaaaaccattcagtagtcaaatacttcaatgaaaaaattaataaatggttgagtgaaataatgcaaatggtgatttgggtaaagaacaatgtgtaccatagaagggagaagacaagtaacaggtaaagctgaccaaacaaaattattaaaagagaaaagaaggacaaactacaaacaaaatgcgaggacataaacaacaatcctttctaggtgagagagagagaggggagcaaacacatcaaatcaggtctgacataagttgaagtgtaacaatggagcaccaacttatgatgatatatacagaagctataagatgcggtgcattttttatgaaaggtaccaacaaggcactgtgagactatgaaaagctgtgtaattttcatacacagcacaagttaagaatttacagagatgatacctcatcgttgctgtcttcttcggcaagtaaaccaagattggagctcaaaggctccatggagaaatgctggacacatgctatctgcatgtaaagattacagagcaaaaaaaaagtgtaaagtaagtttatagtcaaacaaacaacataaaaacatgaaatgttcatatattccaaacaacaatagaatattatagttcaaaatttctgtaaggacaaaccttcagtgctctaatgaaagatgtcaacgttccatcatgatttaagaaatagtttctcaagaaaactgcaaccttgtgaccaatactgaaaccagaacaccacctaacaagagtagcctcaacaactgcgttcattctctcagcaggtgatgccaaaatgaacttacttgggcataactgctggagcacatgtgaaggaagtacgattcttggagcatctagtgttgtgattcccataattaaaataattgggatcttaacaacccattcgctgaaagagattgaaggagaacaacaaaacaataagaacaaaataagagaagtcataacataacatgatgataaaccttcaagtacgaaatttaagacactactagatattgaacaggaaagtaaactcatcatgggtgggaaaacctgtgtgcaatacagccaactaaatgacaaaacttcgtttacccaagaatagtactatagttgttgagataagtggatgagaactaaccatcaatcaccatgattcaaccaatatcaagaaatttattaacagacgatatattaaaactctccgataccaacgactgaaattgactagcaagcactatccacgtattacaagtgacagagagaggtgcaggaaaaagaattagtcactttactcagacgtgaaagagtaaacaggaaatagtaaacggaaagacagaatcagtatatttatttacttcaataataaatttaaagaggtttggaaggtatattagcaagcttcaatagtatacctcaacataaggatgaaatctgacaaaacggatcgagaacaccgttccatatcatctataattataaccaccggagaatcatggttaccgtgttctctataccatgatgctaggatggagatgtcagctgcctgaacaaaaagaagaaggaaagttaaaggcgtccttgaccaacaaggaaagttaaaagccagatagattgattggagtgtacatacatccaaagcaaccattagaaactgtctcaacagacttctcagacaaccaccaaccccattcttggtagagaagtcccgtgaggacaaattagctacgtggcacccgtgagatttcaagcacacaccaagttcttcaaatgtcaataaatcatccacaaactccatattctctgcgagcaaagaaccaagtcaagactacattgcggcaggcaaaccatcagtagaaaatgcagaccatgcttagacatgttccatactatgcaataatcagagcaagtagcataaagcttcactactcaaatataaagaaagaccaaaaaccaaaaaaataaaataaaatgaacatcagcattgccttctcatggaacattcaaacttactaataagaacaagcccagtaaagagtagcttagaagtagcatggtttagaatcggaagagaccgagttgcttccgcaaagctaggcaaaccagatgacgtaatctcaaggaaagattgtcgaacccaagtatgtatttcgttgaatacattattattcacatccctcaaaacaccctaaccacaaattcaatacaaaataatatacacatatcagttgatattccattggccaaaaacaaacatgaaatacaaacagaacagtaaaaaaaaccttgatagaagaatcgattttggaccaaacagaatgaaaagctttgtgggagtcaaattgggagttgttggaaggttttgacggagagagatcgatcctcctggctgccgccgattttcgactggaatttttcgatgatgatgctttgtgaagaagataaaaaggctgtcaaatttcgaatcaaacagtaaggactctaccacattggattaaaagaaaagtgatcatcattaacagttgaaagccaaaatgaaaaaaaaaatagagagtaacctgaatgttgtcatttgcagaggtatctgtggctgccgatggaggcgg

SEQ ID NO: 110008 - DNA, 1222 bp, Cannabis sativa
  modified_base (164)..(173): a, c, t, g, unknown or other
  modified_base (1137)..(1140): a, c, t, g, unknown or other
cacctcgcggagatgctttgatgttacttaggcctccgggagcataggggactttgtatgccttctccgaaaggcaggtcccggatgctgcctttcttcataaagacttagcaattaattcatgttaagatcttttggtccacgtgtccctgtccggttggtcnnnnnnnnnngggcaaaatcaggggcaacaaagaccgaaaacccaattctagatttttatatagaaaaaaaccgaccaaaccaatcgatgctcagccctaatatagtttatgccaacactaatgaaccccaagaaggtgatgaactcaaaattgatgtaattttcactttaattttaaatttatttttgtttttaattacttaaatgaagtttattctttatacatttttttttcctttttctgtgaatttattgtttattatttttattttaatatgttgttggagacataaatcaataatattttgttttattttattattagttatatgaaaaaaaaatatcttttaaaaaatattaaataatttaatataaaaaagtaatttatctaaaataactgatccaatccacatttttacagattggatttgaggtattatgtagattggattagatctaaaatatgaaattcgcacttattgaggatcaaatgtaatatgaacaaaaaactatgaattagatgaacacccctaatttgaatcctattttcggcgtgtttaaatttttcaaatttcttaaaattttacaggatatcttaaataccacgtacataactataaaaaaaaaataaactaaaaaactctctcaaatggcgaaacaaatagtagtgcatgaccctttcttttgaaatagatgcattgtaaattttctatcaaaatatattactatttttttgacattgattatattaatttttaaaaaaatactaatttagagttaataaaaaaaatactgattcagacaagaacaagaaaaaaaaataaagtaattatatttttttggttattatcagtatattaaataaaaagtggtagtaaaaaaagttaaaaacatttacatgagatagctataagcagaaagaattagtaatttaggtggcgtttggtaatacttttgtaaagcccgcttagttnnnntggaaattagcagttgtttatgttgattatgagattatttatagctatttaaataatctattctactgttatttatgttatt

SEQ ID NO: 110009 - DNA, 6309 bp, Cannabis sativa
  modified_base (6252)..(6255): a, c, t, g, unknown or other
  modified_base (6281)..(6284): a, c, t, g, unknown or other
ccccatgagaattgaatgtaattacactcatgagaattgaatgtaattacactgtgtaattactagtgtaattactaaaaacttttcatattaaaaattagctaccaaaaaatattattttctcatgtaattactaattattttgccaaacaagatattaggaattcatacgtaattaccacctcatatccaaatacacattgcattttaaaatgtagtgtaattactaggtagtgtaattaccaccctagtaattacactacctagtaattacacagttacttccaaacgcactaggtggtaatgtaaaaatcccttaaatttaagaccatttttcatggataaaatccaagatccgaacaccgaaacttcatggtccatctttccatctcttcacatatttcccatattctgctctcagtttcccaatcccatacactctttaatgttgagtctgtattttcttgatataaggatctggatcctctcatttcctatagaaagaacaaacaacattatacctagcattatttcatttcaaagctgtctattgaaactttttgaagtataattctggattcgcctactttgtaagtatggatgttccctagaatatcatataggaagattttctctaacgcaatttagaaatctatcgactattgataaaggaaattttttatattgtttcaagttttaaaaacttcagatgcaaatttattggtacgggtgttcagtgcatattttatgtaataacaagacactgaaaacatttatgtacataaaatagagaatatacctctccagaaggggacggtaatatgaaaagttcattggcataagaaagaggttgtttcaaaactgtaagtgctgtcataacatcaagaaaggcaacattcaccattcttttcaaaactctagcttggaagatttttcccctgtgatacagccagatttggttattcagccgaaaccacccagaaactacaaaaggatacaactaatgcaaagagcaaaagtacaatgacaatcattaattatgaacaaaattagcaagaaaatacctgcttcgatctctgaatggcgaacgaagttctggagcaggaatcatccctgcaagcagtgcagattcccccaaagtcagtagagacggatgctttccgaaatagaaacgcgatgctgattcaatgccatgaataccgtgtccccagtatatctgtataacatcctgacctctgttacacgattgcagttttttcctcgtataaaattggtttttccttttcagattgtttcaccgaaacatgagttcagtattgataaccctaagagatctctaattttagacagtgagtaaacagcaacagagatctccaatttttggctgaattcaagcaattcatttaatgatatcaaaggtcaaatcattctctgttttctaataaatgtgtttacactaatactagctttcattttggataacgaatcaatacgtaagggttcgagagagcatacattgctagctactgcaatgatgagtcatatgacaatggtgaatgaaatatggtaattttacacaaagcatgaggaacgggagcttacaactaactctaaatattgtgcctataaacacttcaaagacagaatttatgagtaaactgtcaaatactaactaaaaagaacaacaataagaaaatgtggacaaaacatgctcagtgaatagcgaaatacttgaccttacacacatagcagctcaatattctctgtttcgatattgtcctctccaatgccaatgacaacaccacctcaaccatttttcttgaaagtgttctttcatttttaagaactgtattcttaacaagctgcaaaagcaaactcagcagtaagaaatcaatggaaaggatagaggagatactgaataaacaagctctaagctcaacactagaattttaaattgatgttgtcgttgaactaagacagaaatcagaagaaaatatagaaaggatttcaagcaacatctatgtgatatttagcactattatacataatttgtacagcggataacaaacacaacagcataaactcaagcagttaaaccaaccatctttgacaaagactagaggataaagataagtagaaaatgtaaaccagaacaacaaactcccagatacattcattctgtgcaaggcatccaaaacaacgagacaaaacaaaaagaatacttaaaaagctttcttcaatttgcatgggatagtcatcttccaaaaacagtaataaactttacatgagccaaacacgttaaagtcattcggctaatccaccttgaaatttatggtgagaagtaagaagcacaagtagatctaaatgtaagaaattatacaaaattctgatacaattcaaatagcatacatttaacagccatttacggataaaaaaaaaaactactcaaccacaaaatgttatctaggtcctgatatctgctgcgatgagacataagaaaagtaataacgtgcatcagacattgagcttctagaagaagcatttgctggaggatgtaactcggccacattttgctcagtcacctcctccatcacagaagtctcagtgaatcgacgcccataaaagcgcaagaaatttagacattctaatcttggctgacaaagaggcatcccaccttccaacatgccaacaacagcaaccatgttaggccgcagaactggttcctcgtgaacacaacacaaagctacacgtaccaacttttccacctcttcactagtcacacgtccctcaagtcttgggtcaacaaggtccaggtaccttccttgctcatacatctctagtgcaaatagtgggaaataaatgagcccagacccagaggaagaggatgagaccgcaccaccactattgctgtcattcacactatggctttgcgaacgtaaagaacaattttttcttccactaataagttcaagcacaaccattccaaaactatagacatcagttttctctgagattgcagcattagtaagccattctggtgcaagatagccgcgtgtacctctcattgttgtgaaaagactagactgctcagggcttagaagcttagagagcccaaaatcagatattttgacctgaaattgatcgtgcaagagaatgttttctggcttgatgtcacaatggatgatcttctgttcacacccactgtgcaagtatgcaagcccacgtgctgtcccaagggctatttcaaccctctcttgccattctatgactggtccactgccgaaaagggttcggtccagtgagccacgattcatatactcataaaccaatagacgcagtcttccttgagcacaaaaccctttcaatttgaccaaattcgcatgatgaatattaccaataaccgcaatctcagtgcaaaattcctttttcccttgaatacctaaattagttatcctctttacagctacgtcagttttgtcaagtagtgtacctttgtatacagaaccaaatccacctgagccgatctgggttttaaagttatcagtagctaattcaagctcttcatagtcaaaccttttgggtaagcctgggatgtagaaggcatccagatctcctgaagaaaatgatctttgatgacctaactgtatctctcttctcttggagaatctccatctcctgcacaagaggaaacctaaagctaccaaaagaaataagccagtgaagggtaaaagcacgagagcaactataggaaagttccttccttggtcattgttgatactgtcattgttcggtgaggtaggtttgacaagggctttaatataacccaacatgtcattttgacctgtattgctgaaaatgatggaccccaactcattttcgagcatgtagcaagaactagatgagttttcataataaaatcctaagcaggaacagttctttgtgcagaaatcttcgcacattgataaatcaacaccaaaaataggctgagagaagacattggaaaaatattccgtactgtagccaagtctcagatatgaaacagatgaatccaggtcaatactttgattggctgtgctgcaaccaagtggcaaagaataggaggaataggaactaacacttggtgcacagccactggtgttctgtgagtttccatggaagcttgtaggacatgaacatactgggttagaggatgcagcacttgcagtacacaacccaagcttgccacaaatgaaaggaattcgacaagcatcagtgggccccaaaaattcctgcttccattcagaacctaaaaagctattgacagtaaattggccagaagaatcaagcttggcaattcgaaacttggaaggagacaaaatcatctgaatcacaactgccgatccattacggccgaacagaaaaagaccagagctattcattgccatatattccactataaaattggaatttgtataagctcgtgtatccatggataatttccaataagtttgtccatgccattgcaatagtgcatcagaagcactaatttcaagcctataatcaccagttgataaatcattacttgatacggaaccatacagaaacaattcagcaggcaagtgttgtccgatcacaactgtgtctgtcggatgctgaaaactttcccataaagtatcattgaattgatcaagcagtataagattacccatttcagtcagttgtaatgagtatactgacgactccaatggtggagttgaccatttgggattgcctcctacatcagcaatgctaatcccttcaacatttagagtcatcttaccagaattggagatgggagcatcacgattagcagaccagatgattgtgtttgaggccacatgaatgacccaaaggtagaagttggacagctgagggctgggatttgaaacagcagctttaaaagttccatttcgagatgacaagaaggcaccagcactatccacaaacagaaggtttgatgcagtaaaatttggatatatgaactcaacagaaattaaaccagaaaccagaccaaagaaaaagaagactaaaggaaacaagaagaaggatcccatgcagatgtccagtgagattcagaggaggagaaagtaacaagtttgatgggcttgacttgatgaaaaggtggataggtaatgaatggaataatgtctactctgattttttccatttgattatttgctctctgtactgagttgtgttggcgttgacttctctctctctctcctcaaccaacttgatgtaaatcagttgataacgtaaagaggtaatcgtttattagatgatcacatcatcattcatcaggggatgtaaaatataaaactcagtgccggtctgacctaagaaagcctctatctaagcaaggaataaatgcctcaagtcaagggtaactgtccttttccctaataaattttccacactattattttccaatttaagaaaaactactctcttgatcttttcaaaacaacattgccaaattcttattattctattcgaattcataatagagcatgaggtatggttcattaaatattcagaattcggtgccagcttgatcttatgaggtgttagtttattcaaagaccattcttttgtccaacttcatgcactatcctctatccttctctttcttccttatttttcacatattctattctcaattatttcccaaactctttttttaaaaaaatacccattacgtttaggattacttagataaatatctatatattaaaagtgataattaaaaaaaaaaaaaatggtttaacgtttttattttaatgttttgtttttgtgtattaaaatgctaacgtcaacttaacaaaattgttaacttacaaaatatatatgggtgattaatacgtcaaatatgtaaccattggatatatggttacactaattttaataactagatcattatcgaatgattataattaattaaaaaattaatatattacttataaccgaaaactaccttttatttattattatgttttgtatttttataaatactaattaaataatttatttaaaaagtaaatttaattaaaattactaattaatttttgcaattagttagtaaataaggttattttagcaattaattttttttggcattcaaagtattaaatatctacaacaaaatccttaagaattcaaaaaatttagacatatgacgtaaattaaaaaaggctaattatcaattttttcttctgaactttgacatatactaannnntgccccctgaactttttttgccgttnnnnattccccctgaactattgagattgt

SEQ ID NO: 110010 - DNA, 1036 bp, Cannabis sativa
  modified_base (381)..(382): a, c, t, g, unknown or other
ggccgctgggccttagtgtcagcctgctcctgttccctctttaagaggtacttctggtacttgtcctccgccgtggcgatgatatcgtcccggaataccttctctgcagccggagcccttacattcaggcagacgactttggaaaggttggagtcatccaccgactgatgtgccaggatcagcttggccttccgacaatgctccgtcgtgaccaactccccgacgtcaagggccttcttgtcatacgtggcgaaggtcttggcccgttgaaggaaaagttgagtaggttcggttcgcatataaggggggatcctaacccactttgtgagaagctccggatgatccacggcctggaacctggaggagaagaagaagcggtgnnggtattccttcacgtgcttctgatgattaaaagggatcgggccctgattcaaaggatgggcccagagaccgtaaaagctgtccttaaacttatctccctttttagggatggaaacgagttcataaaaatataaaatctctgccggactgggagagccccagctctgggcagagtaaaaaataaataagcctgaaagcaggcgataagcttggggtataagttggtatggcgcaaggccgacaaatacaagaaaattaataaagtaatcttgaaggggaagcatgaccccggccatcaagtgcgtctggctccaggctccgaagcccccgtagttatggttgggcgtctcctcgtcccagggtggccggtggaaggtttcgaaggttgtgggcttgatgcccaccgccaccacaatgtgttccaactggtgagggcagatcagggtggagcaaagctcagctgcttcccactcgttggcacaagacttgtgcccctcctgggccaccagacccttcataacttcctccagggtggccaagcgtttcgcttctttctttgaagatttagagccagatgcagacatcttagttctgaaaaagattgaaaaaatccagcagtcaggccccaaaccaaaccctaagtcaaaaaagggaa

SEQ ID NO: 110011 - DNA, 522 bp, Cannabis sativa
cttgtcgtagtcctagtctgcttcaagttccacttgcgattctgagctcaagtttgggttcgagttgaggttggggttcatgttcgtgtcggcatttgagtcctggtctgagttagggtcggtttgggtccggatcttgttctaggtctggaccgagctccgggtgtgggttagggtcctgggtctttgtctaggtttgggttcgagtcccagattttgatctcgatatgagtctgggattagtttagggtctaagtcttgggtttcaatcctgatctggatttaagttcagatccgggtacaggtcccaagtttgggtttgagtccaggttcgggtttggtcgtggtatgggttcgtgtctaagttcctatccttgtatgggtttagggcaggtttcggctccaagtctaggtcagacttcggattcccaggtctaggtcaagtcctaggttgggttcgagtcctgaatttaaatttgggtcttggttccggggcctaggtccctggtctaggtcccctat

SEQ ID NO: 110012 - DNA, 651 bp, Cannabis sativa
atatcatactaaatggttgtcatttcattcataagacggccagctgtggcattttcactaatgtcaaatagtttttctacaacattgaaaaactcatgagcatttgaggtgtttggcaaaccaataaatgaatgttcaggaattgaactttcatatagcaacgagactaagatgatttgaatttttccattgtgcatgaagaattttttaggcaacaatgctgatattagtaagatcagcagatttttcttctcgtaggcacaagtccaaatccattatgcctaaagtaaatttcacatctcgtttccatattttatagttagacgcattcaaaattcagataaaaacattagtattgttcgcagaaaggagactaaaaaatccaaaaattaaaacttgatcaagctatatgagccaagcaattagaaattattatagattcaactggtcattataaactcccttttttgggtgagaatataacacacacatgatctaccttcttgaagttaacaataaagaaaaaagacatataaattaagaatttattacatttgggcaaataaatttcttaaataaaatatattaattcaaaccaaaaacaataataaatatataaatttaaattattacctttgggcaaataattaa

SEQ ID NO: 110013 - DNA, 1314 bp, Cannabis sativa
agtttctaggctttattgtcaacgattgaggaattgaagccaatccaaagaaggttcaagccctcctagatatgaaatcgccaacaagaaccaaggaagtttaagtttggctggtcggattgccgcactcagcagatttgtttcaaaatcaacaaacaagtgtgttccgttcttcaacatcctgcaaggaaataaacaattttagtggacggaggaatgtgaaaaaccttttcaagagctaaaaatacaactcgcaaaacctcccgtaatatcgaaacctctggacggagaggaacttgggatatacttggctatcacggagcacgttgtaagtgtcgtactgatcagagaggaaaacagcatacaacatccgatctattacattcgtaaaagactcattgaggccgaaggccgatacccattgatagagaaactcacttactgcctgattctagcaacaagaaagctaaggccttattttcaagttcaccctgttcaggtataaactgaccaaccgttacgccaaatattgcaaaaaccaaatgcttctggacagttgctcaaatgggcagtgaagttgggccaatatgagattaccttccaaccctgaacaacaattaagggtcaagccttagcagactttgtagtagaatattgcacaggcaaggaagaaagcatatcagaaagcaaccccgagccaatgtaaatatcttagccaagtaacagtgaagacaagccgacttagaaactacatgtgcacgggtcggctacagatcaactatccggtgcaggaattgcccttgtcacacctgggggcaacacctgcacgttgcagtcaagtttggatttaaagcatccaataatgaggtcgaatatgaatctttgatcgctggtttaaaactagctcgggagatgaaggccgaacatattgaaatctgcagtgattcacagctggtggtaaatcacgtatccggagaatacaaggctcagggggaaaagataatagcatatttgagcaaaatacacgatctgctcgcacagttcaaaagctatgctctcaggcaaattccaagggaagaaaacacgactgttgacgcattagctcgacttgcgagtagtaatgtaagtgatggagcatatctggttcctattcagtttcttgaagaacctagcatcaccggcacggaagagatcgaaatgattgatacatccccaaactggatgacgccaatcaaaaccaacctcaacactagggaactcccaaataatcgaaatgaagctcgaaatatgagaaggaaggctgcacggtacatc

SEQ ID NO: 110014 - DNA, 725 bp, Cannabis sativa
ttttttttttttttttatattgggcgattgcacttaaattttagcaacccgaactttaaattggattagaaaatatataggataaaccgcccaaaccgactgatgtacagcgttactaggcacatatattttcatgtcattcaaaaccattccgaaaaattgagggaaaatattaaaaaaaaaaacagaaaaaaacaacaaatacacttaagttgacaaaaatagaataagacgaaacgacaaactttcagaacaccagtcaattttcgtgggttgtcgtttttcctccaaaccgaaaacaatgactctgctttgctttcctcaaatcaaaacaacgctcctctcattttttccttaattttttattatttaattatttttttcagttattaattttcgaattcatttcttacctgaactgacctgacaagactacgtgtttgaaattaccaatgacccagatttgacacgtgtccaaatattaaacccagtatacccagcttatttgcacgcccagataaatagtaattaattaattaagctgcgtttaataatatttcgtttgctattaggcgatattgtattgtattaggcaatataatacaatacattgtaatatggtgtagaaaacggctgtttggaataggttaatcctagtaagggaatggtaatgtgaaacattaccttgtttgtttggagggtttagctttggaatgttattcccc

SEQ ID NO: 110015 - DNA, 691 bp, Cannabis sativa
  modified_base (623)..(626): a, c, t, g, unknown or other
tcttaaatattcatctgtactgaagtatgttctgcgatatattgtactacgatcagatgggtggaacaatgtgtatgttagttgagtttgaatatcttaaatattcaactatagtaaagtaagttctgcgaatacatgtaccgcgatcagataggtggataatttttgtattgttaatatttttttgtttgatttgtattattttatttattttgtttgttattttaggcatgtttgaaatttttgggaacgtccaattacaaccgttataccgccaaaatttcggaagataaatttactaaaaatatgtaaatatgaaataaaagtgttacgcatgactcaagattggattggactggattggctagactggacaagattatgctcaaagtaatcttgtatttggtttaagaatatactcgactattttatttattttcttttcgaaaaaaaacataaattaaaataaaaaatatataatatattaaattaaaattaaaatatataataataaataaataaaaatgaatgattcgcaacaaaaaaattaaattataaaataacatatcatatataatcaagtagatataataaaataatttatcatattttttatttaatannnnattaaaatagtaaaataaaaatacttgaaaaatataaaattatttatgttaaacactaatttaat

SEQ ID NO: 110016 - DNA, 590 bp, Cannabis sativa
atatttgttgatttgtattctccaaggttaacacgtgtcatcctctgaagtaccagcaaaattttgggtataacaattgctccttaagaagtccttttcagtgaaaagtgcctttttaaatgattacccagggtatttttgtcataatccattttgaaaaaaatgcatgcctttaattttggcagttttgtggtttcaaggcacatcatgagcattaaataaccatcttttccacttttttttttttaatttacacccgttggatcatttactccttaatctaacagagatcaacccaatggtataagatgaaaaaaggaaccaccatttcatcatgtttgccatttcaaaaaatttcttgaggttctctgcaaaaaaccccacccagattttttgaagctttgcatgccatctttgtctttgacgtacttcttgcaagtttcgtcagattttcttttcaacctcaagcattcaaagagatcaacaagtcgttccctgcatcgtcgatttcagaactactcatcgcgccaaaacatgactttaaacagtaagtgattcatctttctctgttttcttatatgctttttatt

SEQ ID NO: 110017 - DNA, 3495 bp, Cannabis sativa
tgatgaatcaccttgttatacacaacagtgatgaatcacctcagtatacacatcagtgatgaatcacctcgtaatacacaacagtgatgaatcacctcggtatacacatcagtgatgaattacctcgttatacacatcaataatgaatcacctcgttatacataacagtaatgaatcacctcgttatacacaacagtgatgaatcacctcgttatacacaccaatgatgaatcacctcgtaatacagagcagtaatgaatcacctcgttatacacagtagtgatgaatcacctcgttatacacagtagtgatgaatcgcctcataatacacatcagtgatgaatcacctcgtaatatacatgcagcaatgtattgcctcgtattacacagcagcagtgcacctgctctcaaataacatgatttgaccaagtcaaataccacttcaaagatcactttttttatattttaaatatgaagaagttatttatacttatccaaatattcagttatatgtgaaacgtggacagtaaccacccatcaattgtaacttttcactaagataagattgagtaaccaccatcatattcctataaataggggttcacttaaagggaaaaggggaaacaattctgatttacagaaactttgcccaattgtaaacataaccaaaattagaaataagatggacttatggagtatgtagatttcaactacaaaaccacgtaataatatttagtttcatttattatttttgtctcttcatttcttgaattaataatcttcttagattaagttgataaaaaattgcatcaacaacaataccacgtataaccttaaatttaaaaaaatagaaagttgtcttccatctatcaaaattatttggaatttgtaaatgttccacatttagcctccacatgtccacctgtactgcctgaagtaagcctccgatatccacaatattctggaaacttggggtaaatattatctgtgtttctgataagtgacacatggattccaaataaaaggttaaggcccattagtgagcccatataacataaactgggtcgggcccaggatccattttgccatttcggagaacgataacataactcgcctaggtgaggttccatcaagcctagtcagcattcagaaggtctatcttcgtgtatctggaagaggacttcagcgtgtatctagaagcctagtataatttcccattttttgtctcgcacaagattagtaattatttttccaaaatatcggatagagaataatatcttgctaaaaaagaaactggataattacaaatcaggtaattaatatatcattaattacccatgaatataggacatggtattaacaactagcttcgtgataaggccacatcaacatacacaaagtgcctcataggctggcttcacaaataagcccaaagtcaatgtattatttgtaaactccctattagaggaaaaatggtaactagtatgacatttataacattataaatactcaatgttattgaatccttcatgcaaagggtttgagattcttagtttactttgtcaggcaaagcatggagcgcttatacttaatgtaattcttaggcttttctagccaaatacttaataatattgactcgtagaccttaacgccccaactatgtaaaaaactctgtgtgtctacttcatatatttcttgttgaattatattttctttagcctttatatttaataattagtttttcaaaaaaaactcaataaactattatttatttagtttcccatattttaaactttgtttattttttattctcatatatttttgcactatttttttatgccacataaaaataaactttaaattcttttccaacatttatgaaaaatcccctaacaaataattagtctagtccaacccaatcctgtataccaaagtccagcttgtatactgggtatccaatctaatctaacatttttcttccaatacaatctaattagtaattggatttggaaaattatcatccgatctaattcaattagacctcaaaatccaatccaatccaattaggttttttaattagatatctagttacacacctaattttttatattagcttaaaaaataaggaaaagtacgtaaaatcaaaatattactatttatttaagtttaataatttataaaaatatcatctttataagtgtaatacaagtaaaagtttaaaataactaaagtaataacatttctaagtaataaaatagaacaaaatatcataaaaactaatacacaaaacagttaattgttacaatttttttttaaaaaagaatagccactaaaaatataattaatatatatgtttttattttttaatataaataaatataaataattttttaatatatataaatataattggattagattggtttttaattaaattttgatattcacgtccaataaccatccaatccaattagaatccaacttttaacatcaaatctattctaattgtaattggatgtctaattttttgtaattgatgtgtatccattcagtttaattgaattggatattgcctagccaatatattaggttctataaacttttttttttagcttttaaaatgtttagacaaaaaataaaaagactttttaatttaaaagttcttttggaagtactttttataaaaaaaaaaataaaatatttcaaaaattatgtaaacgtaaatataaatcaaaatttacatttatattgtagttctacttagggctgtacataagtttttgtaaatcgcttaacccgaacaatccgctcaaaccaaaccgagataacctgacgaaaattacaaactgaaaaacccagcgaaaatataacccgcctaatctttatattgggcgggctgaaaataatatcaacctgcccaatcaacccgaactaactcaactaactagatttagagagtttatatatatatatatgtttttattatatataatctatatattatataatttttatacatatttataaaacaaaaaaatagaaagttcaaactactatattttttttacgggatgatttgaactttaaattcaatctttatatttatcttattatcacaataactaaaatataacaattgagtgtgaaaaaaaataaatattaatgttcggtttggacgggttaacccaattaaactgactaattcattgggcgggttgcacttagatttttgtaacccgatctttacattgggttaaataaaatgtaacatagactaaaccgaccgacgtacacccctagttctacctatcaaaaatagaagcttaaagagaaaaagaaggctaattatgacttttacccctgaactttgacatgtactgaatcatgccctctgaacttttaagatcgttaaaaatgacccctaaactattaggattgttgaatttaaggacttttatctaaatttaaaagttcagggggcatgattcagtacat

SEQ ID NO: 110018 - DNA, 706 bp, Cannabis sativa
aatattgggcagaataaaaaaaaaataataagtgcatgaaattattttgggtggtttataattttatatacatataagtataacattattaacttttataaaatataaaatgtataaatatatctattttattagaattagtaaatttagtataattttgtgatttctttttttctttttagcaaaagtttcatatggtttgcagatgatatgtgtgttgtatttttaagctataaataaagtactcttacatttactttattttgtcatgggtgattgaaattgaatatctcaatcttattatttttttgaattaattagtgtgtgcatattggaattaaaatttaatataaatagtaaatataaattttgtaaattctaaaatatatattgtagtataccatttaaatctataaatttcatattatatagttagaaaaataatacaatatatagtgtaacaacaatatatatttttttaaaataatatatacatacttatcacttttattatatttttaaaaatatttttaaagatgcatataaaaaagttgtactacggttcattagaaaaaacatgtataatttctactttgttaataagttcaaaaaaaattttatagatgcatataaaaaggtttatagtacaattaagttggttagaaaaattatgtttatatagtgtgttacaaaattaatttgttac

SEQ ID NO: 110019 - DNA, 573 bp, Cannabis sativa
atgatgttgatgaaactgatttttttgtctgctgcttttaaggaaataattagtttttaacaaaaaaaataaagaaaaaaaaaacagtaatctaaataaaaaaaaaacagatgtaatttctgtaagaaaaaaaacagatttaatttctgtaaaaaaaaacatctaccgttgaaattattttttatttattttagtgttttatttttttaaaaaaagaaaaataaaataaaaagaaacacaaatttaaagttttttatggcattcctcatgacttttttccatatttataagtttttttcaaaaaaatatcatatttagtgtaattaagttttgggaaatttttatatctatacataataattaaatcaattacaattataccgtacaaaattaaaattatacaattaccgcaacacgtttaactattatatacctgaatgaaattaattatatccctgatttagtgtttgtttgtaattgtttccttaaacaagctatcatgatattttttcatttcttaaaacttcaaaaataaattctgacaacattacttattatttgagctcaatgaca

SEQ ID NO: 110020 - DNA, 709 bp, Cannabis sativa
cttttgtcttcctagatgtaacgtacttgatgcctcgctattcacatttaacgacatatggtttctcgttaatataccaagcaacagtttgtattttttttcctcggataagactttacagtcagtaggttgcaaatatactctgatacttacgtaattaatgagttattccataaaaagcggttgcatcgatccatattccttttatcttgacacgtgtcccctactgagatggtagccaaatttcaggtaatacaattatatataaagaaatttaaatttaaaaaattataaatattgttaaccatatttttaactttattattatttattttatattttaaattgaaattgttgtaccaatgaattgattgctttctattttagttatggtaaactgattcacacaccatatttttcataaagtttaggaataaaaaacctttatatcaaatttacgaatcgagtttatgcataaacacactcaaatttggttatgtgagttttggttaagaatatagtaaattacaatatatgtattatcataaacgttaccttattaagaaaattttaaaaatttaaaaataagtatatataatcatatccaaatgacactgcagtgtagtaatagctaattttttttcttaaagatcaaaatctcaaatcccatttaaaaattaaaaaaaaaatacattacctaactaaaaaa

SEQ ID NO: 110021 - DNA, 749 bp, Cannabis sativa
taaagtataagtttacaaaaatattactttttctaaaagaaagttattttatgggaaaatttttgaaaaaataaaaaaaatcaacataaggtacctagttaccattaccttattttctatattttttaactttttctttaattttccaataaattaacattttttttaaaaagccatattttgcacaaaaatattaaaacccataaaatttataatttcatctaaaaaaattcttcctttgaatattttcaaaagatatgccaagaaaataaaaaataaattatattttaaatattataaaaaaaaaaaattttttagaaaaaaaattatacatgatttaggaaaaaaattaggatataatataattaaaataggcaaagaaattaacacaaaatagtgtaaaaatatttttttttttaaatattaagactaattttcttaaattaatttcagtttatttttttttaatattagggtgcatttataattttgtgcagtggaaataaaattttcctataaatataaggcaagttacacaaatatgatattataaataaatttttttaaaaaaattataaatttctcactttcaatttatgtttatatatatatttgaaaaattataattaataaaataaatatgatattaaaactgtatgtttcaaatatgattcaaactgcgcaaagtaagattttatttctaagtttataaaatattctaagagcactcataacaagtaagttaaaat

SEQ ID NO: 110022 - DNA, 509 bp, Cannabis sativa
agacatttagcgtcaggtagaatttgaagcaaaattagttcgcttctatttatactcgaagctaaaagacacttattttttaaaaaaaccccaaatcaaaataaggtttctcatttcgatcaatctccatttcaaatcagaacctctcttctctctctctgccctaaccccaatccccattgacgccgaccgcaccacctcattctaccccaatcccaactctctctctctttgactgccccaaaccccaatcccaaccccattgacgacgtagaactctcctctgcttgttcctcccactctcgttctcgatctccttcattctggccttctctcgctctcttctcctttcttgattttcctctgttgctctgccgagctacaagctcctctgatgaatatagtaagaagatttatatatgtatatatatatatatttatttttttgtttgtatttttaatttttcttatatgggttttgcataaagtttagatctttgtggtgtaac

SEQ ID NO: 110023 - DNA, 553 bp, Cannabis sativa
  modified_base (107)..(109): a, c, t, g, unknown or other
ttaattaattttattttaattaatttagatattagtagattttgaatctaaaagtggataaaatctattttttttttattaattggttatcttatttttaaaatttnnntattttatcttatttttaaatataaggtcagatattttatattttgcattatttaattaattttataaaatgacctttgttgaccgagatttttggcaaccaaatgaataatgtaaaaatgagagcttagggataattattgcaggtagtttttacgtggttcaggcattaatgagctgtagtctacgagtctctgttattaatgagagagtatttcttatagagaatgtttctgtgtccctttttctatatccccttcctaatttttgtgaggggtatttataacgattggtgggtagaaaaaaaagagtaacttgtctttaactgccaactatgggcatgcacaagttctcagaaagtacaaaatagggcatgcataagctacgtagtaggttgcgtaggtgttaggtgagattagcattcatcccttcttgattgatgtga

SEQ ID NO: 110024 - DNA, 3166 bp, Cannabis sativa
ttgctcgcttatttttgttcagatctcaagcgtctttgcaccatcaggatttcatgcggctggctaaccatctggacaagtgtagatcgaaagtctactagggacatggctctgctaccatgttgagaatcatgggttccatctcaaaaccaattggtgatgagtggagtagtccatgttcttatatataactcaatacttttacatttaattcatttgggacaatgttctccaatataaaaaattaatataaatgagccccttttatctttgttaaaaaataaaaaataattacttgtaaatattaagtctatattatatttctgtttcctttccttctttacaaaatctattatagtagttttttcaatctataatatgcaattctactcgattttaaatgattgagaaactcttaaatcacatacaatttttacagatgtgtaagtaattttaatcatacaattaaaagtggtgtagtctctatcaatgccgattttgaatttagtgggtcataagaaaaaaatactttaggcccttatttagaaaaaaaaaattagtagttctaaaaattagaaaatgtgcatttttcaacaggaataatttttttgggcccctgaactatgtgagtcctagacacaagcttaactcgcctatgttgagggtctggcgtagtccctattcaatgatataaatagtttatatatatacacatcattgtatataataagtgtgtatccagcattactcttgcacaattttacacgattttaaaaagccaatagagaattagatttgagtgtaattgaatgtaattatacagttttaattatttttctgaccacgtgaaattgcattatatctgtgtaattagaggtaattactaactattttgtcaaataaaatattaggaattcataagtaattactaataccagatcatatccaaacagacattatattttaaaatatagtataattactactctagtaattagcaattacataattactacaaaacacaacttaagagaagtattaattacaacatcctattacaacctcttagtcaaccttcatgctcgaaatcatagcttattttttcataacgatatttattatagttacaatattattcatgtaaattctttaaattttttgaatactttacagtatcgaaaacagagttgctgatattctaatttataacgcgtgtttaaaaaatttcaaatctaatctcggtactataaaatatttaaaaaaatttcaaaaatttacaaagatgatgttgtaactataacgaacatcgtcgtaatttttatttttattttttgtgaaaaaaattatccttgcatatattttcgatcatgggaattgactaatgtagtactctttcatattctaaatacatattgtatgctgaaataaaaattgtgggcttttagtggattctattacaaaataagtataatcatgttttttattaaaatatatttatttaataatttatattaaagaacaaaaagctggaatagctcagctggttagagcgtgtggctgttaaccacaaggtcggaggttcgaaccctccttctagcgcttttgcattttattttgttatgtttttttaggttaatatttcttaagagaaaaaccattatatgtttggttaacattaataagcaatgtttgacacgtttgcacacaaagatagtgtattaaaactcttaatctctcatgaaataattaacaataattacatttaatatttaaattgacattatgtgctggcattttatttacttagtcaaactcaatcattcaaaaaaccatattttcactctttcattgttacaatttaattggaacacaccattcattaattgtgtatatgtttggtatgccgtattattgtataatattatattgaattatatttcatgtaatatttttatataaaattatatgtgatattagtttttatgaacacttaaatatacaatagtttaatataaattaaagtttaacatattataatataaaaatataacatataatacaatttaatataatataatacaatacaatacgacccaataaaacgtaccaaactaactttaattagaatgatttacttttaagtgatgaattatgaaactcaatagatcatattaattatctccaaacgagtagtaacaaaccaactaaaatccatttttttttaataattaaccaaccatatattatatataaggtcaaagcagtgtccaattaatatcaatttatcatagcccaacaactggccaaaaatgagcctagtaataaaactacataaatagtaaaaacactttctttagttaaagccaaccacttatactaatatataaacacatattaattacataatcccattcttaaatcgatcatatatggattttatgatgttcccaaaaatttcagctttgttgggtttttcttttgttgttgggtcttgttttttgattattggtatttcaggtagtgattttaacaaagattttgatgtagtttggggtgatggaagagctaagatactcaacaatggagaacttcttagtttgaatcttgataaggcttctggttcaggatttcaatccaagaatgaatttctttttggccaaatcgatatgcaactcaagcttgttcctggtaattctgcaggaactgttacagcttattatgtaagtatttttttaatagttaaagataatattcatttaatcaaaattcattagacactataaatttcaataattaacgtgaatttttttgacaatatataaatttcaacaaataatatatttgaaaaaccaaaagtaattgggtgcctattgagttcaatttaggtattttattaccgtcaaatattaatttaaatatactaataaaaacatgacacacggctaataacttaatattacacggccaggtacagagttctataacttaagtactattaccgtcaaaaattaaacttaagtatatgcttctaaccgaaagttaaacttaagtacttatactaggggtgttcatccaatccaatctgcactattttgctcatagtgcatccgatccgcactaagtgtagatttcaatttttggatccaatccaatccgcacaatagtt

SEQ ID NO: 110025 - DNA, 649 bp, Cannabis sativa
  modified_base (218)..(229): a, c, t, g, unknown or other
acatggaacttgactcaattcaaccatagcttagaatgtgaggactcctcatggcttcttgataagcaattggctcagaagcgtctcccacatcataatcatgttcttgcaaatagacaaggtagtcatcatgaatagcaggtttgtgagctctctctgatcttctcgacacaacttcaccaccctcaatatcaggattttcatcttgcatatgattnnnnnnnnnnnnatgagcttctgttagaatttgttcaatcacaggatcattagtaggagcgaaagcaaaagtaataggtaaaggaacataaattcgttcttccctgaatataatttctcttgacctttgacttgaaccaaattcatcttcaaaatagacaactctatctgattctatcaccctaatggtgtgagaaggacaatagaacctagaacctctcaaaccaatagtatagcttacaaaataaccactgatagtcttcagataaagctttttagattgtgggttatatggccttacttcggctttacaaccccaaacatgaaattgacgcaaactcggtttcttgcctgaccacaactcgtatggtgtctttgggacagacttgctaggcacttgattcaagatataagcagcagtccttaatgcctc

SEQ ID NO: 110026 - DNA, 597 bp, Cannabis sativa
ttttttttttgaatggagaaaaaataaattttattaaccaacaaaatctgttactaaacaatgtaacaactcggtaggaacagactacataccaaatatacgaccaggaaataatacagaagctcttgcaaagttataagctaccacattagctgatcgtataacaaaataaatagaaacatgttttaactccatcaggagttgtttacattcaataatgatttgtccaaacaaagaaatcattttagttgagcttcgtattgcttgaacaaccactaaacaatctgtttcaatcgacgcacgttgccaatttttccttttgatccaactcagagcctcgcgaactccgattgctttagcaacttctggtgtagcagcccccgagaagaagtccattcggccttcaaccaagaagccgtgatggtcacgagctaccattcctaagccatagctggttcccccttcaaaaagagcagcgtcaacattgatcttgatgctattttcacttgaagcgggccattgctcaaccccatcacccgtctgaaaaccagaccatgatgactcaataagagtattttgagcatttgtccattgatc

SEQ ID NO: 110027 - DNA, 506 bp, Cannabis sativa
  modified_base (66)..(74): a, c, t, g, unknown or other
  modified_base (168)..(170): a, c, t, g, unknown or other
  modified_base (228)..(233): a, c, t, g, unknown or other
  modified_base (479)..(480): a, c, t, g, unknown or other
caattttacaatccataatgcttgttttttgaacttcgtaacgtttgtctttcatcttgcttattnnnnnnnnnatgaaattttttgccctaactcgagaacatttcgaacttcttaagtttgacttttcttcgaacattcttgttttttaatctgttgagtactccnnntcggcatatttgcttgtttatcgttcgatattctggccaaacactcatcttgtgtgtnnnnnnttgtagatgaacccaggtgagttttgggagagcgaacatcggatcgaccacgacctgcttcaacttttgcacgaggatcatcctggtcttcgttctagcccaccttcttctagtgaaggacattgtccaattcttatacccagccatagaatgatggctcgtacaaagaaaacaacgtatctggctgaggcatctgatcctcaagtggctcggcacgccactctgcccagcgtcgaacaggattcnnccgtccaggtggaggtggatcatgaa

SEQ ID NO: 110028 - DNA, 586 bp, Cannabis sativa
agtaaagtctgctcttttctaaatgcatcttgacaaatctcctggtcctgatgggatgactccaggtttctttcagaaatgttggaatgttgttaagaatgatattgttcgactagtgcaagatttttttcttacgggttctcttccaacgggtctcaatcatactaatattgttctcatccctaagaagaaacaaccaactgccatgggtgacctccgtcctatctcgttgtgtaatgttatttacaaggtggtttcgaaggttttggctaatcatcttaaagtggttttccctattgtcatctcggatactcaaagtgctttccttcttggaagattgatctctgacaacatacttgtttcgtttgagataatgcattatcttaaacgtaagactaagggtaaacatggcttcatggctcttaaactggatatgagtaaagcttacgatagacttgagtggggatatttgcgagctgttcttctgcgtatgggcttcgatggtagatgggtgaatttgatcatgcagtgtgttagctcggtttcttactctattgttcacggctgtaacgccctgaccctcagg

SEQ ID NO: 110029 - DNA, 951 bp, Cannabis sativa
  modified_base (628)..(629): a, c, t, g, unknown or other
actacattttctactttacattatctaaactattaattataccataactttgttcttatttcccattacaatttttaatattttcagatatgaggtgatggttgagaatcttatggaccctgcacatgttccatatgctcatcatggattaatgagaacaaggctgcctggtaattaattataatttattaagagcttaattttggttttggttatgtttttgaattcatattcttttgctaaatatttttcttcacgtttaaatgaatttgaaaagctttgaaaattaagaattaatgatgagatataatgagacctaattacaaattgtgtctatcattatgcatgcagttgcatgaatcaactaaatactcatgcacttaaccaaatctgtctcaagtttttgaatttaagatactcatgagcttatatagtcacatttttcattaattaatttacacatttgaaattgttatctttaacatcattaattaatagaatactattttagatcatgtattttacaaaagttattaattagactttttgttttattaaataacaaaatgaactttatattttttaaaattgtacaaataagatcttaaactaattttttgtcaaaatnnaacttaataataatctaatctagagatgttatgacaaaattggttacattttctatatttattcgtgttagaaattatcttaaagttagttatattaaaaaataaaattgttaaaagttgagctcagagtcatatttttaccattttaaaaaatatagagtctattttgtcatgatttaacaaaacaaagtatctaattagtaactattacaaaatacattacccaaaatgatatttagtactcttaatttattttgctatttgttctatagcacacttaagtgacattaatgtaaaagcatgtagctatttgaattcaaac

SEQ ID NO: 110030 - DNA, 933 bp, Cannabis sativa
tgtaataaatttttaaaatgtataagtttttcaaataattttttttttgcacattttttgtaattattttgtttttgttgtacatttatgataaaaaccctttaatctaactatgagaatctctaaaaatcaaaatataattgtacttagcaaataccaattcatatcatttttgggttgatttaacactaaatttagcatttagtagtgcttttgctttgggggtgggtaagttggtgtgtggtccctgtagtgggtcttcggtggtatttggtttggttttttgtcctggttcgtggagtcatttaagtcaatggatgaggttggtgaatcttcaagtggtattaatgggagatgcctttctcttaatgaggtgtctatttctttggaacctagtgtagtaacaaccaagatgctttccaagctttgcctttttggcaaaattatttcagcaaggacctttattgctaaggatgtggaatttgcttgctctagcctatggaatactcgggttcgtgtggagcctactgatggtgttcttgctggtgcaaactgctttcgtttcatttttgagtctggtgtggtgtgcaaaaggatccttgagcaggggccgtggtgtgtaaaaggagatatgttggctcttctctcgtggtcctctggattcggtgccaatacaccttctttcaactcgatccgtttttggatccaaattcacctgctacctcaggactactattcgaaaactaatgccaacatgctggggacattggcgggcaaagtgctaacgattgagcttgaggaatccaaaccagttacctggaaaaagtggattcgggttttagtagaggtggacgtcaacagaccgctctgttgcggttgctacttcaagaccataagtggagtcaataggtggattcaattaaaatatgagaa

SEQ ID NO: 110031 - DNA, 563 bp, Cannabis sativa
ttactctctgagcgacttgaatacttggagggtgaggtccacaagttattatctcaatgcaaggttgtgagtaagcactgggacgacgcccaacaagaaaatacccaccataagcaagaagttgagaaagcgaaggaggaagccgagaaggcaaagaaggaagccgagaaggcaaaagaaattgccaagaaggcaaaagaggacaccgagaaggcaaaagaagaagccgagaaggtaaaagaggaggccaagaagaccgtcaaagcccaagccgatgagttcgagaagaagcttgttgaaaaagaaatcgaaaccgtagaacggtacgataaagttggttttcacaccgtatatcgggcctggatttggaatcctaacatggacacaagcttcttggaggagaaggaagaggaaaccttagctctttggagaagaccaggctaaaggaggaaaatggcgaggtcgaggaggaagaagaagaagatctgtccaagtctcccattgtaacgccctaatctataggaacgccacgtgtgtggttttataaaactagtttaatacta

SEQ ID NO: 110032 - DNA, 719 bp, Cannabis sativa
cggggtgtcacccaacgatgacgacggtcaccccctttaagttgggtctcgcggggccaccacccaacgatgacaggctatcacccttctcaagttgagtctcggggggtcacccaacgatgacggttgtcaccccctcaagttgggtctcaggcggtcacccaacgatgacgactgtcacccccctcaagttgggtctcagggggtcacccaacgatgacgactatcacctccctcaagttgggtctcgggggtgttgccctcaattatgggcttcatccccaaaggtggttgacgaccatgtcacacccataagagaccctcgtcgtcagtaactctttcaaatgttcaaatcccacgaaaggcttaaagacagttgtcaacccataaaaatagcgagatattatcataaaaattaaacttcaactatctccaaaaatcaaggagacagccgcgttggtcgcgtctcctaaagcgagaagcggggtcatccatgatctgggagggggatcgacaggagagtaggctattaccgacatctaggaccgaacttctttaaatttccgtgtctttatttaaatttattaaatttcaatattattaactgtatttattactgtaattttagtttaaatctcatttattatgactccgcgttggttggctaaaaatccagtcaacagtatcaatgtgctgagaagaaaaatttacacttggca

SEQ ID NO: 110033 - DNA, 587 bp, Cannabis sativa
cagtgatacctaacaccttttatagatactatcctaaattgtttttttaagatatataagactcgatatttaattatattaataacaatataacattaaaaaatatgctaattactaataatatttttttaacatttctcataaaaaaaaaatttactttttttcattaatgcgaaacacatttactaaaaaaacttataacttttagcttttttaaagtatataaagatttaccaaattgcccttagtctttcttcactcattagttaaattattattgttatgggctatattcacacattctttcccaaaaatagaaagatctgtatacatattttcattaattgacagatatatttatctcatttggtgtgtgaatgaatgggttaagttccaattattcctatttgatcttttaattcttttcttttctcttttcacattaaatcaaataaataaagacaaaactaataattaggtggtgttgttaaagagaatagatcttacatatcttcaccgacacaattttccagctcaaattttcatcttaaactctcaaaaggcaactaaaattctcataaatatac

SEQ ID NO: 110034 - DNA, 551 bp, Cannabis sativa
tctcaaatacgcatggcagcttatcaaaagaaggtggctaaacacttcaactcgaaggtcaaagatagaaaattcactattagtgctctagtcttaaaaagggtcttcccagctactcaagaacccggagtgggggtactcgggcctaattgggaaggaccgtatgaaggtgaggacgaaatcggctccgggacctacaagctaaaaagaatcgacagaaccatggtgcctagggcctggaatgctgatcacctctaaaagtattaccaataatcaaaaaaataaaattttatgccctgtaaattaaatttgtaccggacaagtatatgcaacctctaaattaatgtttctaaaactgagtgacctaaaaacaattttcatgtcactcaggggggtagtaaaggcataccacacggacaaatgtaaaacaggccaaaaaatttaacaaagttaaaaagcagaatatgtatttaagcataaatgtaaattattcaaacccaacgaaaagctctaaaaaagataagggcctggggacgggccttaagtgtctc

SEQ ID NO: 110035 - DNA, 563 bp, Cannabis sativa
gactaactcttaataggtttaattgtgtagtaattgaagaaccctttttagtgacccaaaagttatagtaaatacgaccgaaattcgggaacggaaagcccagcgacttttctattatgcatctggagactttgttactttggagtattaaatgtcaaagttgctcatttatggtcaaatagttcgtggttggtttcgtatactaatatatggaccaaagtgacagtcaccaattattttgcacttttttctcatttcatttggaggcacacattttaaaaagaaaatgactctctcagcttcagttggacgggactcaaagaaaaacataaatatatagaataggcagataaatatgtatataataaaacaataatcacttttcatgaaaatagttaaagagccttatcataaagtcgttaacaagggtggagagtaagtaatgtgaatcccgtttgttcaactaccaatcaatataatattataattatatataaatatatatatatatatatattcatcaacttagacatggaatatatctccacgtgacaaattttctc

SEQ ID NO: 110036 - DNA, 515 bp, Cannabis sativa
  modified_base (119)..(127): a, c, t, g, unknown or other
atatattaattgattttattcttattgtgcacttgcacacatgagattaaaagaagaaaatcttaaatctaaaatattaattctcatatttctactaataaaattattaatgcgtattnnnnnnnnnttattttttggtaattttattattggattatgagaatttgattggactaaactaatatttattacgtatattggatgattaggttgtaaattatgtttttatatatatatatatattttaatgaaatcagtttaaatagtagttaaaatagattgaatggatccaatctaatttaatagaatatcaattaatgcatcaaatggttagaactaatctaattcaatacatctattgaatcggatcgaatcggattgaatgaatcaattcgattggattgaatcaaataacaaaatctaatatcaaataaataatttaggtgccctttggtaatacttttgttttctaatattttaatcacaaaatgaaagtaaaatttttggtgccgttt

SEQ ID NO: 110037 - DNA, 693 bp, Cannabis sativa
cttttgggttttggactaggtttacgtctaggtgtgggtttgggtccttgttagggttctggtccttgtcagggtttgggtcaagggctgggtcccaaatccagacatcgactacggattttgtcgaaccccttggtctagatccggatccaaatctcgggtcccagtcttgttccatttctggtgccgggtcacgagcttggtcctaggttcaagttcggctctgggtcgggtactatgtcccggtccttgttctgtttcccaggtccctatcctgattctgggtcgaggtcccaattattgtgtgggtttgggtcccgatctaggttcgggttcgagtcgtaatttttgttcgggtttcggtctctgtctaggttttgatttgcgtttgggtccagattttagtcaagctccaaatcaggctccgggtgtgggttctcatcctgggtctttatttaagttgggtctgaatccaaagttccaatcccgatttgagtctggattcagttctttatcttggttgggtccttggttctgatcgtgttctgggtttgagtttgggtcttggtccgggtatagctttgggcttgattctaggtgtgggtttcagttccggtctgagtctgtgtttgggtttgtgtcccagtctggaccatgatcttggtctaggttcgggtccaggtataagttggg

SEQ ID NO: 110038 - DNA, 635 bp, Cannabis sativa
cgtcgccattattgatatccaattacgccactgtctgcgtacttagttagatgagtacaaacatccaacaaaatattttcctacacaaacaaacatgcaaaactgttaatacataataatatacattatgaagagttataaattataaaattattcattttaaatctatttaccgatagttgtaaggggaaataacccatttatctagattggtcatcttggccatacgtgcaactagtgcttgaaaaaggatactatcaatcccggatttggtggtaatgacaccaggatttagaaatacatattttctattaaatccattgaagtcctgcaacagttcttttaagtacctaataaaaacatataattaataattgtcgctctcatcaaatttattaagagttaaaaatcattcttgcaccaaatcgatataggttgggttcttaagtattacacggtacacaattcctgtatgtcattttttagaaatcaaatcgagtcgtcttcgaccccaaataaatttgcttcaacccgaaattggattattgatgattgcgaccactttctcatcgagttccaaaagttaatgattgaggtagtttgtcgaagttggacatgacgaccatggcttgttt

SEQ ID NO: 110039 - DNA, 506 bp, Cannabis sativa
aataatctggattacattgaaacaaagttttatttagggcataaaacccaacatcggttgcagttggagaagctggcgttgagtttgcccaagcatatgaggtcgcttgttggcgcaaacttcaaactcttctttccctagattgggattttctcaatctcaagaatccagaggagatgctttccaggaccttggattgtcacttcatggtatgtcgactttgttaatataattatactatctttttatacctcttttatactcatctgtttgcaattctccaggcttccttgcttcttttgcttccaataacctactctctgagcgacttgagtatttgaagggctagactcacaagtaaatatcccaatgcaaggatttgtatgagcaacgagacaagcgaaggaggaagcagagacagcatggaaggaagctgagaaggcaaaagaggaggccaagaaggccctcaaagtccaagctgatgagtttgaggagaagcttgctga

SEQ ID NO: 110040 - DNA, 1038 bp, Cannabis sativa
cctaggcacctacctagggcatcagcctttattgtcctgggtgccaaacttttcatctaggcctatatggcgtcgtttgcttccaaaaagcacttttatcttcatcgtgggaaaaatataagggtaatgcacaaaagaattctctggaaagatgtcccagagtgcccttggttgaatatgtcaacctgggcattcaagatggcctaggggttgcactaggcgcccaagtggaggaaacatctctaaaatttacctcattgatgttcaattttcttttgggtgaaaagtactccacaaatttcaatttttgtcaaattttcacgggcgtcaccttgtgaaacaaaattggcacccaagttgaaatgtcaacctaggcgctcatagttgggaacatgctcctttgggatgtcattaatgaaatatcacgtactggcaatgttccttgatggatttgaggaattgaggtctaaacatgtccccaaaaacctaaaccctagtcgcagtgtgccgagatcgattgaatgtcaacctgggcgcccattagggcttcatagtgccagggtaccatttcttgtagacttgtctccaagatttactaacatgtatgttgattataattctataatctaacatcctaaatgtgatctttctaaaataatgaaataaacacataagagattaagaaatccttacattgattacaacagaatataatgactccttccattcaaatctctagcccttgattcctatctgtagcagagtattaccaagatctgaacctggatcttctctccttcaatttggttagacacagtctttcttactatgctaggtattactttaacatgagtgagcatactctcaattcaccataggtttcaaaatatttgaggaagaagagggaatttgaaaaataaaagccctctttattttgtaattgtctgacaaaaggagactagagtcatttgaaaataagagctatacttttctatttatatgaagatactagggttaggtttagaatttaaatagaat

SEQ ID NO: 110041 - DNA, 696 bp, Cannabis sativa
tagtatagatggatgaagaacaagaaaataaaagtgaaataagaacttgcattgctcaaataaatattacaagtgaatcaaagatacaaagcagcttcactttgcatatggaatcatccctaaccttccaaggaagattaggtcattatgctaatcattctcataaagaaatatgagaagaaaagtgaagagaaattttgttatagtttctttactctaaaaattacaccaaaagattgtctaagatcctctaaagagagatccccccaagttatctcttctcttccctatttatagccaaagtgagtgaattaaaataattaataaattaattattttaatatttatttctagaaatatctgacataaatgaggtaggtgacatatgagaagggtagaatggtaaaatatacaatgtgcaatttattggctgagagaaatagtaaaatgagccaaataaatgcaaaggaatataaaattatagtttattttgaaattggtattttgggcacattgtgcatccatctgaataaatagcagctgaaaaattgatgaaaatggtggctggcgtgtgagggctggcgtggggagacaaggtgcagcagggggtcccacgcgtgatggccgcagctggcttggcaggaggagatcaggcgctcacgcccctctacctggagtgaagaacacgtgcgaagc

SEQ ID NO: 110042 - DNA, 763 bp, Cannabis sativa
tatttcaaaattcaaattgagtcgaatttactagcatgttgttaatttaccatccagtgcgtacaaaagttttggtcgaacccaaatccccgaacagacaaaagagcatacttgcaaaaaattataagtaaccaagagtcataagtctgctcggtcacttggggggcacctatatctgtacaaagcatttggtaaaaacaaaacaaacacagttgcatgatgattataaatagaggatgaaattcattaaagacaacaaaagcacgtaaaacaaggattaaaggctgcccaatcagcctgttgtttgaaaaatgaaaaataatttctagtttaaagacagcttggccggtcacgttgtcttaaaaaaggccttatggccgaacagatataaaaaagaaaaagataaaaagagaagtattcaaacatctggagtcccaggctctttgtacgggtcttctcgaccggtaggagctggaggatctgttgtctgagcagggggcatgtcaacgtcctggccaggggcagaagtggtcacctcgaattctccataggccacctgagaagcgcaatacttgagaaacaagtctttggaatcacccaagtaatcgaaatttgccttgggattagctttccagaagtcataaaaaatcgcgagacccgctttctctaaggaatttaccttctctccaagcctcatcagctccgctctctgctgctctctgctgttcagcctccaacttgtacttcttgacctcagcttcaa

SEQ ID NO: 110043 - DNA, 1316 bp, Cannabis sativa
ttactatgtaattactcatgaaatatgtaatttgagataattgatggttccaattgcacattccaattttcataatccattaaaattaagttaattacactatgtaattactattttttttttattttaaataaggtaaatactattttggaccctgtattttacaaaagttatagattggacccacagttttgttaaatgacaaaatggtattttccaaaatagtaaaactaggatcctgagcttaatttttgataatttttttaatgtaaccaacttgaagacaaatcctaatacgaacagatactattaatgtaaacagttttgtcataacattaacacatttagattggatttttattaaattttattttgataaaaaatcagttcacggtcctatttgtaccattttaaaaaatacatggtcaattttgtcatttaacaaaacaaatagtccagttaataatttttgcaaaacacagaatcatagtttttaccttttaaatattgatacacatattttactttgtaattacaacttattttgctaaataaaataatagaaattcatatctaattagtagttacaatgacatatttaagtaattttttttaatatagtctaattactttataattagacaattacttccgtacatagtgaatttatcaagatgattgatcaaaagctcaattccataattagattaagaaagatgtcaacaagtcaatttattggaagacatgaaataatcaatcatatactaaagtgtttttacattttgttatgttgtgggattgatatgtagagagacaactactatataaacacctgattaattaattaaatacataattatgtgacaaatactacaacaccaatgtaagtagtgtgttttaagaatgatacaattcttagattagattgcttcgtcttcactccaattggccttcactttgggcccagtgggcccatcctccccaaaaacttcattgggtaaaccgttcacgaatttctcaaaagctgacttgagcttcccaggcaagatcttctcaatcttcctaaactcctctgacgtgtcgtaatcaatcttcggaccccatttcctcaagaagttcaaccacggaggttctgtaatggccgaccccaagtaatccccggccacaagtgagaatcccttccccgtgtccataacaattttgctcttggcagtatcatttcttattccaatagttcccccgccttgcaaaactgtaccgggtttcgggtacagtgcgtgaccattaagggatgcgtaggcgactggcttttttgc

SEQ ID NO: 110044 - DNA, 1361 bp, Cannabis sativa
cacacgtgtcactgaaaccttttagtgacacgcgtgtcactaatgaggctgactggaaaggcagtttttagtgacactccacacgtgtcactgaaacctaatgcactcgtcttttgcgcatcactatagggatattgtgtcaggttttgccagactaaaaaggtaacagccacacacatggagtgtcactatatcctatttttcatttttttttcttttttattaatatttttagagatatagtgacacacaaaaagtgccactatattaaatatttttctataaaaaataattttttattgtttttttccaaattttaatttttatttattagctaatgttattattgtgcatattaatatacaatttttttttaattttattttattttactttttaatgaaaaaggcaataaatttaaaactacaaaataatataaaaaaaagtatttaataatttatacagtttactgtatatacagttcaacaagctatttctagcaaaaaaaaaaatacaaaacaaaaacaaaatatacaacaatcattcaatatttacaggtatgaacattaattcgaattcatgataattcaaaaataagacccaaaatttggaacagctactaagtaaatccatgaaaaaaccaaaaaaacttccaatcaattttttccatcaaacaccgaaggcctaaccccagtcatcgaacctagaactccccttcaaatacaaaatctatcaaatgcaaaacagccaagaccagttgctttaacatagccacctgcataaatgagacagagagagagaggtataaagatacagagaaatggagaacaagaacgagaaatggaggagaccgggaaataacttcggtgccaccttgaactgtcgagagagaacgacagaaatggaggaggatcgcacggggtggcaatggccaagtcgtcaaaagtgtctcattgtggtggagaacggctggagaacggagcgagcgagagagagataaatcaggggagagggacgagaaagagaaagcaagcttgaggtttttcttaggcatggacggctggagaatggctggagaaggctgccgccggtgagggaatagagagtagagagagctctcgtgacttagaagatgaaaagtgatttgggctttagggtttcatccttttctttttatataccaaacctaaataaataaaattaaaaagggtaataaattaaaaatttggcttgcctttgatttaattaaaaaaaatctagtaagcccttttttttaacatacagtgacacgcctggcatgactacatacacatgtcccaacatgccttgcgtgtcactgtatcataaatttaaatttattt

SEQ ID NO: 110045 - DNA, 780 bp, Cannabis sativa
ataattcttcaaaccattccaaatcattctcacttatacacattataaatgataaaagtaaatccccaacaactatatttgcattatagctttgaatttcaaaagatttagttgtgtaatcaccctttacacacttaattggtaatcatgtagaagttacaaattataaattatgggtaactctaccttttatgttacaacttatatgattattacatgtatgtaacttctaattccattatatagtgattattacatgtatgtaactcaatcattccattatatagtgattattacatgtatgtaactcaatcacattatatattatatttataataattttataataatatatatagtatattataattttaatcttaaatattatattattgaataaataatataacaataacaatacttaattatattatcttattaattattaatattggtccacttcaatgtaataaaatactttcaatcatatatactcggtcactgtcctgagtagtacattacattagatgtgtaagtagattatatcgtagattaccgaatcaacaaaaaatccagttgggtgatttagtcttaggacaaaagtattttgaacatataattacaattatatttcaccgtgaccttactgtatgttcagaattttataaacctttgtatttataacaattaatcatgtaataaaatatgattgacagaacaaaaatgatttctacttctttagtgataaatgaattacacaagaaatgtggttttataaga

SEQ ID NO: 110046 - DNA, 610 bp, Cannabis sativa
attggataggatcctcttacttttgatcgagttgttagcgtaagtcaggcttcttccaatttagttgattacgaagatccggccgttctggatcatagttacttacaaacctcatccttgagtaattttcagttctagttgtccctgtactctctcgatcagtactacgacaagccctatcccctcctcgcatagatcgactatgagttcttatacgtcccgagctagaacttgcctcgtcacgtaccgaccttctcttttgggaacgggttgatacatgccctctgctgggatttgtatgtgccccttccctatcagttcaagaaggacgttgacggtgtctcggtggtaagccacctgccctaagttgagtcctaggatctctctcgtaggggataggacttgtcgtagtactgatcgagagagatgaaagaaattgttttccccgctatcagccatggagaaatttttttcttttggttaggagggatttttctgagcttttttcacgtaggctctcaatgaaagaaccaaactgttaacacaaatttttgttaacgataatgagccttatttcatgataggattagcacaaaaaattatagaaaat

SEQ ID NO: 110047 - DNA, 1145 bp, Cannabis sativa
  modified_base (252)..(267): a, c, t, g, unknown or other
  modified_base (552)..(560): a, c, t, g, unknown or other
acaccctaactaatttaggcatgttagcgtgatttttaacgtactatgcagctcgttgctaatcaacgagattaacgaaaaaactgattaattaaaattcgcttatttaattaaaaaccttaagataatatatttataaaattctgggattccgtttacaaaatacatttacaaaagtttaatattcatatacaaaagttttgtcgcctggcgactatacagtaaaagccctaatgtcccaaagatcgtacnnnnnnnnnnnnnnnncctcgacatgtacaatcttcatctgtgagtcgagagactcagtaagaaaagcataacataaaacataataatatcccgggttgctcagccttagccttgcccttacctacacatagaaataacactatgagtcgagagactcagtaagaaaagcataacataaaacataataatatcccaggtaataactaggcgcccatacacccgatcataaccctatctccgtgtcccacacaaaactgagtctagaatgttcttacgatagtactatcgaccataatatcnnnnnnnnntcggtactctagtcatactctagtagcaccaatttgatatcgtcgatcttgtacttgagccaaaattacatctatcagtatcattacaactctatgtatactgataccgctatcaatgtaatctaacaggctccataaacatgcacgctaaaaatgtaataacatatgcatgacattatactaatcttaccatgattgcgaattcagatgtgctggccaacctgggtggaacaactgttcggcgaattgcaggctcctaaatcacatcgataacaacatggacaagtgacacgctaaatcacaaccggggacttaggttttaaaccaaaactctatctactgtaacttaacatggtaatatcctaaactagcagggaattaaccaaccaaagctctgaaactagcaggaatcgacaacacaaatttttcaggaaacctagcagcaaattcgggtaaccggttttacaggtcctgtaaaaccggttaaccggttttccccagaatacccaaacagaaccataactcaaccaaattaattccaaaccttccaaacctgcatattataccccaatagacatattccaa

SEQ ID NO: 110048 - DNA, 520 bp, Cannabis sativa
tcattagcatctttgaaaagagtaggccaaaagaatccactttgaagaaccttcgcatcagttcttgtgccattgaaatgccccccacattgtaaagcatggcagtggttcaagatagaatacatctcttcttcaggcacacatcttcttattatctgatcagcacagtgcttgtagagaatcgactcttcccaatagtaatgctttacctctgaaaaagagctttttcagttattgacgagacatctctggaggagtaacattggcagccaagaagttgacataatcagcaaactaaggtaccatcaagctccccctcaaactaaagagttgttcttcgggaaacccttcatttatctgcacctcttttgcattctggctttcttctatttctagtcttgaaagatggtcaacaactagattctcagtccccttcttgtcctttatctcaatgtcaaattcttgaagcgaaagcacccaccgaatcaaccttggatttgcatccttcttggtcataagg

SEQ ID NO: 110049 - DNA, 634 bp, Cannabis sativa
agttgttgttgatatttaattcttaaattaaatttcattagtgcccctatactgatactcttttttgatgttttacacttttcttatatagaattttaatattagcagtaaggatttggattatttctttggaggccctgcattcctagcatggtctcgtatgggaaattttcatgggtgagttaacgagtagctgaactaagtgaactcatttataatttatgatatagtgagtatataataatgtgtgtatattttttttttaatattcttattattttttatagtattcattggattagattacttttagtaagaaatataaaaactttccatgagaataagtactggttaggaaactcataaatgcacatggttatattatggatgtgaagagcaagagtaatcgaataatgaatcttatcttaatcatcataaaaacaatattaataattatttttacagaaacataggttgtttatccaaaaaattacagagaaaacatggagaattcagttgtatgtagattcaaaatgaaaaatgagtccaaagtacaatcaattcaccattcaagcagttgagccgatggaagattagaaagaagttttattatactctttttagtttttctaat

SEQ ID NO: 110050 - DNA, 675 bp, Cannabis sativa
  modified_base (208)..(216): a, c, t, g, unknown or other
ttcgcaaacataccaagagccccctcccccaacgagattaccctgatgactagcccctagccctttacggtgtgggggatagatctcattgggtcgttgccaacacgaaaatgaggggtaaagtatgctatagtagtcgtggactacttgacaaagtggacagaggacgagcccatgaagaccataactgctaaaaaagcactagacnnnnnnnnnaaaaacatagtgtgtcgatatggcctgcctcataagatatctcagataatggaaagcagtttgactgtgaagaattcactgacttctgcaaccaacacggagtcattaaaagtttctccatggtggcaaggccacaaacaaatggacaagcagaagtcgtcaataaaatcctaaaggtcaccctaaagaagaagttgctggcctgcaaaaacaactggcccgaagaattgccaaaggtgttacgggcctaccagaccaccccaagaaccgcaaccggccactcgccattctcaatggcatacggttgcgaggctatggtcctggtggaaactttgttcccatcccataggagaacaacttatgatccagtaacaaacaaagctttattacaagaagcactggatcaaattcacaaactccgggatgagtctcaagtacggatggtagcttatcaaaaga

SEQ ID NO: 110051 - DNA, 620 bp, Cannabis sativa
ttaaaaataaataaagaatatagtattttgtgttaataatattattggtttaattaaaatattttgtattatataatttaatataataatttttaaaaaatataattaatcaattaaaaagcgacatatctaaaataataatacgtaaatttatatagagttttttatttaatatatatcattattttatttttatttatatttaatgttattatttttttatatataattacttattaaaaatacaattattcttctaatcacttctcttttcttcttctcccttatttcttttttataaaagtgctctttaaaagactcaaagttgtaaccaaaactaaaggcccatgatatttccttttaaaagaaaaacagaaattcagactcaaaaattatttgaaggacggtttagaatagattaatactactaagggaatgataatgtgaaacattaacttatttgttttgaagatctagctttgaaatattattcccttagtaatataactacccttgaggataattttgataccttaaaaaaatgtagaactgaattattagcttctattatattaatttgaatagcatttttcaattaataaataaatttaaataccaat

SEQ ID NO: 110052 - DNA, 845 bp, Cannabis sativa
gtggcttgtttttaattaattaatttgattttttttaatgtgttggctgagattaatttataataaaacaagttttatttcatttttacaaaaattagaacaattcatggaaagcttcctctctcttcgaaaaccttatagaaccagctagggttctttaatttttttcatcaattactgtgttttccagcagctcttagtgtaatccaagccaaggtaaagtttctagcaacctcctctttagtttcttaatttttaagaaagtgaaattttgaatgatttgagattttggttgctgtagttgctgcttgtgtttgttattgttttcagaggataaattatggttagaaatgttgaaataagcttgttttgatggttgttaatagtattaaccaagttttgagttttagaattcaaacttggagctttaatagtgattttagattttgagcttgggtagttgttctattgcttggaaaatgtttattgggtaaaatttgtaggtctggaaggtttggtaaggtttggagtcgatttgtttgagctttgaacttgtttgggttttctagggaaaaccgggtaaccagttttacagatacatgtaaaaccggtcaaccagtttttgcagttcggattcccaacaaattcaggttgtcgattcgtgttagtttcaggtttctggttggtgaattccctgctagtttagggtattgccattttaagttgcagtagatagggttttggtttaaaaactatgtcctggatgtgatttagcgtgtcacttgtccacttgtgatcgatgtgatttaggagcctgtaaatcgccgagcagttgttccactcag

SEQ ID NO: 110053 - DNA, 505 bp, Cannabis sativa
  modified_base (255)..(255): a, c, t, g, unknown or other
ctacctaaaattttggatttataaaccgcataaacttaatgattatttttagcagcataagtacccaatgtttataaaactgtaattttcttccggttttatcagtacaaactctgttattatcttaaacaggacacatataagacctaaattttagattatttggtctggacgaaaatatgtagtattagttacttccaaatcttttcccaataaatttaaaacggagtctgtactgacgaaaatagagaaaanttacagttttacaaacatttggtacttatgccactaaaaaaatcattgggtttatgccgcttacaaactcaaaactttaggtacttatgtctctatttacccaaaaagatatgttaaaagacacatagtgcctagtactctccaatatcatagtattgatataaagaataattcttactgttttaactttgcttggacttaaccttcaaaatttaaattttggcgacaaaacttctaaaaccacgatatc

SEQ ID NO: 110054 - DNA, 1285 bp, Cannabis sativa
ctagtggcatgatccgagatgtgtattatccagaatggctggccaatccggtgctagtgcctaaaccaagtgggacttgtcgggtatgtatagattttaccgatctaaacaaggcctgccaaaaggactgtttccccttaccacagatcgaccaaattgtggacgccacctccgaattcaagctactgtccttcatggatgcttatgccggctacaatcagatcaagatgcacattgtagatcaagaatgcactatcttcaggaccgataagacggtatactgctacctagtcatgcctttcgggttaaagaacgctggtgcaacatatcagcgaatggtgaaccggatgtttaaaggccttctgggacgaaacatggaagtatatgtggatgacatgttggtcaaatcaaaggcatgtacaagccatgcaaatacctcgcagaatgttttgaagtggttcggagatacggaatgaagcttaacccaaaaaagtatacttttggggtcaaatcgaagaaagtttctaggatttattgtcagccaacgagggatagaggaaaatccgaaaaaaatccaagcactcctgaatatgccttctccgaaaaagcacaaagatgtacaaagcttaactagaaaggttcctaccttgagccggtttatctcccgatccaaagacaagtgcattcctttcttaaacatcttgaagaaatgtgaaaaattcaaatggtccaacgagtgcgaggaggcattcaaaaaactaaaagaacacatggctaaacccccgatcctatcaaaacttgtccttggagaagacttgttcctatacttggccgtctctgagaatgtggttagcgcggccttagtacaagaagaggaaaaaactcagcatctcgtttactatattagcaaacgcatgataggggcgaagagacgatactcggtgatcgaaaaactagtttttggccttctaatggcctcaagaaagctaagaccctacttttaggctcattcaatcaaagtattaaccaaccatctgctccgacaagtcctacaaaagttggaggcgtccgggagacttctcaaatgggctatggaattaagccaatttgatctacattacataccacgcacctccataaaaggacaagcgctagcaaacttcataacagagtgccatgaggcggaggctaatgcaagcgtgcctacacatcaaatcccagcatggaaagtctttgtggatggtgcctccaacaaaaatgaatccggagcaggggtagcaatgat

SEQ ID NO: 110055 - DNA, 637 bp, Cannabis sativa
gctagcgagaaaggagtgtgtcccgtggttgttttctcggtagttttgtgggcccagagcacctgaggtagcttgtaaacccatttgccttaggaagcatctaacttcatcttgatagtatcctttagcgttctattaacgacttccacttgtccattttcccgaggcctggatactgacgataagcttttgataattttattcctctcgtagaattcagtgagcaggtcgccatcaaattgggttccattatcggatactatcttcatgtgaattccaaacctacagataatattcttgacgacaaagtcaaggactttcttacaggttacggagacgaggggctcagcctccgtacattagaagtcgactgctaccaccgcatacttttcccctccttgcccagcgggtaacgacccaattaggtcgatcccccatatagcaaatgggtagggcaaggtcatcattctaagttctgttggtggtacgtgaggtatatgtgaaatcctttgacccttatcacatttcttgacaaactcatgtgtgtccttattaatcgttcgccagtaatatccttgcctaatgatctatttagatagacttcctgttttaattccccttgcctctcggaatcata

SEQ ID NO: 110056 - DNA, 711 bp, Cannabis sativa
tatcaagaacaaattatacacttttccttgtgtgtggtggatcaattagaaggactacgatgtgagtttttaatcaaccaaaggatacaacatacgagaactttcgagaataccctgatagtcatcaagaggtatatattctgatcttatattttatatcttaatataatgtatacatatctagagatccattgagttatggtacaatgataatcagatatatatataaattcgtcttcagtgtagtacctaatttagtaccattaaaaccaacaattggtatcgagagcagttccatgaatgtatatacattaaatggtgtgtgggttttatgcatttacatatatatgtatgtgaatagatgattatattattgtgaatgtatgagaggtgatcaatcgttaattatatggtataattgggtgtaggtttcattattatttttttctaaaaattaatgtaagccattatggcgcataagaattttttatgtaattttaattttgtaaattatatacctatatactgttcatagcatgtgagcttagtttctaaactcgaaatccaaccatgcatgacaaaatcacttgcatgtgagctcaagaatttttcctcgctcatgcatagccacctcagtggcttcgagtaccgtgcccacgcaaggaaaatcatgcatgcattgcatgcaaaagggacgtaagtccctaacca

SEQ ID NO: 110057 - DNA, 741 bp, Cannabis sativa
cgacaatgaaaaatgcgatggatgactagtttgatcacatgggtaagtctagaaccttatttcttcgtgggatgtatattggagaaaataaaataccggtgttgtgcgtggttatggtttttgaccattttacccctagggttgaaataggtgaaaagttaagcattaggggtattttagtaaattgccaaatgaagggataggtggctgcctaggttcatgacacctagtaaatattatttcagctaagattaaatcatttaatcttttatcacttaaggaaaataggaggaaaagccaaaaaagtgaagaacactctttctttccttctctctctcttcgaacccagctagaaccatagtgaattgttgctggattcttcatttcagcaaggaattcaaggagaaatcaagttgaggtaacccctagatcatttgttgtatttttttcaagctttgatattggtttaaatatgtgattttgagttttaaaggctgttagggttagaaatgcttagggttcggtgtttatgttcaatttaagtcaattgatggttttggtagctggttttattgtttggtgttgtatttatgcaagtttgaacttagaaacccaatctttgatttaatggcataaattgattcagggactttttctgtgaattactggttaaaatatattgtgtataccctaattaggtactttggaaggtttggtttcatttggtggagttttgagcaa

SEQ ID NO: 110058 - DNA, 2023 bp, Cannabis sativa
catcagaggacgtacccctaatttctagggcgaacctctatatttctggtgtttgtttttctctctaactctactattttgtggctttaactttgtgtgtgtattgtgtggtgtttctgggaagatttctgggtaagatcgatcaagagatcgagaagaatctctggttctagggtttgagaaccagagagaaggtagagagaaagagagagagttttgagaaactctcgaaggttcgaggagagaaatgagctagggttagctctgaactctcttggttttattcaaaggagaacgacagatcgttttgatcaaacgatctgtcgtgcaggtaaggaacgacaagttcctgtgtcgttcaacagaaacgactaaggcttccagtgtcgttcaaattggttttaattagaagttcattggacatttatgtccctgtcgtttttaactataagcttgagttggtgtagggcaatcttggaatttcaccaagaaaattcctacacatcccttgaccagtatggttaagtagaggctccattcttctttgttgagtgcacttccattgattaagattcgaacgtgctgaaagaacaaccgcagtagctgtcgaagttttttggttccacaacaagtcatttcgggcattccaaattgcccaggtgatcattaacacttcctctacattggaagtagagttcacatcaaacagatgccaaaaccagtccatgaaacacatctcaaagacattattaagatgcacaccagacttaatccaacatgaattgaattggcaaaagaacaacgcactaacacatgatgaattgtttctgcatcagcattgcagagtgggcagagtaaattcacaactatatgtttcgaatgtagctgagttttataccatattagttttaactcgtttacaagttgtaaaaaaaaattatatatatagtataattttaattgtttacatatatattaccttaaaaaaaaatgtttacatacatttatattaatttggattcttaataattttgatttttcatgtaattttacatcctgaaaaatgggtttaatttttcgacatcaagataattctaattttattttctttgtttatatgatggcatacattatacttgaaattgagcataatttataataaagacaataagtttaaacaatctatttcactttcacatgtgtgtttgaaaaataaaatatgcctataacaaattaattaaactatatttttagtattataaattattttatatttttgaaaaatttgcataattaggttctaaatatttatgttacaagctattcaaatacaaaaaatattaagaaagtgggagttcatccttgacttgagtttcaatactacaaattaaccccatcaaccaaatttttatgaagtagtgtgaaaagaaaattaaagtgaaaaagatagtgatagtatgtatactatgggttgggacagcatgatatgatacccaccaaaggccttatcatcaccaggaggcatccccacacaacttacacaaattcgatagatagaaaggaagaagaatatgcccaaaccaacacaataccaattaacccacttaacaagaggacctacctagtgttgtgcttgtgcccaccacattataattacaccatacttttttactttgttgcacttgttgtttttatatatgctgtattgtttcatcattaaacttctatatattcactgaagtgaccaatgacaaggactatatattatttaaattgtggggtatgcattttacataatatatagctacaaaatactgaaaaacacaatgcattcaacgaaattgaatgaactatacctcttttaggtcaagaacatgtgctctcaattttgtcactatgtagaagattctttctctttttctcacttctatagttagatactttttgataatggaaattgttaaaaataatcctccacttacactgatattaagtccaaatacaacataaacacaaaggacag

SEQ ID NO: 110059 - DNA, 533 bp, Cannabis sativa
caacttacaaggcttagctacatatcagtagaaattgcacatatatccttttttttattaacccatttcatttttacctttttttctatatatttaatttatatcctcttttatttattatatattatacctaatgaaaaaaaccttcctcacctccttaaacattactcttatgtgaggatataatggacttataaaagggtacatttcaattgaatttaaaataaggctatttttggttaactaatgaaaaaaaataagtatatttcaacttacccctaattatcacataatatttttttttgttcttttttttataaattgaaaaatatctcttttttatattcattaattaaaaatatatttatattatatcttactattataaaaatctatgtcatagttctacaaacaattttactctttacaaatagatgttgacaatatttccattttgttgactggtcataagtcaagttttaactcttcttttttctcctcaaaattagatattaacaatttggctattttgc

SEQ ID NO: 110060 - DNA, 2113 bp, Cannabis sativa
aacttatggtatctacacattatttatatgacaattaaatacccttttgatacccataacataattgatcacttaattttgtattgcactttataataacatatacattatacatatatgtgcccacataggattttaatccaataaatcgtcccagtgattatggcgggagttttaggtatctatgatctcatcatagctattaatgttatcatcaatactagtattaatcccaaagctaaatcgtattatctctttgatggctatgcccatctctcttccggtctcgctagtggtcttgttggcctctctactagtatggctattggaattgtgggtgatgtcggtgatggtatatatattctcttctcctttctacttcctatgtttcgagcatagacatcataaagttttggtttgtagtttatgtcaaatgtcaaattggttgagtttaattctatgcctcaagcatgaatatgatgttgatacttagttttcaattaaaaggaggattttgttgttaatgatggtttataatatcattagtatttttttttctttaattttagccacactgagcaactacatgaacttgaactgatatgattaatggttttggaagttcatagttggtgtttttttctttttttgatattttgacattcctacatgagtatcgtagttaattccttaagttacttgtttatttattataataatactttattgcaactttgtagtcacaaaatattttgatttttaacaaataaatatgttgctctcctgttcttactgttgtacaactaaaattatatttatatcaatataatacaaattttgtttaaaaggaccgctgatatgcaactcctaaaattttattagtagtagtgttgaaaaataaaatcaatttgcatttatagatagacaatgattgatactaatggtcttccacccatctaaagctaaattgttttaagagtattgatattcggcagtagtggtgcctagcacttctagacatatcgccttgcgattggctagcgatattaaattatatgagactcgatatttaattggactaatagagatattgacacataggagggtgctagacaccactagtgcctcttagcatttatcttattttaagcacctgcattaagttaatttttcattaattaaattgtaggggtgtaatttatgatttctttactttttcttcattggttgttgcatcattcatatcaaatattctataactctaaattacaaacattgtatggtttatattgtttttttattaagtataattggattttgagctgagatgcgttatttatttttgttataatactttaatactcataaaatatgtaattagaagattcatttcatacacaaaataacacatattattagaagtattataaccataaatctaaagtccttgatgattcaaagaggagaaagaacatgaatagcggaagcgtaccttaatttcttgatagagataattaatttagtgatgtcacatttttgggtaatgatcttccaagaatacaagatttagggttttctttagttttctctcttgatgggggaagatgaaaatagagttgctcttgtttcttagggaccactaccaatttataacatcatagctaggttattaatcataagtatttctaatttaacccgtcaataaattagaaatatcgcttaaggtatctacacatttaccccatgatattttaatactcatgactacaattactaaaatgataactttatttgggtcaaactttatatagcaatataccaatacatataagcccatattgaggattttaatctaacaatctctcacttggaatacatatatcttttgatagtatataaccttataagtgcttaactattgttatcataattataggtgtttcaaaacaatctcgtctattgattatactaacataggatcaaagcggctttcgcaacatttagcatagctaaacccattaatagtcacgtatatcaatataactaaatgacataaatcaataatggatgtgtaacaagaaaattacatgcaaatattgttgggttttatgcc

SEQ ID NO: 110061 - DNA, 893 bp, Cannabis sativa
cttgaaagagtaagatgcatgctgaatagtgttggtttggagagaaagttttggggagaagcattaaaaacagcctgttatctaatttacagatgtcctacaacaaccataaactttaaaacccctcaagaaatgtagactggtcaaattcctaagtatgaacatctcaaggtatttggatgcacaacctatgctaacataagacaagacaagctccaacctagagccattaagtgtctatttctaggttaccctgatggaatcaaggggtacaagttgtggtgtcttgaacttggttttaagaaatatatcataagtaaggatgttgtgttcagggaagataagatggccatgaaaatgacaaaaaatcaaactgaaattgtctctgcaaaagacactaattcaagcagtttacaacttggggtggagccaattaataactcagatcaaatacaagaataacagatgaagaaagtcaagacaaatctgatggtgatcaagatgatcttagcaactatcagctggcaagagatagagatagaagagaaataaggacacctaatagactaggatatgctgagtttatagcatttgcactcactgttgcagttgagattgacagttcagtcccttcaagttattttgaagttgtcaatggtaagaatggtaaggcttggttacaagcaattcaggaagaaatgagttcactcaagtagaacagaacttgggttgtggttaagaagcctgatagaaaaaaaaaaaaaaggtgttggctgtaaatggattttcagagaaaaggaaggtgattccaaggatggtacaaagaggtttaaggaaagattggtagctaagggtttcactcagcaagtgggtgtagatttcaatgaaatttt

SEQ ID NO: 110062 - DNA, 617 bp, Cannabis sativa
tcaacatatccagtacacaatcacacaacatgggatgtaccacaaaacataaaagatatcattgttctgccaccaaaccagaaaataatatctggaagaccaaggaaacaaagatttttatctgattgagatacaaaaaaacataagaggtgcaacaaatgtggtcaacacgggcacaaccgaaagacatgcaacaatcaagcaataaaatagatacatatgaattatttgaattgtttaattctctgtgagaattcacacaggatgatatgttatattcgatacacttgggatattattttgaaaatttttaaacagtttgctaatagttgcaaaaacgttttatgccagttttgacacttgttaaatatttactacgaaaataacttatttattaaagtttttaaaaaagtcaaatagaaatttataaaacataattaataaaggataatgaaaaaagggaaaaacaatgaataaatacattgataagcaattaaaattacaagtacgctgagtagtggacattgtttgtatatagttgtataatagtttgtatatagttgtgcgactggatataaaaacttgaaaaattagaaaaacataaaactgatgctgat

SEQ ID NO: 110063 - DNA, 545 bp, Cannabis sativa
accataatattcgctaaaatccatccagcctgtaattttgaatatatcaaaaggctcgatcggttctaaatcccagctcgcatctatgtgacctaccctatcttccataataccgtactgctaagccataccataatatgactcatgacagttaatctggacgtggaatctaggataccagctgtcaaacttatgagccatacggtcaatgagaagggaattcgagatataaaaattaaggcaggagtcttggaaggtggctaatgtattacgtttagccctaagtacagtaggacaccaactatattgattacctcgggatactccttcacgggactcccgagggtcagtattttgaaggtattgtgcttgagccaatcgatcctaggcctggtcctcgggcggtaatctattgccaagaagaatacttgggcattttgtaatcacaagtatattctttatcagcaagaaggcccaccgatcgcaggttaacctcattaaaaaggaaattgcatgaccgaagatcgtagggaagagttaatagg

SEQ ID NO: 110064 - DNA, 770 bp, Cannabis sativa
ttttttttgcggggttgatagaagtgagtatttttttttaaggatagaagtgaatgggttagatatacagttttaaaaagaaaaaattatagtgtgacatatataatttttgtatctaagtataatttttgtatataagtgaattacagtaccatatatgatattatcaattgatatagagtattgtattaattgttgtgttaaatgaaattggtttcagtagctttttaaaaatttacaagaaaacaaataatttaataatttattatattatttatgaatataatatatagtgatatacttgaatttatgttttttttaaacataataaaatctaaaaaaatattttaacaacatatgtaatttaaatttcattttttttatctttatttttattttaattaaataataaatataataataatatggtaataaaagtatatagtacatattttaaaaaatatatatttaaaaaaaattagataataataataaatgtatagaaaaatcataatcaacaataatattatttctttttttaaaaaaaaaattattttaagtattacttgtaactacttttaaaaagcatacataaatatattatcattaataataaactaataatacatatctataaacaaaataattaaaataaataaataaattcctatttttctttaaaaaaaaaatattgtacttaaatatggtagatgatatatagctaattttaggtgtgtacatttgatacttaaatactacattgaattcaa

SEQ ID NO: 110065 - DNA, 958 bp, Cannabis sativa
aaatcaggggttggcaaatctaagaaatttggcccaacttcattcaaatccagctgtacattttccataatctccacgttttgcacaccagagacattacctaatacaaatccatccggcagtttgttgcttgctgcctgtttttgtagctaagttttgttgaagttttcttagtttctctgtttgcagccccagttcttgttcttgctttgcggctgttttaaggcctttaatcaaatatgtaataataagattattattctatatgtaattgagtcttattttttttatataataattagtatagtgaataatagataatgtgtaatattttaatttttatgtaattaaattaatatttttatgtattttaatttataatatgtgtttatatttttctagtatattagtattatttttataatattttaagttatgttttgtataataattagtatattaaaaaataaataatgtataatattttagtttttatgtaattattattttgatacatttaaatttttaaaaattattttttcaacattataggagattctccgtcctgtccccgccccacattagaaaattccccgccttgtcctatggagaataagtggggatggggatgaaagaagcactccccactaattttctgctccatgtgcatccttatatattacattaatattattttaaaattactgtaattatttaaaggctatctaaattatttttataaaagtagattaaaagcatactttatgcaaaaaatcttatacttgatttcggttgaaaaacacttctatgatcatttctacacacacaacaaaggatctccaaagaagacacgaaaatatatcccacagaaacaaagacacagccacacaaactcgagctctaaaattttaatgttttattgattgagtaatacttttacaagctaagaattacactt

SEQ ID NO: 110066 - DNA, 536 bp, Cannabis sativa
ctgcgagtaggagatctggtcctttgaaaggtaatgccaaacaggaaaaaacccatcgcatggggtcttcggagacaattgggaaggaccatatctcatcacagaaaaggttggcaacgcaacataccaacttgcaaaactcgatggtactgcaattcgaagagcctggaatggcgaaagcttaaaattctattatcaatagtactcgctatgtatttatacttagtcatttttacataaaaattctacgtatagggggtatataccactatgtactattgatcaataaagagttattaaatttttcaagattttgaaattttctaccttaatacttattacaccaagctgcagttaagtcgcaaccaagatattataaatagcaaaacacgcgagtactcgtgtactgcaaaaatgttatagataaatattctcgaagggatgtaaattcgttcaaaaggaaaaataaacctaagtttgtccaagtacaagctccgagtacccttgtaacgcatatatatattaaaaaaacaaag

SEQ ID NO: 110067 - DNA, 522 bp, Cannabis sativa
aagccttgatcgccagcttaaagatagcagaggccttgaaagttaaaaatctcatttgtcatagtgatttacagctgatcatgaactaggtcctcggaaaataccagaccaaaggcttgaaaatagcaaagtatttagagaaagttcagaagaacttggaaagattcgattactttaaaatcaaacaaattccgagagaagaaaactccaacgtcgacgccttaaaagctggccttgcagaaagacctggatgaattaaatttggttccggtagaactgctgagcgagccaagtatatatgaaattgaagacattgagatgataaatagctctccaacatggatgaggcctattatcaactatttactcaatgggcagcttctgaatgacaaaaatgaggcacaaaactattgtatctagtgcctcgctacacaatgatcgaagacaaactatatagaagagggtattcaatgcccctacttcggtgtgttcctctcgcagaagcgaacgaaatcattagag

SEQ ID NO: 110068 - DNA, 698 bp, Cannabis sativa
taaatactagatcttggcttcaatgattatgagcaatagttattttaacaattggtatcaagagccaaagttattgattttagggctccatgtttgtttttttttttcacaaaaccattttcttaaatctgaaatttgtggtgatttttcggattaatgtgtttaaagttatgtgaatatgagtattatcctctaaatgtgttcatatatgtcatggaaataatcttttacattttctattgagaaatatatgagttttaacaatggagaaacccattttggattcatcattttatgatgtattattctgtgttattagagtaaatgggtattagaaaatgatagaggattaaaaatgagacaaaacgcctcaaacagcgtcgaatttggtggctggatgtgggagatacggtcgggtaacgaaccgggtcgcgccgatccgagttacagacctgcggacccgttggggaatgttttgggtgacagggacgagaaaaacgacatgtcgtttgcctctgtcaggcaaaagcgacatgtcgtatgatcacacggttcagccccttacagaaaaaatgacaggtcgtttatgaccctgtgacatgtcgtcgtccaccaaacgacatgtcgttttccgataacgacatgtcgttcggtccgatgctgaatcccccaaatcgcaaacgacgggtcgtttctga

SEQ ID NO: 110069 - DNA, 3112 bp, Cannabis sativa
ccattgacgcaagtctcatatggatcctcaaattctcgaaaatccaccgcgctctactactcaaactcaggggcaaagctccggcaatgtcctccccccgcagaactggaatcctttccagaattccctaaactcttctctcactgtgaagctcgatcgctccaactatctcgcctggaaatcataaattgttcccattgtgattagtcatggccttgatgatctgctgttcaccggagttgcccctcctgaaagactggtcactggagccatcaatcaagaattcatctcctggaaaagaaaagatcagctacttctcagctggcttagatcatcaatgacagaatcaattcttggatctcttgccaattatctctcgtctcacacactctagagagctttagaacaacgattttcctctcaatcgaaagctcgactactgcaaattaagtcttaactctcgatgattcagaaagggaacctatccattgcagactacttcgacaaggtcaaggttcttggtgataccttgtctatagctggtcatccgattgatgaaagtgatctcatcatgcatctgctaaatggtttaggtccagaatatgaccctgtagttgtccatgccacaagccttgctgatgatcttcgttcaaatcaatccagtctcttcttctcactcatgaaagtcggttggaaaggcattacaccattggagatcaaccatcaaagccctttgccaatctctctgtaagttcttcaagatttcctactggttcaagaaccagtaattacaatggcagaggcggtgcctcaagttccttcaatcgcagcaaccccagatccaacggtcgtggctatccctccaatcgattagtgtgtcaagtttgccataaacttggtcacactgcctcagtttgtcactatagatttgacaaaaattttcaacccccaaccagtgaacactaggcctttcttacagaacttgaggaagatgatcctcaggcctactacaccaatactttcccagactttgctcaagatcacgaatgatatgctgatacaggagctaacaaccatgttgctactggaatggaacaccctgaaaaatgaaactctctacttgggatctgattctttagctgttggaaatggcaaacaactccaaatctctcatctaggtaactcttccttacttacaagtagatctcctttatagttaaattttgtttcaaaagttcctcaaatcacaaaaaaccttgttagtgtctggaaactcaccaaagataatagtgtatttcttgaatttcactcaacttgctgttttgtgaatgataagaaaacaaggagggtcttacttaaaggaagagtcaaaaatagtctatacctgctcactcaacccaccacaagaacacctgtccagattcagtgccaactaacaactaaggagtcaaaatgtctttctgattttgaatgtaatactgtctgtaataaagatactactgctgtagtctctaactcatgtaccaattccacaatcaataaagattccaattttcataacactgatctcccctttactgctcttactattactagttcccaggatattaacatatggcactctaagttggtttaccctggtcccaacacactttccaaaatcatgtctaaaattaattacaaaggcactttcaaacagctcaaattttgtgatgcctgcaaaataggcaaaagtcaaaagttaccatatcctgtgtccactagtagagcctctgtcccattagaattggttcacactgacttaagggggccttcacatatttcctccaaagaaggttacagatatttcattcattttctagatgacttcagtaggttcacctggatttttcctttaacattaaagtcacaggcctatcccaccttcctacaattcaaatccctagttgaaaaacaattctctcttcccattaaaaaggtacaatctgattggggaggagagtataggaggtttgcctcatttctagcatttaatggtgttcaactccagcactcatgtccccacgatcatgagcaaaatggcagggctgaacgcaagcatcgacatatcaatgaaataggcatgacactgcttgtacaagctggtttggacctgtcaaattggtggttggcctttcaacatgccacttttgtcatcaacaggcttccaacacctgttctcgacaacatatccccctattaatgcttgtttcataaacaaaatgactatgagtttctcaaggtgtttggttgcacctgttttccttatctcagaacatttcagcaacacaaaatgacaatgaaatctgagaaatgtacatttgtcgggtactcttttcaacacaagggatatatgtgtgaaacacaatcaggcaaaatgtatgtcactcgcaatgtagtgtttaatgaagaagagtttcctgccctactcaagtttgcaacatctcaggtaaactcacaacctcctcaaatatttgcttctgcaacatttactactgcacctaataatttttctccccgtgttactgaggaacaacatgctgtcaccatgactagtgagccacgacaacattccactttcagttctcagtctatgccacacaacaatcccaccaactaccagcagactaaccccacacaaaaccagaccccactcttaggctaccaaataacaaaactttatcctcccgagactcaaacttcctacctaaaaccaatcctacatctccaagccaacctctacaacctacacaaacaaccaacacacaccctatgcagactagggccaagtcaggtattcacaaacccaaagcaaatctagctacaaaatatcctttaccagaatctctcttacccaaggaaccaacctctctcaaacaagccttagctgaccctaaatggcatggtgccatgagtgatgagtttgttgtcttagttcgaaatgggacatggacacttgttccttacaaaccagggatgcatgtgttgggttttatgcccttaataaaactcatttcaataatcagatttacttattaatatagatcaaaaataacattaaatgttgcatggt

SEQ ID NO: 110070 - DNA, 970 bp, Cannabis sativa
gtcgatgcacaaactccaccagtcaagcatagaagtattggcggctgagccctgctcagcttagggctgcccgactatgtaggagcaccagactcagggctggctggccttgagtataccctctcccaaggtatggtcgactaggctctgtccaatccgaggctacaacttaatcaaagaaggccaatcaaccagtcccttgcagcaacagatccttctatgcaagaacaattggaccaaatacgcgacatgctcaagggcctagctagtccaaaacccttagaacttaagctagtagtgcaaggggatcatcattctcggcatacatcaatgccttgcctttgcccaaattcaagatgccggcttggaagatgtacacgggaagagaagaccctctagtacacctgaagtactttgagatccaaatagatctcctacaaatgtctagagatgtgcaatgacgaatctttccgacgactctagttgaaatagcccaacaatagtatttcaagctgcccccaggaagatttaattcttgggaagagctctcctgagaattctatattcagttttttgcttcaagacaaatacctgcccgactggaggatcttgtcaaaatgaagcaaagacaaggtgaacccttgaaagactacattcaacgtttcatggctgaggccaccaaggtcacacgcctgacagaagaaggccgatacacgaccataatcagaggcatcttaccgttgagtaacttctagaaagatattaggaggacctcaacgaatagcatggaggagttccttgagcgagctgatggcttcataaagttggaacaagctgtccagcaagcccagataagagggcaggacaatgacaaaaaatccagggcctcatagcgccccaaccactgtccagcatgccgaccagcacagacgatctctatcaattttcaaacaatgagaatggtggaggc

SEQ ID NO: 110071 - DNA, 4791 bp, Cannabis sativa
acatcatccatcaagtaccataggttcaaaatttattcgcagaaagtttggcaaagctggccacagatacagaagcaaaaatttctgacatcatttggattgactttctacccgtgccaaatatccaagcccccgaaacaataagtgtcttcgattacttcaccttctagatgtgaccaatcgtcaagtacgtaagtagtggggaattgtccacaaaaagggttgcaacaagaaagatgtagtatcaggtgcctcggtacgttgtgatggacaaaaaattgtatcacatgggttgttcgtgccttacctctgatgcatagccaggaccgaaataagtgcaaaaattcataaaatgcacgaggaattttatagagattaaacaacaaggctcaatttgtccaagaaaatccttaggcaaggatatttttgtccaataataaagagcgactgcatatattactttcgcaaatgtgacaatgatcaagatatgtgaaggtctcgtagcctcccctaacggaaaccactacaatgactagttcctagccttctatctaaggaaacgatctggtaggaacccttccgcccaggaagggtgggctaaaatacgtcattgtagttgtcaactacgccaagtgggtagaggtggggccaattaacaccatcacctctgagaaggctttagactttgtcattgaaagcatcgtatgtggttacaacctctcacaaaaaatattttctaacaacgggaagcaatttgatagtatccacttcacctaattttatgaaagacacaaaattgtcaagagcttctttgtagttgcaagaccacaagctaatagacaattgaagggtgtgaacaaaatattgaaagaaatgttgaagaaaaatctcaatgcaatggccagaagaattgtcccgtgtactctaggcatactgaaccaaagagtggacttaaacagaagatacatcgtattcaatgatttatggtgtaaggttgtaattctagtggacaccacaatcttatctcactggcgagatacatacgatgcaatcataaaccatgctttactccaggaatctgtagacctcgtcgaagagctccaagaagcatcacaagtttaactaaaaatgtatgaaggaaaattcgcctaacgtttcaactcaaaagttaaaagtcctcgttttgagaagagtttttcctgcaacctaagattcgaaagtcagggtgctaagacttaactttaaaggattttacgggatacaaaatgaagtatatctagaaacatatcaattgaaacggctagatggaacaaaggtcctgggggcctagaatgttaaacacctatgctagtactaccagtagtcaagaggttttagtcttatcttttcttttcagtatttttattttcaattaatgtacgccccaaagacattcctgattcaaatggtgtgaacaaaatacataaaaactaatttcaaaaaagaaatctattatccgtaaatttccaaataatattttttcatctaccaaattactttgtgagcctactattactttcaagattatcacatggttaatttattttgtaaagattagagatggcaattcgtgtttccatatcaaatttgtgttcgtgttatgcaggttgatatattttattgatcaaccctaactcgacctgtcatgttcacgtgttgatttatcaattatacttatttacgttagatggtaatcaacatgattagtatctcatatttgattatatcgttgactcatttaaataatatacttaataaaaatatataaaattataaataataataatgattaattaaatagtgtatcctaaatatcaatacaataaataaaaatatactgttgtgtattcctataaatataataatttaactataaatcaatactcttaataatatattggatgtaagcgagtaaattcatgctgactacgtgtcacacgagttaaccttaacccaagccaaataattattgtgttattcgagttcaacttaatttcgacttgtgtctaatttgtttgagcctaagtcgcaatatttcatatcgagttcgtattatgctatcgagttcgtgtcatgttatcgcaataatattgtttctttcttaattttgtttttttgaaaaaaataataaataaaactttttttcaacgaaatatctcttactaattttttttttttttttgaacaaatatctcttactaacgttatttatatgtatatatgatttttttgttaatataaatatttggagttcataaaatctcaatctaatctaatctctatagtgcgaattagattgaattagaaaatctcaaatttgcacttatacaaattggatgctaattaatagatataaaactaactaatttgatccgattcacacatttatgtatacaattaatattttaatgtaaaaaatagtaatttaaaaatctaatacttgtaatataaatatatatttcaaaacttaataaatcaaacgcatattacattcttattaataaaaaaatataatgtaaataaaattacacatttctttatacatatatttcttttcttcttccttcgaacttattattttttgttttatctgttgttgcggacataaaataataataatttattttattttgttactaattatgtaaaaaaaataaaattaataaatattaaataattcaatattaataagtaataatacaaaataactaatctagaccacaattttccaaattgaattatattaaatttgaattatcatgcaaaataaattagatccaaaatatgaaatcggtacttagtgcaaaatagtgtgaataaaataggatgaacaactctaataaatataactaaagacaggaaaagggaaaaaaaaatatcctgttaaaaatcaagaatagagcttgggtgtttgcctatgttctgaacacaataaaatatatgaaagatattatcgtgctttgtaaaaaaaatatcaaatatttcagtttcaaggattcaattcaacaatttgttgagaaagggtaaaaaaccacccaaaaataacacatcccccaaaaaataaaacagagaatggcttttcttcttcttcttcatcatcttcctatacaagcttctcacaatgacacttttatgcatgcagaaaagttggggtgtactgtagaccaattatgccttcttcctgctcaagtgatcaagtaactgcttgctacatcatcataatcatcatctactactaacaatttctatcactaaaaatggtaacatagaaataatagaatgtattaattatatttaagagtaagaatcaaagttcctcgctatcaagcaagcaaagaacatggtcagccatggccaattccattttgatgcctatgatttatttgttagcaccaacatctccatctccttctcctgttgtttcttcaaatacctctgcgcagttgcgttcacaatcttcacaaaaaagttcacgagcatgagccacaccaccgtgttccatattgaagtgaatgagaaatcccactttttcacctaacaagattttatatgaaaaataaataagaatatgcattgggtgaaagaagacataataaaaaggttgtttttccctaaaaggtgaaggtcagagaccaaaccttgatatttgaggacacgggtgtggctgtggctgtgagatacttctctttcactgcgttgagtttggaaattacgttggggagcactgatgctaaaccagggatgaaactaagaagccaaatcaattcattctctatccaattaagaagttgattattacaaactccgattatgaaaaccgtctgcaggaaagtacaagacaaaggaggacaatttcaaaagagtttcaaatcaaagccaagtccacagaataataaaatttcatataagcaaatcaataaattgcttctgtttagggaaaacgatcataataatgttcaagctgacaaggggaactgacaaacctgtatgtgagtcttgataactgccttccccaacaatgttgcaagaaaaaatgtccagaatggaattccaaattgtccacacatgatgccagcaaggtcaaatagaggatttggcacctgataacgtatccaagttagcaggcaaaataaatcaatggaaaaagatgacataacgattaaaatgggtggcatataacttgaaataagcacaaaactcaatacagcagaaagaaaaaatttctaagtgcctggaaataagtccaatcgactcattagagtactttatgctttcatggaatttggatcaaatgtgagcagcaccatcaacttctaggtcttgtttggtgtgtgtgtgtgggatatgatagtgcattggattggattatgaaaaataatataaaaacaaggaaatagtgagttggttatcatactaagttacaaatttgccaaactaaagataagaagaggaagattgtgtaatattaaaatatcctaaattcctcgacagcttattatctctctttaatttgctagtaaggttaattttacccatacgttctctaatttcataccaaaagcatatgacaaaaattgtcaaatccaattcaatcatatcatacacccccaccctgccaccctgtaaatgcaaccttatggattgatcaattgtccctaaatcagaacatctggcttttccttgccatggcatacaaatggtccactaaaaccattctagttcaagttcaggcgaaaaataagtggaaaaata

SEQ ID NO: 110072 - DNA, 673 bp, Cannabis sativa
  modified_base (27)..(36): a, c, t, g, unknown or other
  modified_base (254)..(254): a, c, t, g, unknown or other
  modified_base (542)..(542): a, c, t, g, unknown or other
gttaaaccaagaaatgccgttagatannnnnnnnnnatatataaagatatatataaaaaactcctaaaatttataagagttagcttgtttggctttcttgctcattattcttctgtaaattatatatttagatggaacacttctcaatgggtattacccatgaatggttactaaacaaatttaataataaatattaattttaaaaatattaaaccattaaattttgatctaatgacgaataataaaagagaaanttaaatttttatgcttaatttaactacttaattaaagaaaatatcaaaaaatacatcttttttactttatatcaaaaatatattaagtcaaacttaactttttttatcacttttttgccaattttttttaatttttttttttttaactaatggaacaattccagcccatataatgtaaaaatgagaaattgttctaattaaatagaaaaattaatcataaaaactcaattttttctaggggcttattcatttttatacttaaaaacaatttttttttttgtatttttncagaattctacatagaaactcctactggaactagcggtgcaacttaaattgtaacaaaaaagcatacagaatccctattgcaactagcgctgtaacctaaatcgcaacaaaaaatcgtatagaaactctta

SEQ ID NO: 110073 - DNA, 1369 bp, Cannabis sativa
  modified_base (240)..(240): a, c, t, g, unknown or other
  modified_base (1297)..(1307): a, c, t, g, unknown or other
gcaataggtaaaaaaaaatattttcgtaatagatatgacatttttaaaccgacgtaataagttttttgtgacagttttaaaatgccatgaaacatttagtgtcatttgttaaccgacacataaaataaaataaaaaagtaagtatttagcgtcagtttataaatgtcgaaaattattttttgcgtcgttttgaaaatgacgctaataaaaaactatttgcgactacggtatatacgtaanttttataaaccgacgtaaattctttaagtgacacttaaaaactgacgtgaattatattttttgtagtagtgcaaatgcaagttaaatcgcgtcaattggataaaattgagtgagttatggtcgttttattgaaggcagttcaggtcccagcgcctatgttgacatctgacatcaacctagacgctgtatgagtgtaaaaacgtcgaaggggtgtcctttgagatgcctaagtgatagtttgacaccacttagttcatttataggttctggcaaagctggtcactagttctcagagatgtttctattttgtggaaatggaagactcaacatttttgatttttgagtgagtcaaaatttgccaaaaaattaaatttgtgagtttgattgttctaacttcatagatcattgtacttgtgaaaaactagataaacagtcgaaacacatcagatttggataagcaaaacccaacaaattaggccatttgtttacctgggcaatagaccctttaaatcgagcttttgggattctgttgttggtactttcaaggcttctgaacttgaggacgaggtctcccccctcagtttatgaccattatggattcaatggtcatattggatttgacatttgagcaattgaaggcagcgtcccaggttgattgtaaacctgggcgctgacggcctatttctaaggacttgtgtttgtagttttcttcccgagtttacttaaattttcgttattttttatgatgatagaagtgcttagagcactttttgctgaactgaattagaaacagcccaggttgacaaaatgttaacttgggcacttggcccagccctaggtgtcaacctaggcactcggtcccaattttaccactaataaagattaatagtaattttaattgttcttcgactcccaaataaaagaagtttataatagaatgtttctatatttatgaattaaatggatgaatttattcacggtttcttttctatccaccagtcactataaaaaatcttacttttagtcacaataaaattagtgactaaaagtaaaaaannnnnnnnnnnttataaattattatttctatgttgtgactaaaaggtttgtgaccaaaagtattagtcacaaa

SEQ ID NO: 110074 - DNA, 552 bp, Cannabis sativa
aagcgcttcccttagcagatattcacacgagatgatataagcttaatataaccttcacctacaccattaaatatagcattcaaagccttgctattgtaggcagaaagtttatcatctttaatagaccattccagttcagattttattttagaattaccttcagaatctgtctcaattgaagaagaccaacctgatagaaccatcctccaagctctctcatcttgagatttgatgaaagccctcattctaactttccaataaggataattagaatcattgagcaaaggtggtctagaaatcaaacttccttttacaaaaaatgatattttacacaaaaatacgtgaaaccgttaaaaggaccacactaagagtttagtgtctcgctttgataccaattaaaaaaacaagtttttgcgaatgaaaataataaatacgaaaatatacgaaatatgaaactgtatacgtctatagaagcatactgtaattctgttactgtagaaacaagttttgcagagacaaaacagaacaggcagaatataaaaataattgcag

SEQ ID NO: 110075 - DNA, 769 bp, Cannabis sativa
tttcgggtaatacttttcaattttgctgccacatggcagaaattacatttatactgtcttttttttttcttttatactaaataccaaaaaaaaaatgaggcctccatcttccacatccacagacagaaccaccatagcaacactaggataatcagaaaacaaccattaattctgacgagattgagcaaaagcagtgaaatcaacattaaataaataatcatgtcaaaacaactgtaaaataatactaaaataaatcaaacaaaacaaaaggaaaaaaggattaaaaaaaactaacaatcttctgcacagccttaacatcagatgtaatagcagctatatttgtaagtctagtcctaaaaaatcaaaataaaaaaactactaaaataaaactaaaacaacacaaaaacaaatgtaaaacaatgaacatatataacctcttagaaaaacataaaataaccacacacctcaaaactcttttgtcaatgagctcgtcgaatatatttataggagaaccaaaataaaataaaaaaaagtacaaaaatagccaaagagaacgaagaagaaatgtatttatagcctccatcttccacacccacgaacagaactaccacaacaacacaagaacactcagaaaataaccattaattccggtgagatggagcaagaacaatgaaatcgacgtcaaataaataaatggtggcaaacaaccgtaaaataatactaaaacaaataaaaaaaacaaaggaaaaatgattaaaatacaccaact

SEQ ID NO: 110076 - DNA, 521 bp, Cannabis sativa
gaaggatgtagaaaagatgtcgaacgtgcttttggagtattgcaatcaagatttgcaattgtggcaggaccagcacgcttatggaataaaaaaatattacatgacgtaatgacttagtgtattatcatgcataatatgatagtagaggatgaacgtgatgttaatgcaactattgaagaacgagttgaaatgcctagtccaaaagttgagatggtgggtgatgacaatgttcgattccaagaatttctcgctcgacatagaaaaattaaagataaagaagccacattaaacttcaaaatgcattaattaagcacctatgggacgagtatactaattcttaaaattagtataatttagttaatatctttaatgtgtgttattttatggagttaattaaatgtaatttattttgtaagagtaaaaattaaatggaatatttattgcaaatgaagtaatattaatatttttactaatataaatatttggctataataaattattattatctatatataatataa

SEQ ID NO: 110077 - DNA, 545 bp, Cannabis sativa
tttaattgttataaaataatgtaggaaaaggaccttgaggttcaagatcccccacgccaccgtgtttggatccaatctcggactacgacaagaaaatttccaaaaagatagtaagtatatattaatccttcattgaatactactaatgagttagtatatataattcatatactaattgcttgaatatgtgcattaggctcaattagaggagcaacttactcagggaaaaattcatgtccatggccaaaacaatatcttgacgaaggcgctcgggataccagagcatcctggacatatcagggctgctagatatgctagtacgtgagaaatgttgtttccttagttatgcaaaataaatcatagctaattttatttaatgatttgcaggttccttactagggcatctaaattgtttggcaggaagaaaaaagaagtttttgatgttgtggctcggcaatagaaggagattgataaattaaaagccaaaatcaaatcccttaaacaaaagaaaaacattgcccaacaagaggaagaaggaaaggtgg

SEQ ID NO: 110078 - DNA, 700 bp, Cannabis sativa
attggtagtaaggtcacaaatgttttacgtcaaatgttttacgttccagtagttctttattagcgagccattcagccgagccaatttgtaaaccctgattcctactactacttcgatcacataaggaccctcccaatttgggttgaatactcctgcagatgcgtctctcgtatttataactacttgcctctgcaccaagtctccaacattgaatagcctctttttcacccttttgttgaagtatcttgttactcggtgttggtatgctgcattagtaagctacgacttagtaggtttttcatcaagtagatccaaggacaattttaaaagttcttagttttcttcttgattataaagctctcgtctatgagtcgagatagttacttttacaagcaacattgcctccgagccaaatgctaacgagaatggagtatgtcccgttgttgtcttctcagttttcctatgagctcaaagtatttgaggtagttcgtcaacccatctacccttggcagcctctaatttcttattgatagtatcattcaagttcttgttaacagcttccacttgtccattcgcctgaggcctggatactgacgagaagcttttaattattttgttccttttgcaaaactcagtgaataaattgccatcaaactgagtctcggtatcggatacaattttcattggaattccaaacctg

SEQ ID NO: 110079 - DNA, 599 bp, Cannabis sativa
acctattctatgaatagtatgagatcataataagaaaaccaaaacctagttgaacactctaagttttttacaaataaaacactcctctcacaaagaaagatatgaaaatatgagactagaagagataaattcatttggctgctctctaggtcctatttatagaacatagcaaccctagagatagccacaaaaacaattttccaggtgtacaaaattttcttaaaaaaattcctgatttacagcatcagaatcgggttttgcagcagcagatcaggacctgaaaggaaattttccaaattgaactaagatcacgaatttgggcttcaaacatgccaaataaagtttctttgatttgtttggataaaggcaaaaccgaaattatccattagaaaaaaggaaagtcaagtttcccaaagttagacaactttctataagagaattcattctcttacaagaagtttcctaaaccaaaaagagatcagctgagaaggaatctttcttttgaagaaaagagtaattgaattcacaaaatcaatgtaataaaaacaatttaaatgctcaaataaaatgcacaataattaaaaaatattttgacaact

SEQ ID NO: 110080 - DNA, 647 bp, Cannabis sativa
aaagtcatttctggcacgccaaatggcccagctgaccatagccgcctcctccaactcgccttctcttcctcggcattgcagctccaacagccaattattgaaatcgtcatccatattaccgccgacatccacacttgtcctgttccagcaggcacgagcatgaacacacccaactaacgcatgaaaaatagtttcagctatagtgagacacaaggggcatgttgggttaactggaacatgtcttttttccaattgaacacaagttggtaacgagcctgaagcccccctccataagaagttactgactttagggggaacttttaaactccataaatccttccaaataccagtagctccagtaataggccaagctcctttttcttcttgtaagaacttgtaggcactcttaaccgagtagtgccccaatcgttcgaaacgccagctccaatagtcagatattgcagtagaactcaattgcatagaaaaaactagctcttggtctctatcatcaaagagatccttaattacctcttcatctcattcttatgaattgattttgaaaaggctgcttacagtttgattaacaagtgcaggatgtgaagaaattgttaggttttatgccttaaataaaactcatttcatataat

SEQ ID NO: 110081 - DNA, 1497 bp, Cannabis sativa
gtaaaagtaagttttcttgtagtgtaatcatgttattgagtctactttaaaattactcatgttctggaaattaacttgtttaacttttatttttcatttagtattttactcgaggacgagtaaatgtttagtttggtggaatttgttaggttatttttagtattatttttaagttaatttttagtgagtttttaatttagttctactcttattttgagcaattttatgctttttatctattatttttgcagatttaaaatagaagaagattagaaattatcaaaggaataagatggaaaaaaagataaaaagatcttagaaaaagataatctataaaatagagaaaattgtgcaaaaaaataaagttgaaacttcaagcctgaattcaactattttctcacaagattttggaaaaattcaaaacataaaagttctagatctctctttcatttttctgtaacatcttgaatggtccaattccgagctatatcgagagagttgtagctaaaatacgatcagtcgacgtagcagaaaactcactgcccaaataaagaagggcgcgcctaggcatcactactacaaaaacacccttttaagtccatcaaagtaggactagataaatttctcgagtccattttgtgttggacataatagcctaggacataaaaagggtaattttctagtccaatattattggactagcaaaacatgttggaatagaaaaatatatttagcctaatatttttggactagaaaaacatttctagtccaatatttttgaacttaaaaagcgatccctaactcctttcatgtcaaattttgctggacatgagacttatttttttatttgtaaatccattcacgtccagcttaaatatggtaaaattaattttatttatttatatatattaaattataaataattgcttttattattatataatataattttttccaaaatattatttataattaatttaattcaattaataaacataaaaattatacaaatttcaaactattattgatatcttgaaatttataatatttattaagcatatacatatataacaaaattaagaaaattgtattcaagaaaaaaaaaattaactaattttgttagctaaatatatgtcgtaactaataataatttttttttgaaaaaaaaaactaaactaatgatccccaagtgatgattttgcaagtgtggattgtggaagcatatatgtcgcccagccccagcaataaataaattaaattaaaaaacaaatttctttaagtttaaacataattaacaaaaggagtatttaatatgttttgaaggttaattacctataagctctaagagaggggtttagatatttcatagagaagtcatcgatatatgctcaagtctttctcgtaccaaagtggtggttggagcaatagtcagtcgagaaatctaagctagtggtgattagcgacgtgataatgagggggatttaggtttaggttttt

SEQ ID NO: 110082 - DNA, 681 bp, Cannabis sativa
cttaaaaaactaaaatattttattcttaaaccaatacctttaaaactaacaaaaatatgatactttttcaaaacccaaaagtacccccctctatctacttcgtctctctctcggaccgaacaaaaaaaaaaggcacaatagtccgatggtcggaccatatggtctgatggggtccgactaatcggacccatcggaccactgtgtaattttttttttgcccaaaagaaagatcaaacagatccctctgattagatatttccctccatcactccttctcattcttccacctgtcccctctttcttttccaccaaactaaacctacagtactataacagtaccaatctctctttctcctcttctctaattaaccctttccagctttttcagttacgtacgacatatacacctttttttcccatttaagctcacttcctctcaaccataaaagaaaaaattaagtaaaagatcctcacacatcatcatatatactgtcaccaacagtgtacaaaattttgattatattaataacaaaacaaaacagtagtgatagtacgtacattaaattaagttggttctctttctcttctctctatatatatcatcatcatcatcactagtatacatttaattataataacacaaatcagcactatcgaaccctccctctctcttcgtctctc

SEQ ID NO: 110083 - DNA, 590 bp, Cannabis sativa
  modified_base (254)..(257): a, c, t, g, unknown or other
tggtgacaatattaatgatgatccattaacctataaataggaaatggtaagtccagaacggaaacaatggtcagtcggcattgattcagaaatggattccatgaaaataaataaattatgggaatatgtagatgcacctgatgattatcatccaatcagatgtaaatgggtctacaagaagaaaagaggtgctggtggagaaatctaaacctttaaagccagacttatcgcaaagggttatacccaaagagaannnntggactatgaggatacttttagtttggtcgccatgctcaaatccatcattttacttctcttcatagctgccactttcaattatgaaatttggcaaatggatgtcaagataactttccttaatggaattcttcacgagacaatctatatagagcaaccagaaggttataagctttcagggcaagaagagaaagtttgcaagctgaataggtccatttatggacttaagcaggcttctcgctcttggaacaaaaggtttgatgaaataatcataacctacggctttcaccaaaatgaatatgtgtgtttatcaactcaaggataatcaagtggta

SEQ ID NO: 110084 - DNA, 859 bp, Cannabis sativa
gagctttgttttcaacataattttccaattttttttatgtacctttcaaaaggatacatccatctcataaataccgagctacccattatagcttcttctggtaaatgtagcaccaaatggatcataatatcaaaaaatgttagaggatagatcaactccatcttacacaaaatatgaatgagatcttcttgagccttctccatatatttcacatttagtgtccttgaacatagcattcgaaagaattggcaaagttctatgatggtgcttgatgttcttttatccaaaaacttgccaacacaaactgggagtaatcgctgcattatcacatggcaatcatgagactttaatccaataatatttgtgtcatttttgtttaccttattcttatagttagaacaaaatccatctggcaatttaactcccttcaaaaattgacaaaactctttcttcagtagtcagcacataaggtgtgtgaggctttattaaccttttgttagcatcttcgtaaatccatagcgactgtcggacacctagtttttccaaatcatgacgtcttgcattaatggtgtcttttgatttgtcattatccaaaagtgttccaagaatattgtcacacacattcttctcaacatgcatgatatctatgttttgtttcaaatcatttaaactccaatattcaagttcataaaatatgctttttttcctccaattacttgtatccccacttcttttccttttaacactaccaaaagatatatgttttccaggaactttacttggtagggcatttacttattctaatatctcttcacaagtaaatcttctaggaggatgtctctgttgggaatattttacc

SEQ ID NO: 110085 - DNA, 815 bp, Cannabis sativa
  modified_base (635)..(635): a, c, t, g, unknown or other
tatatatatatatatatcttaactcaatctaatcgttctacatgaaatgataagtgttggtggtatttataggcttaggatcaagattctaaagtcggtggctgcaacaagcgaggttgttaagttagttaggcaataactaacttaactcactctcctttgagcaaggtctccgcatcagcataagtaaatgtgcttctgggaacatgcataagagcttccagaaacacggaccaaagttagttgctgaagaagcatccaaataggataaagccagctggagtcgactattcaagactccattccaagaggaacaactagccatccggaactcccttcctgaagaggagtagctttcttgaagtctacacccaaagtggacatgatagtcattcgaaaaactcccttttggatgacaactatcattccacaagacttcttccagatggataggttagctgtccgagaacaacattcgaaaaacatataacttttcaggaataacttttggagacctttttatttggagaaactatttcacaatatatcttgttatattatctctcttcttatttttctttattcttcttgaattcattcatgatttcttcatctattattgaaagagaaataanagtataaaaataaataaatgctccgtgcacttaacttatataagggagtttacaaaaatactagaattttgggtaagttttataaaaatactaccacatgatatttttgtacaaatatactatcctggacttttttttatttctttttatattgtgtataccccaaaacacatacgaagc

SEQ ID NO: 110086 - DNA, 637 bp, Cannabis sativa
aatcaagaagaaattatcaggaagcagctgggcaagaaatcttgaaagatagattatcaagaatcaagaacacactcaaacttggaggaaaatcaaagctcagaattagaaattgatactgagaaggaggagaataattctggatcagattcatatccaaaaagggctgtagaaacatcacaaaataacaatcagacttagaattctaaaactctgcttgattttaattttattaatatgagtaacataaaggttgatattgataaatttgatggcactggtgattacaaaatctggaggaggaaaatcagatcactcctagctcaacaaaagctactaagggtgttagatgagactattcaatggccaaaaagaactacaaagattcagcaagaagaatccctagaaactgctactggaatcttgatattcaatctattagatgcaataatcagattggtagatagagaagaaacaccatcaaagatatggaagaagtttgaggagcaatttcaacaaaaatctttgacaaataaggtcaatcttaaggaaaggatctttggtttcaaaatgaatcaatccaaaactttaaatcaaaatcttgatgggttcttgagaatgcatattgaacttgcaa

SEQ ID NO: 110087 - DNA, 2175 bp, Cannabis sativa
aaataaaaataaaaagtcgcccataaatttctcaagaatttcagttatatagatacactttatataaaatagaaatagatatatatatatcattatttattacccgtataaatatatagtggatgatacacgttattaaatgtgaaaaatatatattaatgtgtacatatataaatgatgctttattggataattatgtatttgatagaaaactcatacatttaaatctcatttttaaaagatgtccaacttatccagcatcgaggggaatctgtacacatatgttgatggcttgctacagcagcttagaagtttaactagctatagttgtgtaactggtttgtgatatgtgtattggaaagctaatattgtggctcataccttttagccaattatactttgagtaacaatgttagtagattgtggagttactcccccttgtaatgacacaagagaatgaaaaatattaattgagattagcttgacaaaagctaatgaaaccaattagaccaatcgtttatttatactaatagagagtttgatacaattaaaataaagaaccaagaaagcaactaacaactaccataggaaagtagtcatgtaaagtttgaatttgaggtagttgaatctctctatagttaagaacatggtaagaatgtgtgccacttggtcaactgagggaacaaatcaaacagctaactggtgtgctatgatctgatcacgcacgaactgtaaatttatctcaatatgcttcaattgagcgtgaaaaactagattggttgcaagggttgtggcactttgattatcaacccatataacagggcaacgagtcatatggattttaagctcagttagtaaggatgtgatccatttgagttcagcaacagtgttagctagagctctgaactcactttctatactagaccgagcaacaacctgttgctttttggcagaccatgagatcagattgtttcctaggaaaaaaacatagcctccagtagagcgtctatcatccacacagctcgccgaatctgcatcagaatagctttctagaaccatttcaacagttggtcgaaatattaatccttctgaaattatacctttaaggtacctcagtagacatttgcagaccttccaacggcaagtggtaggtgccttgaggagttgactgagtttgttaacaataaaggccacatcaggtcttgttagggacagatattgtaaggcacatattgtacttctgtacaatgttatgtctgagaatggttcaccttctattaaggagagttttgtagcagcacttgtagggtttggagaattttttgcaccatccatataaagttttacaagatgatctgggatgtattttgtttaagagagatacataccagttgaatctctaaaaatttcaactcccaaaaaatagtgtacctcccctagatcttttaatgaaaactgatggttaataccattaacgagcttgttgatgggagatgtatctagccctatgactagcatatcatcaacatatactaggagaataatgagagtagatcttgagtcataaatgaataaggaagtgcctgacttagatgttgtgaattcccactgaattaagcattgtttaagtttaacattctatgcttcaggtgcttgtttaagaccataaatggccttctttaatagacaaacatgttctggtttgtctagattaacaaagcctgggggttgtctcatataaactgttccctgtagagcatcatttagaaaagtatttgtcacatcaagttgcttgatagaccaattatgtgacattgctaaagagagaatagttctacagtgaatggtttcacaacaggagaaaaagtctcttcataatcaattcctggtatttacaagtaccctttagccacaagtcatgactttaatcaattaaaagaaccatcagcattgagtttcactctgtgtacccacgtactgtctatgacatgcattcttggttcataaggaacaagtatccaagtgccagtagacttgagtgcattgaattcatcattcttggaggctagccatttatgattttgtagagcttctttggtattctttggtttagttgggagaagggattcaggcaatggatattttgtggctatgtatgtgttggaaattatttta

SEQ ID NO: 110088 - DNA, 592 bp, Cannabis sativa
attatttaaaataaataatcatacaatcaaaaaatataaaaataataattaaatatatgtagcatgataataaaattatatacataaattaaaatatttttattatgctaataaaattatgtaccactattatacatatcataataaaaaataaatagcatctaagaataataatataccatacaacaaaatagaaatataccgtataacaaaatctatataccaacaacccaaaacaactcataaaaaattaaaaaaagtgacataactttaaaataaaaaagatttgaacaaaactaatatagatataccatattgtttaaataatttgcttctaattctaaaaaaataaaaataaattaatgattttgaaatgaggacatttactaacatagtcttatgatttagggtcatttgctatttttttttttgaaatgaggacataaactaacatagtcctatgatttggggtcatttactatatataatttcccatataaaaaagttattttttttcttttttaaaaaataaaacactaaaataaattaaaaatgatctcaactgtagatgttattttttttacagaaatta

SEQ ID NO: 110089 - DNA, 627 bp, Cannabis sativa
  modified_base (73)..(73): a, c, t, g, unknown or other
  modified_base (191)..(191): a, c, t, g, unknown or other
tttaaaaaactaaaaaacagaaaacaccaaaatgttgttttcaattttcaaaaacaattttttttgtctaacntattatattttatattttgctcacatgctcgggtcctaaacccgaaaccatacacgaacttagacccggatgggttaatgtcatggtatggtgctaataaacatacttgtgagtaganctaagatcctgataaaataaatatatttatgtcaattgaaatgacaaaaaactgttttttattctcacttttaaaaatacaattttaaaaactgaaaactgaaaaacacagccaaacaaactctaagtctcatatttattaactcgtttttttttacttttatttttttcttttaagggatcgatcacttttagataattcagtcttaagccgcttatctcaattaattaagaacaaaaacattaattcaaattccatacaacaaaaaaaaaatcattacaaattaatattgtagctgttatatttaattattattatatatacattcatgcatgttatagttatactgcaatttttttttttttttttattttaagttgaggaagttttctatgttttatttatttttttgtttttttttgttttgtttggtttg

SEQ ID NO: 110090 - DNA, 683 bp, Cannabis sativa
  modified_base (253)..(259): a, c, t, g, unknown or other
  modified_base (644)..(648): a, c, t, g, unknown or other
gaatgcaactgtatatgacgtatactcatttttgaataaattttcatatcatacctttttttggattcgagggggagctccagatctgtttaatacagaattccaatgcttgaatctagattttcgaggatggagtgagtgattttgaacgataaaaaccgaaatcaaatgtttaatttcagtttcttcacggtttttctggtttttttttcctaattttctgtttagatcattggatttcttcttttccaannnnnnntcgctggaatttatggttgttctacactcgttctgatttcattctggttgcgtagcagattggatcgatagaggtttcttcatcatctccgttcgtgacgtgcggcttaaggtatagaccaggtggtatttgtaattttattaatgtgggctgtatataaatgttgattgggccggcccatagtaatattgtaatattttaccctttttggaattttcttgtttttttccctagattttatttatttttattttattttggaaagttttatttacaccccatagaatgataaatacaccctattattaaaaaaaataaaaacttaaataatttttaaaaattactcttgatgttttttttaaaaaatttcctcacattattttannnnnatttcaatacttattttgatttcattttcataatt

SEQ ID NO: 110091 - DNA, 746 bp, Cannabis sativa
actgtagcgtgccttagcattagggcgttacagaaagagagagcgacagagagagaacatggtgagagagagagagagagagagagaggcagaagagaacatataaaataaaaccctaaacctaaatgtgccttatatatgtgtagctattaaaaaagaatagggtgggactttttatgccgatttttacttaaaaatcgagataaaaagtcccacttaaaatgctaaggttgcatttggcaaatgcataaaaatctcctttccaacacctttttttctccgattaccaaacaaggtccttcttcctaacatatgtaaaagtgggatcaaaagtttttatcccactttttattttatcaaatgtaaaaagtaggataaaaagtcccttttgttgtagtgtcaccagctagatttgaaatctcttcgaatacctgaatctctcaattccaacactcaagattcccttgagtaagctagataaattccttcacctgcaagatttgaaatcccttcaaacaaaatttgaacctccgacagctctagcagcaagcttccctcctgtgtttgacaattcgaggatacattcacatggttaattttggaatctggctctaattccacttgtaaggaccttctaacaccattaatttttcaaatggtatgatattgttcgctttaggcgtaagcccacacggatttatttttgggcaccttcctaaaatatctcattctaatggagatagaat

SEQ ID NO: 110092 - DNA, 661 bp, Cannabis sativa
atggtaaggatggaccttgatggctgctggattaaattagttatgcaatgtgtatgttctgtttcctataccatttcacatggcggaaaggagttgaggcccattgtttctcaaagagggttgcgccaaggggatccttaccatatctgtttattctttgtgctgaaggtttctctagtttgttgcggagttatgaacaaagtggcttactcacggggtgtaaaattgctcgaggtgcaccggtaatctctcatatgctctttgctgatgacagctacatttactgtaaggcaactgaggaagaagcgtacaatgtgaaggagttgctccattcttgtgaggtggcttcggggcaaagaatcaatttctccaagtcttctgtgtttttcagcaataatactggcattgaggtgcgggattccatttgtgctatgttggaaatttatgaggccgatgaaaatggctattacctgggtctgccgtgttcggttggtagaaataagaatgctaaccttggtttcttaaggataagcttcgaaagagaattcaagggtggtaagggtgtatcttatctcgtacaggaaaggaggtattgttgaaatctattgctcaagtcttgtcagttatgctataaatgttttccttttgccctcagacactt

SEQ ID NO: 110093 - DNA, 661 bp, Cannabis sativa
cacgtctcttttcatcccataccaagtgcggttttagatcctgatacattttggtggttcccgatgtagtgaaaaaggtgtggtgtgagcttcatcaaggacttctttcttaagctcatcaacactgggaacacaaacttgagctttatacaataacattccattattcgagattgaaaagtctttaggccgaccagccatcacgtcatctcgaatcttgactagctcgggatcttctagttatgcctttctgactctttctaacaaatcagactggagtgttaagttgtgcaactttccaactacaaattcaatccccacactgaccatctcagaagccagttgaggagttatcaaaatagtggttaaaacctgcccgagacctcttttactcagtgcatcaaccacaacattggctttcctggggtgatacaaaatctcacagtcataatccttaacctgttccagccaccttctttgcctcatctttgaatctttctaggtgaaaaagtacttgagacttatatgatcagtataaatctcacatttctcaccatgaagataatgccgccatatgtttagagcaaacaccacagcagcaagctctacgtcatgtgttgggtagcgctgttcatagtctttcagttgatgagaggcatag

SEQ ID NO: 110094 - DNA, 509 bp, Cannabis sativa
cttaatatagtagtgactcatgtactaggattattttagaattttaaccacataaaaaatcatgtattagtatctctttcatacttactttcttctgtatcttcaataataattaattactaatattttcaattttcatcatattctatctgcacattttactaatttgattttatggagcaacatcaataatctaactcgagaagttttctacgatgctcattaaaacttaatagaatacgagaagacatagaacaaagcggatgaaaagagtaaacaagtctacatccaagcaccctaatgagagataaatgataaccgatcagttactagatacactgacataaagggtagtacaacctgaagtggtcaagggtaggaccatgagatctacaccaaactagtagtggatgtattataaagtatagttgtggtagcattactagtatttttcatgtacacttaacacccgaacaccactatcaccctaacacctgcgagcttacaat

SEQ ID NO: 110095 - DNA, 1192 bp, Cannabis sativa
gttgttacatggctgccgtgttgcaaatagggccccgagagtttctcacatgttgttcgcggatgatagttacttgtattgccaagcttcgattgaagaagctagccgtgttatggagctactctgaatgtttgaattggcttctggtcaagtggttaacaaagcgaagtcatccgttttctttagctcaaacacaaggggggatgtccgtcagctcatatgttcggtattgggcatgattgaagcagatgaaaatagctcttacttgggacttccaaatactatggggaggaataagaatgctgtgttggggtttctcaaggataaggtgctaaagaggattaagagttgggacaccaaattcctttctcgcgcgggtaaggaagtgttgataaaaacagttgtacaatcgttacctacttatgcaatgaatgttttccttctcctggttggagtgtgcaaggaaattgagagtctaatggctagattttggtggaagtcttcttggaatcaaaataagggcattagttggatgagttggtctcgtttggtgaagcataaattcgatggcggaatgggctttagaagtcttcgtgagtttaatatcgctatgttgggtaagcaagggtggcgtcttgtcactaacccttcttccttggtgagtcgtgtgtataaagcaagatattatgctcaaggtgattttttgaccgctgaaataggctctaacccgagctttatttggagaagtttagtgaaagctcaaggtgttctcaaggctgggttaagaatgagggttggggatggtttatctattcggtttgctatggacccgtggcttccaagtgatgagtctccaattccaacttctgatttaagtgcttataatgatctaaaagttcaaagtttgttcaaggttggggctaaagagtgggatgagttggtggttcgggacatttttaatgaaagggaagctgaaataatcctgggtattcctttagctattaatgaagctagagattcttggtattggttgaaggaaaatttgggttgttactctgttaaatcggcttaccaactactcatgaaccgtgacaccaatgttgatggaagggctggggattcaaagttttggaaagagttatgggaagtcaaagttccgcctactgtcaaagatgttctttggagggcagcg

SEQ ID NO: 110096 - DNA, 1714 bp, Cannabis sativa
atctccaagaaccttggagactttttggtgcactaggattcctttcggactttctctccatagcataaagtccatagttccatcgaacttctccaattcgattctctctattgatgacattcaaagtttcttcaagaattgtagcagaaaaaattaatttttcttgatcgattaccaagctttgatttgtaggaaaattacgactaatagtgcagaattaaatcaatgaaactttaacattcaaacaattagcaaaaacatgattaacaaatcaagagcaataattagatgaaaaataggggcaaacagagtattgaaaattagaaaacgataaatgcaaaaaaataaagaaatcaacaccaagatatatactggttcaagtttgatagatctatgtaatctatggctctactttagttctggaacaccactaaatcttctgtattgattgagcaagaacagatacattacaatcgagatagattctctgttgagttctctcaaagtgtttcaactctcacactcttactcaagaatcttcttcatctatagaagattcttcatacaaaatccaaacccaatctctctcttttctcaatacctctcaatctacctctcagtctctttctctctctgactctcaatcttaatctgaattgtgtgttctttgttcttctcaaatgcttaagtgggtggtatttataggcttagaattaagatcctaaagtcggtggttgcaagaatcgaagttgttaagttagttagacaataactaacttaaccaactcttctatgagtgagatctccacgccagcatcagtcttagtgcaactggatacatatataagcttccgagatcacagaccaaaggcacttcctgaagaagcttctggataggatagaaccagctagagccggctatctggaactaccttccaaggagatcaatcttccaggattaataattagctgtccgaaactcctttttggaggagggctaggtatcatgaagactgaacccggagtggacatgatagtcatctgggaactccctttcggactcaactatcattccacaagactccttccgggatggacaagttagttgtccgggaacaacatccgagagacacctaactttctaggaacaattttttaggaatgattttggagaccttttcttttggaggaactatacaacaaaaaaaaaatgtaaggcaaccatataattattgttttctcttcatttttggttatagattaagattttttttttaacttgacaaaaaaaaaaatcaacatagtaataactagtgatactggttagaatatttgatacgacacgaatccagaaacacgagtatgactaggcacaaaaaatatgggttcgggcacggcacaggatgatgctacaaattggtacgatatgtaagcacgaataaaccagcccgaaaagcacgacacacgacaaacccgaaaagcacgacacaacatattaaaaaaccttataatttattattaatatagttaaaataataataaaacttaaatataataatgaatattataattctataattaaaactattaaaatataaaaaattaagatatatgttatttatttatatggtgtgatataaaaatttgtatttttataagtaaatatttaaattttaatgaagttaataacttttttatatgattatctgtaaaa

SEQ ID NO: 110097 - DNA, 564 bp, Cannabis sativa
cctaaccatctcaggattaagataattgatctaagatcaactaagtgatatatacttagaaaagacattacggtaagtttatgatatcttttacatgtgaagatcggtccagaccgatgtatacatctaatacaagcttactttaccaatattttggaaaagacataccactatctaagtgtaagtaaaccaaattgttgattatcatatcagtgtaaattctgtgtactgataaatcatgggactaatagtttaatcacataatcttgattaattttcactgacaacacaataatcatgaataacaatgtgataagaatttaaaagaatttataaatcgaacaaatgaccatgaaatcaacatgtgaactaagcattatattaaacaagtaataaaataattttattccgttattgataaatgaaaataaaagatgatattaaaataggatttaggatcgtagggcacaaaactcaacaaactcccacttgcactaacataaaataatcagtacatttcaactaatcctagattctctctgtacttttcaaatgcagtcaatg

SEQ ID NO: 110098 - DNA, 1098 bp, Cannabis sativa
cttgcatgtttttttttttttttggcgataataacttccttaaaagttagtttgctagaaataaattattatatataagatgaatgagctactcttcccattgtcaattagttttgagataaaatctcattcatcttatctgcaaattcttctaacatcgtaaatagttgaaaaatataataaagcttttagttagagataataaaatagaatgaaaataattttatttcattcttttatttaattgtattttaaagtattaaaatattattttaatggaaagagttatttattattttggtagattaattattttattgtaaaataaaataaaaagttattttaagatgaaattttttttaatagttttttaatcattttttttaaaaaaatttacatttgaagtcttttttggctttctatatttgttaataattatatttttagatactgcatttaatttaattaattttttttttattcacgtgtttgcaggtgacgccatcttcagacttatacttctaatccacctccccacgtcttctagctatcgcgcttcaagttgtcacatttttcttgcttcttgtcattgctccctattttgtagactaattcagtatattgtagagttagagggagcgagctgtttcaaagaggtttctagtgggtttctttttttacaagttcagaagttttagagtgagagttttttagagagagatttgaaattccaaatttctcattctatttagagtgataattttcaaagaagatttttcatttcaaatttattaaaaaaaatagtaaaagattaaaactcgttcttcgctttctccatcaggttcctcgaagcttcttgctgacaagaagaagatgaagaaaacagtttctgaaaaagacttgaggaagtttcttacagttttgatggttctggtgatgtgtctgttaaggagtttaagaagaagcaacctattcgtggaataagaaagttaatgacgatcgacctttgaaaaagttaaaacaagttgtggaatatgatgaagatttgtacaacagtgatgatctagaaattcaaaatagtgaattgatattgatgaa

SEQ ID NO: 110099 - DNA, 573 bp, Cannabis sativa
  modified_base (252)..(255): a, c, t, g, unknown or other
attggtagcaggcggaacgactgtcttaggaatgcccctgttggctactgaactagtattcccagtctcttgcacaccaagtgcgatttcaacaacaagagtcgtcaaaccgcgacctacagtggttgttcgggagtcgtggttggtggaacccttgtgttcccttggttctgcagtgcaggatccactgtctgtagatttgccgaatcaaccacgccgctgcgagtctgtaccaccattgtatttgcgatnnnntttgagataaagagcgatccttgattcttctctcaatgaaagcaccaaaatgttgacgtcgcttttagccaacgatagtgagtctaatttgtaagcaataagtagtataataggcaggtaaaataataaagcaaataaagacacgacaaatttatagaggttcagtcccgagtagttcggtaatagcctattcctcttagcttgtattgacataagaataaggagaatggttctttttcttagagcacttacaataatatctctgaatatgaattcttagatagatttttgacctttgcccagtgagtatgagtcact

SEQ ID NO: 110100 - DNA, 2187 bp, Cannabis sativa
atggtgattatcagcaataaataaagatccactgtcagttgatcgaattccgggtcaacaggtaaataacgagttctttaagagcttgtagcttattgacctgcatagttgtgaatatgttgaaagacttaagggatatgtgccaaggatgacccatctcgaatgctcatagacgcgagaggattgaccctaaggaacacaaaagatacaatcctaaaggctatctcaaatttgtcttaggcggcaagagcgaggaaagtacctcaactagcatctcgtagaatgcactcagtcattcccaacattattggagaacgcgaggcatatttttactctattatctcgacaaaagaactactttttgataaggacaaaaagaggttattaacggttaattcttttatctcacatgttgtaaatatgaaatatggggtttgtccatgtttcataaacagtatcaagataagatcaaaagtgaaataactgtcatttgtaagaattatataaatagggatagaacctataaagagggtagggtttttttttttttttttgttgaaaaaaaggactttcgaagattaagtataggaaatattcataaatattaccttgtattcagggacactataaagaataattagaaataatatcgactcgtgaagtgtgtagattaaactacaaaatcatgtaaaattttatttaaattaatattttagtatgttaatgaatttttgtgttaacaaaaagatatatgatgtcgtgcgtcattttactcttgaaatccttaatttcccagtgattatcaagcaatccttttagaaatcttctcgaacttcaaaattgccctagctagttataaagtaaacaaaaattgttagagctacatctgaattaattaaaaaatacaaatcaaaatacaaataaataaattcttaactttatattattccaaattttatttttcagtgtaaggctgatcttttttcaattttcataatctaacccaattgtcgtacgacatctaactcctaaaaagttgatatcaaccaaagtttttgccacattattgtcatctatcattgacttcgaggggcaatctttttcttttggtccataagcttatttatatttgttcgactttgcctaaatataaccctaagatactctgctactaggacgtgcagttattttgtcgattattataaaataactgacgacatagggttataaaacccacttctgtgtttcaccaaactctttgcttatttccttaaataaaaaaccatagctattgggatactttatagcttccctttttcaataatgacctataataaccatctctaataatatatatatatatacatttatataaattataatttttccagtatgaaaaagatatacaaaaagaacacgccgctaccggtgaaagcaaaagcataccccggccctacaaaaaattcaataaacataattgaaaccttgctgactatagtctattaattataaaagaagaaccatttaataataataatagaagaagaaagtactaggttttttttttttttttcaactaagtacttttaaactttaagttattaattattgggttgtcattaactaattaactccagttttatataattagctaggtctttagacttgcttatagttataggggacgtacctgatatttcaatatgtttatatacatgtatatatagaccaatgattgatatttgtagggattaaattggcttaaatttagatgagttaggaccactagctacctactatacgtagcatatttttgtttttgggattgatgtaaccaaaaggttttgatctcaacttctcaagttgggagtaattttggagttgcactatttcttttctctcttttcttgaattagttatatcaaattatatacacccgtaatatttcatattttacttcaaatatgcatggagaataaatctcaattggctcgtatcaaatgattcaaatgatgaagatcaatctttttaatctttttaaaaaaaaataaaaaaaaaatgaagagcaataaaatgatcaatacagttcaagagctaagattatcgccaaataaaacgctatgaaaataataggttaattaagatttttgctactcgcactctgacatgtactaaattataccccat

SEQ ID NO: 110101 - DNA, 760 bp, Cannabis sativa
cattactaggatatggtcatataggtgtaagtggtatgctttttgatgtaaaattgatagtgctatagatattattacactttgttttttgagagagagtgatctaaatgacactatgaaaatcatcgacgcagaagaagttccagtcaacaagctaattgtctagccaaagatatacagagtcagaatatgagtcactacaaacaaagagacttatataagaccaagttatctcgtaaaatttagacaaaataacttgagatccaccttcaagaggcatccgatgttaacaactacgtggacaaaaaactacctacaaaataaatagatgtataaattaaggtgggttagcacattacacaatgataatgttgtgaattcttaaattgagataaaagcaattattattataataagaaaaaaagttatctttaaagcatttttattattagagctaagtcttccaaagtagaactatactagccaatataacctacaccatacataagatttaagagattaatgaaagtaaataaatcaaaacccaattaaaattaactatttttcaaaaaatgtaacaaaactcaattgcctaacaaataaatgataagaaaacaatgatataaaatgacagcaagaaattcctcgaaaattaataaaatataattaaaagtaagatttaaaatttatttgtgaaaatctacgataacactctttaaggttgaatccttacccaaaatgagctaacaacaaactgcaa

SEQ ID NO: 110102 - DNA, 1312 bp, Cannabis sativa
  modified_base (501)..(504): a, c, t, g, unknown or other
accactccggcacgctcacaagatgacaatgacatttcataaacaaatataggacggattaatgtttcacactaactcagaggacacatttcaaatagattatcttaacaataattaaataagaagttgagaaagagattctggaattttagtgggccctctatatgcatttatatattttgaaaagaaattcagtatcttagaattgagaggccacaatggcagagcattcaattgggacatcaaggctttgcaagaagatgaggaatcatatgaaatatatataatatgatgatgatagattcctaacattagaaaatgtgtttagcaccaaatcgttatggtcctatcctctaaatagtatcaagacaacttaaatgctattccatgaaaatagaacaaaaacacatcaatcgtatattttttattaacttagttaaaattagttaaaattcacatcttgtttaaaaatatttgagaaattacctcatatattatttnnnntaattttttttttcaaatttacaggttgggtttctaaagtggttccagcgctagttgcaatatgggtttctatacgatttttttgttgcaaattaggttgcagtgttggttgcaataggggtttctatgtagaattccgtaaaaaaataaaaaaaatctgttttaaaatgtaaaaatgaaaaagtcccaaaatattttgtgttgccatatagtcgaaaaaaaaaaatatttctatttactttgatgtaacacattattaattttaattttttttcaagagtgattgattaatattttatccaattatattttttagctcaattaatatattatttatatatttagatttatttatttataatatatttcaaatgtaattaaattatatagtagagataaccattttcctatagtaattgataattattgatcacatttttgtaagtttgacaagtggaatctaactgtgaaagtcgagatagtcatcagctagtcaatgccttagtccccagctcttgcgtggggcttccgcgaaggatatctccatcgcaaggcgagaacacgtagaggattagcatgcatgacatctcctattcccgggagcggaagcgaagcaccctacggaggctaggggcttcctcgagtatgcctaagtgggtagcggaaggacttagaatgagttgaatcccccgtatgatgtggcaggcgagccctgttcgtacctgtaagattacagaagtgacgaccatgctctttctggtacaacgacaggttttgtcccccacgttaagccatagtacaaggcatg

SEQ ID NO: 110103 - DNA, 757 bp, Cannabis sativa
  modified_base (416)..(421): a, c, t, g, unknown or other
ttgtcactatcaaaagaacattattaagagtttgaaatcatacttgcaccaaactcctattggttgggctcccaagtatttcatggtgcacaattcctaaatgtcacttttaacaagcaaaataaagtcatcttcgaccccaaatagctcaaaagcaacttggaattggataatcgacgacatgggctaccttttgacggagttccaaaaggtaatgattgaggaagtttggcgtggttggacataacggccatgaccttttgccttagtcgacctcttagggtgttctggaggttgtgttggaggactaagtaaatcttcataggcttttttgcttctcttcacaggttgcttctaaagtttcttggtgggtagctgtgtctatatatatgaaaaaaaatagtaaagttagcaannnnnntaatgaataaacacaataagttaagtaaacaaattgaaacataccaaatgttttccaacaagagtaagatagtctattggccatgctacataactttttatatcttgacctactgttgtcaatgaatcgttggctatgggacacgggagcagtgcattgtccacattcacttcttcgataaatacccgacgataacctttgtatgggtattcatccttgttaatggaaaactttccatctttcaaatatttctccttgacaatgtgacccgaagcaacctttagtaccatccaactaggctccaacagttagtgcatccatcacggtaaggtttgt

SEQ ID NO: 110104 - DNA, 529 bp, Cannabis sativa
tgcttagttggatttcttgttgcttcaatttggtcaaagtttgcatatttagctccaaaattcgtgatctacagtcaagagtgatcactttccaaaaataaatcaaaaaattttatgttttggatgtggaacatgctccgtttgtgactgaaaataaagtttgaagcttcaagtaattttttgactataatccattcacttctaagaataactttttgaataaaagttctagatctctcttttatcttttcaaaatatcttgaatcgtctaattttgaattacatcgagagagtaatggtcaaaatactatcgatcgttgcaacaagaactgaaaactagaaaatgtgaaaatcagcgaagaaaatagaaatcgtttgtaaggctgcaaccttggttcttttttttttgggaaactcggatttttgcatcataaaatgaggattgatgacaaagctttgacaccattcgaaaattgagagaaatttagagtgtagaaggagagcgaggagtagaaggcaccagtggagg

SEQ ID NO: 110105 - DNA, 589 bp, Cannabis sativa
tacttggagtttttgtattctggcaaagacaacatatctcacatatatgatgtttctaaagcgttttatcgtgtggagaaacaagataagtctcttatgagttactttatgacatttaaaaaaacatatgaagagcttaatgtgttattgccatttactcgtgatgtgaatgttcaacagttcaacagcgccaacgagagtagatggctattttgagttttcttgcacgactctcatctaaatttgactcgcatctgaaaaatcagtccttatttctgctgatgaattttctaagttctcaatgtatcaggaatcacttaagtcttcatctccttctatcactgtgattgctgatttaggtaactctaatgcatgccttctttccaaatcatcaaaatgggtcattgattctggtgccacatattatatgacaggtaattccagcctctttttaagttttcagtctcatagtcccacttcgattgttactttagcagatggatcaccatcatttgttcttggatctgacactgttgttcctacacctctgctcactttgtcatcaatctttcatttacctaatttgtcc

SEQ ID NO: 110106 - DNA, 714 bp, Cannabis sativa
cattttttcgtcatacttacctagcttgtatgctctgaagttgagaacttcgaccacttgatatggtccttcccagttagctccaagtacacctgccgtacttcctttggtgtttaggaatacccttctcaagaccatatctcccatgaagaatttctgagcattcacttgtttgttgaaataccgagctactttttgttgatggaccatcaactttaagtttacagctgctcggttttcttcgatttcatcaagtgattctgcaaggagtatgtgattggtaccttgatcgtatgtcagtcttctgtgggaaggtggttcgatttcgacgggcaccatagcttcataaccgtatgccattgcgaatggtgtttgtccagtttctgtcttttcagttgtacggcatgaccataagacttcaggaagctcttctagctagtttcctttggcatattcaagttttttctttagtgtaaccttgaaggttttgttgactgcctcaacttgaccgtttgcctgaggatgcaccactgcggagaaacttttgatgataccatggttcgcatagaaatcagtaaaggattggttgtcgaaatgcttgccattgaccggcatattatgttcttcataataaagtcttgaactttctttgatgtgatggttgcgagtggttcggcctcagtccacttagtaaagtaatcaaccactaccact

SEQ ID NO: 110107 - DNA, 526 bp, Cannabis sativa
aaaaaggtaaaacttgctgcaatttattttactgactatgctattgttcggtgggatcagttgtgcatcaacatgaggacgaatggagaatgagatattgactcttgtgaggctatgaagagggtaatgaggcagcattttgtaccatctcactattatcgagacttgcacctcaagttgcaaggtcttcgtcaaggctacaagagtgttgatgagtattacaaggagatggagatggctatgattagatccaatgtggaagaggatcgggaggcaaaaatggtaaggtttttgaatggattgaatcgagagattactaatatcgttgaactacacgattatgtggaattggaagatttggtgcacatggcaatcaaagttgaaagacaactcaagaagggtagttcgagctcaaggccaaggccaagtccgcacaatccaaatacaacaccttggaggtcaaacttcccaaagaaagatgatcaacctagttcatcctctacacccaaaccagccaccgcaacta

SEQ ID NO: 110108 - DNA, 570 bp, Cannabis sativa
acccacgagaagcacccaagacaacccacaaacaccgcaccacttccggcgaaacccactcgcttgttttctgtatttcttttctagtttttgacgatgttgcgaaatatcactaaatgtcgcgaaacattgcgaaatcatgaaacatctctaaatatctccaatccacaacagtgcttgttttctgcatttttttttctggtttttgacaatgtcgcgaaatatcgctaaatgtcgcgaaatatcgcaaaatcgtgaaaatatctctaaatgtctcgatttacaacatcgcgaatatcatcgcgaaacatcgctaaatatcgccaaatatcgcaaatcataactaaacttcatccctgacctcagatttgttctattattgcaaatacatcgctaaatattgtaaattatcacaaaaaactggtaaaccagaagaaaaaaaatgaaaaaaacgagagaggccgtgagagaagatgatgtcgaggccttgcgaccgagaaactgggtctgtgtgttcgacagtaggggttctaggtcggggttaacgccggagagagagagagagagaga

SEQ ID NO: 110109 - DNA, 904 bp, Cannabis sativa
aggcgttttcaactatttcttctgccagttgccgagctgaaattgcagaggttctaagtgtcaaagaggcacttagttggataaagaggaataacaagtcacatgtcattttagagacggattgcattttagttgttaaagctattcttagttcggtatctatgccttctatttttggtttatttgttcaagattgtcaatttattttatcttctttaagtaatgtttctattggtcatgttaaactgtctgctaacaaagccacgcactatatggcacgtggtgcttgttattggtcaggtcgtcgttttactgagagtcatgttccccttactcttgagttcattgttttagcatatgtttctgtctaataaagattatttttattcaaaaaaaaatatttaaaataattaagaaaataaaactataaggagaaacccatttttataaaaactaattaatagcaaacaattaaggaattaaattattaaaacttattgattatttgaaaacataaacatagcatagaaatgctgaattaaaataaaaaaaaaaatcaattacatataaaatatgtacaatttaaaatttcgtttatgaaggaaaaaataaaataaatttcacaaaaaaacctcaatcttctttcaccacctttaatgataattgaccatcctgcacgttagatgcacgaccatcactaaattctaattacaagcacaaccatctcaggctaccggtataatgacctcaagaccaccaaaaaaaatataatgaaacagaaaaactcacagaatgagtaagaaactactaagaaagtaatataatgatggtatttatagagaaaaaaaattatatatattgtaaacaccgcttagtttaattggaaaattagcagttaattatg

SEQ ID NO: 110110 - DNA, 565 bp, Cannabis sativa
ttctgttatgcatctctgaattttattgttgagcttgagcttgtgttttgggtttaaagattcaaggtttgagcttgaatttgttgatattttgctaaagtttggagcctatattgtatactgtttaaatctgattttgatgcatgaaatttgtgttttaactctctattatgttagttttattatgtgggaaatgattttgagaaatatgcatgtttgggttgaattgggggtgagtttggcatattttcgaagctaataactgggttttctgggtttttaaacccagtggtcgcgactatcatagctctggtcgcggccatgataatgacagtttaatattatttttgggtttttgttttcgccataacttttaactcggaactccttttggaacgttctttatattgttggaaagctcgttccgaactctatgtgactatctttaatttgaatgccaattttatattttgtggaattagatttaggaattaaccctatacttgtgtatcccgggattgtgacaaggattaccggcacttggtcaggagcactcggggatttg

SEQ ID NO: 110111 - DNA, 803 bp, Cannabis sativa
ccacttctcaataccatgatgcggacacttcctgatgagatctttaaccctctcccaagcctcatggagagattcactatcctgctgacagaaattattaatttctcctcgcagcttaactgactttgctggaagaaagaacttagatagaaatttcattgccaaatctgtccatgttgctatagaaatcggtggtaaggagatcaaccaactcttggctcgctctctcagtgagaatggaaaaagtctcaagcgaatggcatcatcactaaccccattgactttgaaagtctgacataactccatgaagtttgacaagtgcagattggggtcttcagagggaagtccaccaaactagactgaagactgcaccatttggagtattgcaggcttaattttgaagttgttggcatctacgacaggcgacattatgcaagattgaaccaccgtaagagttgggagaatataatctctcagactgtggccatttacttgatcctcaacggcacctccattattaccgttgttgcctccattattaccaccattagcattctcagccatgatttcttctgtttcaacacagttgctgaaactctttcttgcctcttgttccttctgtttcttctacaagtcttctcaatttcaggatcgactggcaatatgataccttgtccttgacgtcgcatacaccttcaactcctaaaatggacaaagacaatattgaaagaaacaggttagcaattagtaagaaagataaaccaaagtagaatttaatataatcttatgcaatatcaatcttt

SEQ ID NO: 110112 - DNA, 2945 bp, Cannabis sativa
atgtgaccattgatgggtttagttgtgattgatacaacgaaaatcgctttgatcctatgttgatatggttaatggtcgagatggcacatgcctacggttatgatgacaaagttatgagctcaataaggttaaacacatttttatttatacctatgtggcccagtgggagattattagaaatttattggggtaataattgtatatataaaatgtgtgttaggtcatcaaataaataagtcaaatttatgtggtctattttgaaataaagtttatggcttaagggcatgattgtcatgattttaatatgtggataccataaggataatttctaatttgatgaggggccgaatagaaatagtcaatagatattattaactgttttgtcaattggtaatataaacggtaacgatccctaatttacagtatcgtatcttttcattcttttaaaactgcatcatcaagagatgaaggttacagaaaaagattttattgcaaaattagaagatcataccattacaaaaatcgattctatggactctggtacgcttctgctactctctaattcattgtttcattctcacgaattaattagggcttaattcaaatttacagtgttcttaatagttttgtcccatatttttcgctaactttagcagtttataatttgacaaagcatgtcttttggttaaacgatgaactatcaaaatttaagaaagttcctgcgctatttatgaatgtgtgcaacataatttcacatgtgattttaatcaatgcttaaagaaaaaaaaagtatggggagtaattatttttaatggatttaagactttgattaatagactcttacatcatattggtagtttggtactattgtatacgatcagaatagaatgggtagtactgatctaaagcactacaaaaactcttttaatatttgtattagtaaatcttaattaattaaatatcttaagtgagtcatctataatagaatataggatcttaactattttggtttgtttctttcaaaaaaacaaaaagaaaaaactattttggtttgttgaaatataacttaaggatggtctctcgtccaggaaaatgtttttcaaccccaagcacaacagggatgaagaaagttctagcaggtttctgttcatttttcttctacttaatcaaacattttcttttaatgtgttcttttttttttttttttttttttttcaaaatatgaaaaataaataaaaataatttattaattaaaatggtggacaattttggtattataaaaagattactcatcaatagcatacataatgtattttttttagttctatttgcactttataaaatgataagtatatttcattattaaaaaaattgaataatttttaaaaattacttttaatatttttcttaaaaaaaattttcttcaatattattttatgttaatttaaaatacttgttttgattttatttttatgtatttttttaaaccatgtatagatattttttaagaaaattttatgtaatttttttcttaaaatatttaaaatataatttatttttatttaatatgtatattttttaagaatataaattttgatgaaaagaattaaaaaaacataataaaattaaaatataaattttatataaaattaatattattaaaattagatgtctttaaaaatgctgaggtataaataaagatattccctttttttaccaattttacaaacggaggtatattctctactatttattaacacctctgttatgagctttattgttcattattttattttgatcaatgtttgatctgaatctgattaagttccacataattgtttatatctctctctctaatttcatcaaaatctgtactttatattccgaatgaacaaaatctattaaaaatctgaattttgtggagctagcttgtagttgtatgtacaaaagaatattctatcagcggctctgcccaaaaaaagaaataatcaataataataaacgaaggaaaaaggataggaattttgagtgagtgcgtttgtaactttttcactattcttttaaatcagatctacgtattttttttttttttttttttttgaacacatcagatctacgtacttaaaaacttaatttattattaaataaatacaagattgacacacacacacaacacataatagtggagcggcagtagcactacaaccaagccccccatagccacaaaaagcactatcattatttttgaagtacctaattattaattgttatttgcatgttaagttgctcaatttaatgtcaatgttacgttttataattggtttggaatttttttatattttttattaaggtgaaggatgttgtcttgttggatgaaccattatgcatttaatgtaaactgttccatcttatgtgtgattgatctaaaggttgatattgaataaattgttcacagaagtattaagaatatttgcttaaaaaatgtccaataattggctagctttttcaaaaaaaaaaaaaaaaaaaaaaacgatttttaaatacttgatataatatagttgtgtcagttattacttcttgtaactactcatcttcttgttttcttcatttcttcttttttttttctactaacttaactcaacgattctcatcttcttcttctttctcaatcaacagtgtggaaagtgcttaaagggttggagcttaataagcacttaggagttaatcaaggtaatctttttaaaaaaatttcctcatctggtaatctattatgttctaattttcctaggggttcgtgttagttcatatttattcgacattatatatttagagtgttataagaaatgtatttgtcgattaagatgttattgttagaatatgttttaccaggatctagatttactaacaaatatgttttattaacatcttaatatgaatttctaaaa

SEQ ID NO: 110113 - DNA, 692 bp, Cannabis sativa
acgacgctcttccgatcttgtaattgaatctttgaatgttaggatgaggattatgagctaaattctcttttagggttgttatgtgattctcttgaacctttttgtggatggattaatgctgtatttgatttcttcttcatctcttgttcaatcccctgcaatctattttatttttgcaactatttactagccatttataattattattcatgaatcaaattgaaatatgaaaagtgaggtttgagatgatatgattttttggatgcaaattcaatttagaatgaaagtatctaattatttgcttaattttctgatttgttgtatccattgccttttttatgatttaactttgccataactatataacgagttatcatttagattgagtttataaatcttaactagattatgaactgctacatgcaacttgtttattgaataagaagaagagtatttgggttccttcattaagaagtaaaagagtggataatagatgagcataattatcctaattacattctcattgttattttattttaatttcattattaattgttgttattttctttgttcaaaaattttgaaaattatttaatcaagtagaaataaaagattgatttactggtaattggtgaataagtttttgaggacaatacttggttctaccaactttattacttaaagcgatatgt

SEQ ID NO: 110114 - DNA, 553 bp, Cannabis sativa
atttcttataattatattattttttaaataacattaaaaaataatatcatattaattaactaaaatcaccacaatgcacctcttaaaataaaagagtcattcgtgcaaccgatagtttaaactttattttcagggtgttaaattttttcagttttttgaaatttaacaagatgtcttaaataactataatgtaaatgaccatgaaaaacaatagactaaaaaagtctcttgaatgctgaaataagtagtgtgcaccacttttaaaaaattacattactttcagcgtgtattaattttttttaattttttaaaattttacagaatatctttaataactataatatgcacgattataaaaaaatttggactaaaaaaatttgttgaatgtcaaaacagataagagtacatcagtacattacttttaaaaatgtgcattgtaaaatttctcaaaattaaattcttaatttcataaatagatctaattaataatataaatatatagggtaaatagtagcataagtactcaaagtgttatgtttataagcggcataaa

SEQ ID NO: 110115 - DNA, 531 bp, Cannabis sativa
tttttgaagatttattgaaaaaaaatattgaatctttctcatttttattttgaggaggtacgctttgatagttgtaagaatttaggaggtaaagttgctaatttacaaatacacgtcaacatttaaacagaataatgagacagaacctaaccaaaagactaaattttagtaaatgtaaaagttcaagggaaatttttaacaatctatttattttagggggcgtattgtcaaaagttcattggggtccgagtctgggtcagggtcccaggtttggggtctgggtccatgtccgggaccggggtctgttaggttatttttagtattaaatttagattaattttagcatattttttatttagtttaaatcatgtttggattatttttacattttttatcttttaattttgcagatttaaaatagatgaagagttggaaaatatcaatagaaaaagataaaatttcgcataaaaaatatcaaggtggaaaaaaattaaattcaagcccaggaaaagataaatcacgtggaatatg

SEQ ID NO: 110116 - DNA, 563 bp, Cannabis sativa
ttgattaaatagcatgctgttacagcagcttctgccccaaaatctcttaggcaaacctgcatatatcagcatacatctaaccctttcaaggatcgttctgttcattctctcagcaagcccagctgagggtttctaggaacagtaaggtgtcttccaatgccattgtccttgcagaattgattaaactgctctttacagaactccaatccattatctgtccttaacttcttgatttttctctcaatttgagtttccaacaaaattttcagttctttaaacttgttaagtgattcatatttatttctcaagataaataaccatacatgtcttgaaaaatcatcaatgaaagtcaaaaaataccttgctcctcctctggattgagtttttgatggcccccaaagatctgaatgaagatagtccacaatgtttctggtcttgtgttttccaactccaaacttagctttggtagcctttcccatgatgcattgctcacacagatctaattccttgatctgttctttgccaaatacacctttcttactcaaaacttttagaccaccatg

SEQ ID NO: 110117 - DNA, 811 bp, Cannabis sativa
agtacggataatggaggcaaagtttgcctcactcgaagtacaaacggcagggagaacttttgtcggggcagttaggcttggagcgtacgatctttgggacagctgagcttattttgtatagtcgctaagcgacaaatttttgtaatatgcacagtaaaacttttataaatatttttcgtaaacgggatctcggtataatacaagtatgctattttagtagttataaatagtaaaataaaattttaattattcacgatttttgataaactcgttgataagcaaagagctgcacatttaagttaaaaattacgttaacacgcctaaactagtagggtgttacatagacattgtatttgctcttttaattcatgttactagcatcagaagtgacatgattactagccccactcttagcatgccaagctccatccttaagcatttcaggggtaccaatgtgtttgccaaattttttaacaactaaatattttttgagcttaggaaagtaaagatagaataaatagcaaaataacaaataagagatttttacaaggttcatgcgttaactatccttagtctacaaatattttttattaggctcatcggccggtcaactgtttataaaaataggtatacaatggactataactcttttacatcgtgttcctcttaaagaagaaaaatctatatgtaggaatattcgggagttgataataaggttacaaaatatgcatgcttgggatgatgaagaatgagtcttccatccgaaaaaaggtctccccttcttatgcttttttgggggtatttataggcc

SEQ ID NO: 110118 - DNA, 528 bp, Cannabis sativa
ccaccccatgccgagactattgtcatcctcaaagacagcagcatcacaattaacatttatctcaccaaaataaggtttagcccattgctcacacccaattgtaatcggaccagaaactggcgacacaactctatttttcagctgagcattcttctaagaatcaaggtaagtaattgcagcattcaccatcctctctaacgacaaagccttattattccaaaccaagtcattacgagctctccaaactccccaaagaagcatatcaagcctctcaatacgatccataggttaaaccttacaaacattatcaaaccagctgccaaacacagcagcttcaccccctccaactgtccctcccagccccctgtcaagacaactctttgtaaagcgcaactaaccattatatgaaaaattgtctcatcctcgtggttacacatcggacacaatccgctcacgtgcgcccttttcgaccgcagagacacaagagtagggagacaattcgtaagttttggaaatattttaccagga

SEQ ID NO: 110119 - DNA, 645 bp, Cannabis sativa
gactgtgagttgagagagagagagttggctgagagagatagagagagagagaattgtgagggggtatttttggggttttgaaaaaaaaagtataattttttttatggtttaagattttggtataataataaatttttttaattatttaagcatataaaatcaaaataccccaaaataaaactaaaaataagatacaacgtgccttgcacgtagttgccgcctagtaaaagaataatatatcaattaaagcaatgtatgaaatgtataatatttaatgaataaagcatatagttatttcacttacttgattttctttccatagttccttaagttggctttcctccattctaaaataagcaagattctgtggtgtgaaatttgagcctaaggattcgaaagggtattcagcccattccaagtgtctaagctcatcgggaaaagtcatgtcatgaagaccattaggcaattgaactcgaattagagaaaagtctcccgatagtttcagtaatcttagttttggcactttttcgaagattaaggggtctaactttatgacattatgatcatttcttctgctaaagtcatcatcatcaacatgaaatattccttcaattgtgggaggaccctaagaattgaaaaatcaaa

SEQ ID NO: 110120 - DNA, 551 bp, Cannabis sativa
ctcaattcctctctgcctctgcttcaatcttccttaattgtttactcaaaaattggtagcggctatgcatcgccaaacttttccctgcaaactcgaccaaaggtacattcttcgaccatattatgtaaaattgtttaattgtattttgtgtgttgaacgaaatgttctctctgtatgtatgtatatatatattgatatatgtgatttttggatgaagtccatcttttttagtggtcaatttattgtgcagagtaatttataatagtttttaagtaatgtagaataattaatatttgattgacatgtacaatatacatagattaagtattaaattttgtgtagtgacttgtgagttttttttttttttttttgaaacaacaagaggctgaatacaaagaagaaaacaaacaagcacaaacagcctaaaggggctaagaaaccgcctagtcttcgactctcaacctgagggctaacttcgcaagggagtgagctttgtcgttgtgctggcgagggacatgtagcaaagtagcttcagggaatctggagaggaa

SEQ ID NO: 110121 - DNA, 786 bp, Cannabis sativa
tacacataacatatacatacactttgttaatgatatcacacattatattcaattcttaccttccttccagattcaagtgtgctggccgacctgaacaaaaagtctcgtgctagatggatgccctaatcacatttgaaactgggtaaattacatggtcaaaaccctaatcctgagaaacccaaaaccataaccctaggttctgatatactcccaagaggttacctaaactctagaattagggaaacacccaacgatggtactaaaatggacaaaaattgagaaaacgaagtgttcgggaatcctgccaaaactggctagccggttttagaagtctggcaaaatcagctagccggtttgcaccagttctccccaaacccttcacctcttgcttaattttccaccaaatgctaccaaactttccagagtacctaaacaatgcatagacaatatttttcaaccaaaccagatgctaaatgctatattcaactcaaatgaacctagaaaatcaaaccttaaacaaacctaaccctaacaacccctatttcacaaaattctcacattcaacctaaagaaaaagcttcaaaaacatgctcaagggttctatcgttttacctttgcttgaatcctcctccaaccttgctgaaaatacaaattttagcaacaaatgcccttggtttgcttcagccgaaagagaaagagagaaagagatagttttctttaatttttgacttttttccttattcctctattttcttcaaatgaaaaagagataatccccaattaatt

SEQ ID NO: 110122 - DNA, 547 bp, Cannabis sativa
ccactaacaaatatgaattatcaccctgttatctaaatctgtcgtaaaagcatgtcacaattttttttatcatagccaatatgcattttttttcatatttatactttagcggtcaaatttaagataatttaaaaattgtagatatttagaaaactatctaattatttctcttaaagaaagaacgattaaataatagtgtattaaatatataacgaataatctattatcttgtcatatgcttgttaacatcatgagttagcacatattttaagtttgttttttatcacacaacaatcaccaagttgatttttcttagtttccctattgatattattagtagggttttgtttctacaaattttatctttcttcttattctactctctattaaggatgcacataaactctatggggacgaggatgcacccctaatggggtggggatcgaaggcgagacaagatttaattcatgtcctcgagtcggaggggggcggggtcaggaatatactatccgctcctattttctccgaatatataattataatttat

SEQ ID NO: 110123 - DNA, 558 bp, Cannabis sativa
  modified_base (200)..(203): a, c, t, g, unknown or other
acttatttggatcttgaaatccttttgcatatatttccttatatcagagtccaaatgatctgagtcgttaattgtgaatttatcgttaattaggtgggcaattatcaaaggtaatgctttacgattatctttctctcgaacataaagggaacatgtatgtacattttgaaatgtagtcacctcaaacatgttagaaagtnnnntcttctttgctcttaatctccacctacaatttgaatccttacatataacataccaaagagtagtattggacttcctaacgaagtattcgaaccatttcttcattgcatacaagccaacaatcatctttaaatgctctctgtttctaagaaacattactagatgtaactccccacatgttgtgtcacccatatatacataatgcctattattctcgatgtcttatcttgcagatatgttctccttgaatttaccgtaacttgtcgaagaagaaaatggatcgctaaatccaatatcattggtccctctagcatcactaggacctctaccatcagtggtccctctagcttcactggt

SEQ ID NO: 110124 - DNA, 1443 bp, Cannabis sativa
aaagcctaagccaccttcctttttagatcgacaaagttttttccaactttgccagtgagttttggggcggttattatcattaacaccccaccagaaattggccataacggattcgagagaatgacaggtggctaccggaaggcggaagcacgccatcgagtaggtgggaatggcctggatgacagatttaagcagagtttcctttcctcctttagaaaaaaactttattcttccaattatggagatgaccccagaccttgtcatgcagataatggaacaaatgttttttcgttcgcccaatatgttgtgggaggcccaggtatttttcgaaggatgaccgaaccgggatacccataaaatcggatatcaatgttcgttccctaagctcaacattaggggagaaatacaaagaggatttttggaaattaacttgctgccccgtggcccgcccataggcctcgagaacctctttgatgatattgcaagagctaatgttggcttgacaaaaaaggaagctgtcatcagcgaaaaggaggtgggagatagcaggggctcttctagcaactttaaagccaagaagagttttccttctttcctgttggtgcagcagggaagagaagccctccgcacaaagaaggaagagataaggggaaaggggatcgccctggcggatacccctggaaggattgacactgcctaagactttgccgttaaggttaaattggaaggaggctgtagagatacacgtgaaaatcagttggacaaaccgcggagggaattggaatttcctgaggatagctattatgaaaggccactccacacggtcgaaagctttagccatgtcaagcttgatcgccatccaacctttttttcctcgcgtcttaagcttgatggaatgcgcgacttcctgggctataatgatgttgtcggaaatgagttggcccggaaggaaggcgctttggtgaggtgagataagagaattcagaagaagtttcagcctgttagctaaggtcttagagatgatcttataaatgatattacagagactaatgggccgaaactcggagatacacttaggctggtggactttgggaataagcgtgatgagggtgttattcagaggggccacactcgcatttccattgagaaagctggaggccgcttcaagcacatctttcctgacaacatgccagttggctttgtagaagtgagaattgaagccgtccgggccaggggctttgtcaaggggaagttggaagaaagctttctcaatttcgtcctgggaaaaggcctcacttaagagggatttgtcagagtcagagagagcagctaattccttccaaagctgtattcacatcagaatcggtggggtttaaggaggtaaataactggtcaaaatgagactcgatttctcgaatgattccatcctcatcagagaccatg

SEQ ID NO: 110125 - DNA, 581 bp, Cannabis sativa
cggctagctttaccccctgctttttctggagctcacaatgtgttccatatttcaaagcttagaaaatatgtgtctggtttgacccatattctgagttatgaggacatcgagcttcagacaatcttatcgtacgaggaacagcctgttcaaatcttggatagaaaagagaaagtattgtggaacaagactattccgttagttaaagtgttgtggagaaacaacaagattgaagaagtgacttaggagttagagtcacatatgtgggagcaatatctcgagttgttcaggtaaattttaagaaaaaatttctataaggaggggatagttgtaatatcctaagaagtgtaattatgtttaattagacatattttattaaatatccagttatataagtctttgagtaaggttataatcctactaatgctaattatgagataattagtgacttttgggaaaataattaaatgagtgtaatttattaattactgagattttattggaacatgtgggtattatatatactatttttttgaaataaaatatttttcaggttagcaaccgtggaaactcaatggattggc

SEQ ID NO: 110126 - DNA, 518 bp, Cannabis sativa
  modified_base (278)..(284): a, c, t, g, unknown or other
aaaaaaaataataaaaaaaattggcaaaaaagtggtaaaaaaaagttgaatttgacttaaatatttttcatataaatatatttttaatatagtgtaaaaaaaagtattttttgatattttcttttattaagtaactaaattaagcatagaaattcaaatttctcttttattatttactatcggactaaaatctaatggttaaatatttttaaaattaacatttataattaaatttatttagtacccattaatgggtaatacccattgaaaagtattcnnnnnnntatatatatatatattacatagtataaaattaattattggataattctatagtaaattcactagaaccgaagtttctattcctatctgtttttgtatttagaagaattttttagtccattttttttttatataattgtatatgttataattatttagaatcacatgtatattttcaaaaaattctaaataatatacagtgctcaaaatatgattcaattattttgttgatgcgt

SEQ ID NO: 110127 - DNA, 1538 bp, Cannabis sativa
  modified_base (768)..(776): a, c, t, g, unknown or other
tctcgtcgatgttgttcttcttcgtcgatcactgctgcgagccagtgctccaccctccttcgacgacatccattttgtattcagacatagtcatctctcctcaccaagaaaccaataccgaagttctcagatccccaatctcgaaatcctaggtcaatttttcctagttctttcatttctctgtttctctcactctctctctctctgtctctctctcttatgtgcagggatcttggcctccgttgttgacaacatttaaagctccctatggctctcaactttcgtgttcgacggatgtggattttggcgttcgacatcgccatagatctgtgcaaggatttgattttgttttttgtgtaatttttttattgttcaaaatgtgttttattaatttctacattttgtatccatttcatagtttgaactgttttgaatattatgcttgtgtaatatatatcaaaatttcagtttaatttttctttttgtatttgttgaaatcattgaaattctatacaacattcaaatagtttgtatttacagatttgcttaaaaagttttgaacacatattatataataataaagataattggtatgttattacatatttatttttttttataataggtattgtataattttctagttatagatttattggtataattgtaaaaaaataattataatggtttaatttataaattttacatttggttaattaaaattagtattatatttaattatatttgtatataattaatataaattannnnnnnnnatatataaaatttgaattaaaaaaattaattgtgatatttttttagaaaaatatttaatatagtggcacttttggtgtgtcactatatctctaaaaatattaataaaaaagaaaaaaaaaagaaaaataggatatagtgacacttcatgtgtgtggctgttaccttttcagtatgacaaaacctgacactataagcctatagtgacgaccataaaatgaatgcaaaaggtttcaatgacacgtgtgaagtgtcactaaaaactgcctttccagtcagcgtcattagtgacgcgcgttgaagtgtcactatacacttttagagttactcaatgtgtgtcactaaaacccaattttctagtagtgtcttagtcactattgaggtgatcattactaagaataaaagacttaaataatacttatcttttgagattttactgtgttaaattgctaatgaatgaacatttattagagatgaattttattaaaacaagaattatgtagaaccaacaatgaaaattgaatatccttatattaaagctcattattttcaagaattgtatttttatttgatatatattttaatctatttatttaattaaaattactaatttaaataactgtaaatataaattttaatttaatatttataaactatatacttacttggataaatcttgttgaccgagattttcggcaaccaataaaataataagagtttagagagctgtaagaaattagaagagagatttttacgtggttggg

SEQ ID NO: 110128 - DNA, 948 bp, Cannabis sativa
cacattgagtaactctaaaactatatagtaacacttcagcgcgcgtcacctataatgagggtgactggaaagacagttttcagtgacacttcacacgtgtcactgaacccttttacattcattttctgcgcgtcaccataggcgataatagccacacacatgaatgccactatatcttgtttttatttattttttattaatatttttggagatatagtgacacacaaaaagtatcactatattaaatatttttctacaaaaaatattatttaattactttaactcaaatcttatatattataaataataatttctattaattatatacaaatacaattaaatataacaataataattttaattaagtaaacaatattttgtattaatcattttgccaaaatcagagtttattacaatgatacaaacaaaaaaaaaatgtacacaaataatcagtatactcgactacaactaaggcccccactgatcctgcaaacaagaacaatttttcatgaacagaaaaattaaaacttgagtatctccacaatagtttctggctgtaacaattttaggcatgtaaaaacctaaaaaatataacaaaaaaaaaaaagaagaaaaaatagatctggttgttggtgtagctcggatctccatgaatggccactcgtctagtgatctatgacagagggagatagagattggaggaagaagagcacaacttgggtctcgtctagtgatccacggaggtgagaggaagctgaacagaacccatctcgcgcgattgagaacccttgatcctcgcacgaacaacagtgggggttcatgcaaggaaccgagaaggagagaacgggaaaagtcaccgaggaacgagaaagaggtcgtccgcttcgttcacctagccgagagagagctgtttgccaccgtgcatttggacgagagagagagagagag

SEQ ID NO: 110129 - DNA, 1518 bp, Cannabis sativa
tttacatttttattgataaattatgttttgttttaccttatttaaggtacagagtttacctaaataaggcatgtcgtttaccttatttaagacacgaagtttgtctaataaagtgtgtcgtttacctttttttaaggtagctattgaccttttcaatgataaattatatgtagtttaccttatttgagccacgtactttatataaataaggcatgtcatttcccttatttaaggcacggagtttacctgataagatatgtttacctaataaggcatgttgtttatcttatttagggtaaggggttcacctaataaggtgtgtcgtttactttattttaggagcatagtttaattaacaaggtatatcgtttacctttatttagggtaatatgtttacttaataaggtgtgtcatttatcttattttaagcatatagtttacctaataaagcatgtcgtttaccttatttagggtaaggagtttacctaataaagtgtgttgtttaccttattttagttacgagattcgcttaataaggtctgtcatttaccttactttaatgataaattattttttaattgaccttatctaaggataatgctttacctaataaggtgcgtcatttactttagttagggtaaggagtttacctaataagacgtggcatttaccttattttaagcatgtagtctacctaataaggcatgttgtttaccttatttagggaaatgtgtttatctaataaggtgtggcgtttacctttttttagacacgtagtttacctaataagacttgttatttaccttatttctcacttccctaataaagtgagttgtttacgttatttaatgcacaaaattaacttaataaggtgtgtagtttatcttattttaaggtagacatttttagtggtatattattttttgtttaccttatttaaggatagtgatttacttactaaggtctgttgtttatcttatttagggcaatgtatttattagtgtggcatttaccttattttgggcacgtagtttacttaataagacatgttatttaccatatttagggcaaggagtttacctaataaatgtgctatttaccttatttaaggcacaaagtttggttaataaggtgtgtagtttaccttattttaaggtagacatttttaatgatatattatgttttttgttaccttatttaaagataatgatttatttaataaggtgttttgtttacattatctagggtaggtagtttacttaataaggtgtgttgtttaccttattttaggcatgtagtttacctactaaagcatgtcgtttatcttatttagggcaatgtatttacctaataaggtgtgttgtttactttcttttaggcacgtagtttaccgaatgaggcatgtcatttaccttatttaagacataatttatctttaaaagagtaaaatactacttttaaataaggtaaaaaacatgcagtcaattctgtacactaaataaaataaactaaaacata

SEQ ID NO: 110130 - DNA, 597 bp, Cannabis sativa
taagatcatttaaaatttaataataaaaaaataccagatcttataattaaaataaataaaataatctaaaatttcaaaataaatcgtaaggctatttttgtgagaaaacaaatttttaaaattcaaagccaactaatatctaaaactaattttaattaattaaaaaataataataaaaattagtttattctgacaattagatttttaattgaaaattcagattctacacaaaattttaccaaaaattggcttttgtttcaatgaaaaccgatttttgaattaaaagttatgacgaaaaaaaatatgaggcacaggggtatgcaatgtatactaatgcgcgcgcgaagattagtgagcagccgagaaacaaggttgcgtgcaccctcagtgaccgagtaacctcggcgcatgcagcctcttcaaacagaggcatgagtgactgatctcggccatttctgtctgaatgggcgtgtgtcttcgagcggtcccaagggtcgtgggagcgcatgtgacattcaaatcctgatattttcattcaacttcaaaaaatcatatctaattcataaaaaatccaaattaggttttgtaaaagcctaa

SEQ ID NO: 110131 - DNA, 725 bp, Cannabis sativa
  modified_base (35)..(38): a, c, t, g, unknown or other
tgcacagtatgtttaaaatcacgtaatacgcctannnnagttagggtgttacatttatactgtaccttcacaggtagggttttcatagaaaaatttacaccctatactgattttttccattttatttcttttgtatggttacacggcaattataacttttttactgtgtaattgttttttttttttttttaattttgagtaagtctaattaatttaacttaataatatatatatatatatgtgtgtttatatataaaaaagaggtttgtaaaaattgattgatgttttttacatcacttttatgttaaattttttattttatttttttacttaaattttaaatttaagtccaatcactcacatgattttatttttaaaaaatttatatatttatttatatatatatataactctttatatgtatttagttgattgatgagacaactttatttttacttaaatttaaaattgaagacaacccacctacgtgatccctattcccaagcttatatatctattttgtttctctctctatctctttttgtgggttgatgtctatagaaaaattcttgagattggtgtcaagataaagaccatcaaccaagagctttacataaaatcattctctccattcttcaatgtttcaaaaacttacaaagcttattcatttcattcatttttttacttgagttttgagagagaaaagtaagatatatatagagaga

SEQ ID NO: 110132 - DNA, 1180 bp, Cannabis sativa
gctgcaaccaggcacaaaggaaagcacaacaaccccaacaaagacaaaaacacataataaaaaagatttggctcattcatgtatttgactaaaccatcttccaaaagcagcaccacaggcttttctgacttctctattattcaatgccaaacttgttcctcaatacgctaacgaattcgcatacctttttcccatcaggcagagttttggagacactctccctctgcaggcacctcttggcccaagtaatgaatttgggacactcggcttcaatgctgaagttcccatagctctcataggcagaaaaccagctgtagtatcctataagggcaacatctacaaacccaaagttgtctcctccaaagtatggcttctctccaagctctgcttccaacaccttcaaaatttctatgtattccttcttggctgcttcttgctcttctccttttgtgctccatatcttccttccacaatcatagacctgtattttacagtacaaatttgttaataaattttagaaaagttggctttctttagaacacttcctctagattataaacagtgttttaataggtacaacacacaagtgatgtatgtaagtaagctccaaccccatacataaacaattctctttttagcttttagatggttactgaaagtaaaaaaaagaaaaaaagatattacttaattgtacaacaaccaaaagtgaaagagataaagttgtactagtgctgagaaaagcattgataatgtctgagcttcagatctacacattgaatttgaatcagccgaataaaacataaataaagtgatttaataatcattttgtaataaaaaaaagcttgtctcctgtgcttgactgaaaactaccaaataaagaaagtcatcctatgattggaattattattatcttttcaaaaaaaaaaaaaaaaaacaacaacaaaaagctgttaaacagtattcctttatattagtccaaaaacaaattatgaaaaaaaaggcttatattaaaagctacaaacagagttaccttcttgtcgatgtagtcagcccaaaacctagcttgtgctctctggtaaggatcagaagaaagcaaaggggaatttccaggccaaacctcatcgatgtactgcaaaataacgagcgactcacatacgggctttccattgtgaatcaatac

SEQ ID NO: 110133 - DNA, 509 bp, Cannabis sativa
  modified_base (312)..(312): a, c, t, g, unknown or other
ccttatgttgtgctcaacaactataaacacctaaacgatttttatatccaaatccagtgggtcttaatgatagatttcttccactagctagaaggaccatggaattcttagagaaccttccatgtccattcgaacaatggaagcccctacagtgcatacttttgaatattctgatcaatcctccatactttcgtgtccattccattgttccatataaccaagttgttgcatcaagggttatggtgatatcgtagcagatcaatctagtactttcgcatattgtgataaatcatccatgctttgttaaggtgngcatgaacaccttatgttgcgctcaacgacaatcaacacctaaacgatttttatttccaaaaccagtggaggttaaggatagatttctcccactagctagttgggccaggaaaatcttagagtaccttccatgtccatttggacaataaaagcccctacagtgcattctttgtcacattctgatcaatcctccatac

SEQ ID NO: 110134 - DNA, 582 bp, Cannabis sativa
tatgacccatataacacatcttgtgtccatttggcaagtgacaagcccatgtgtgcaacaaatcaaagaactttggtaaccttttgtgcttaagcctgataaattattgtaagttggaaaatcgctagcagtctacaataacactgcctttagattaaagaattcttacttaaaaccatcataggttgaacatcattcgcatacaattctatcatatcatcaattaatgattcgaaatatacatcgacattttgtccaaattgttgtgggtctgatatcattaaagaaagcatgttaaattttcttttcatcactaatcacggaggaagattgtacataacaagaaagacggaccatgaactatgacaactacttagagatctatgtggatttactccatccacaaattgaccgggatgaagatgtcttggtttatatttaaattcttgatttatgtagtttacttttttccaagcttgtgaatctgtaggatatttgagtttttaatctttcactctcttagtcttgtgccaaatcaaatttctgaatggtctgcagtacgatataatcgtttaagtcgag

SEQ ID NO: 110135 - DNA, 791 bp, Cannabis sativa
aagccttcatgaatttctctgatgatctcgtttgcttttgtaggaagaacacaccaaagtagaggcatagaatgatctcttctgtatagtttgccttcaattattgtgtatcaaggcactgaatacaagagttttggtgcctcgtttttgtcagttggaagttgtccgtcgagtagatagttgattataggagtcatctatgtaggtgaactgtctatcatctctatgtcttccttttcacatatacttggctcgcttagcatctccaatggaaccaagtttaatttatccaagtcattctacgaggccagttttgccaaggcatcaacattagagtttcgttctcttgggatttgcttgattttaaagtaatcgaatcttttcaagttcttctgaaccttctctagatacttagccattttaaggcccttagcctggtattccccgagaacctaattacaatcagttgtgagtcactatgacacatgagattcttgaccttcaacgcctcggctatcctcaagccagcgatcaaggcttaatactcagccttgttgtttgacgcgtcgatttaaaatctcaaagcataatgaaacttaaaggcttctggtgaaattaatattaccctgcacccgagccctgctcgttggatgcaccatccacgtataacttcctagtgtctgcgtctcggtgaacagacagattttcctctagagttattccttctattaagaagtctgtcaaagcttggtccttgatggatgttcgagggtgatatgttatgtcaaact

SEQ ID NO: 110136 - DNA, 687 bp, Cannabis sativa
ggcatccatctcgctataggaaggcacgcttgtggtaccttcactattcaactccagacatctttcaatgaaactcacagcgccgtcgagtcaattctctcggatagaagctatcattcaagtgatgttggctgttgaagttcaccttgtcgcctagaactgtggttgtcagatggagcaccatgtcttcaagaatagaggtaacaagacttacattattaaccttagaaagatgtgggaaaagctctagctcgctaccaagggtgttgttgctatattcccaacgagatgtcccagaacgatacgatttacaatgtatttaatacacgttttcattgatccagtaaaagcggaccaatcatagttgtgtgatttacagatattaaccgcacttattctacgtggaatgtgatcaaatcccataattttagggtatacttgttgtaaaatatcagtctacactgtaattaatcgccttcctatgtaattataaatagaggcagaatatattaagaaaggggacgaaaaaattcataagagaaaagacctgaaagttgtatcagaaatctaataagattgactcgtaaactatgtagaattttaactacaaaaccacgtaaaaaaacctttgtgttcttatttttctctttactatttttattttctgtgcaagttcatcacaattaa

SEQ ID NO: 110137 - DNA, 598 bp, Cannabis sativa
taatttaaattaaacttacaaaatataaaaatcaaaaaaatgataatataataataataaaaaaaatcgatttgttgaaataggtatgttttgtattctaaaattgatataataaaaaagtaacaaaaaaaattgaaaaaaaaaataaaaaaaaaatgataaaaatactcaaatatatagtcatataagtgtgtcacctcttacaaatatatttttttaacttttgaacaaattaaaatttaagagaaaatattttagttgtaaaaaatatttttaactcgaacaaacaacaatataaaaatctaaaatattaaaataaattcttaaactaagttaatttcgtaaatgtatataaattaaaaattattaaaaaaaaattaattattaaaagataaataactacatatagaaatcaataaatgtaatttattagataagatattaataaatcacccataaacaaataatattttttaaacaaaaaagtgttgaaaaataaatgtattatttataacctacttagataacacctaaaagatctctaaacaatgtgggacttttagctttgtatgtatagtttatttttcaaataaaataa

SEQ ID NO: 110138 - DNA, 589 bp, Cannabis sativa
  modified_base (89)..(95): a, c, t, g, unknown or other
cctgaaggattacgatctgcatatagtagtattcctatttcccttcaaaacttcttcttccataagttcaataaaaatttcttcatgtnnnnnnngccaaacagaagcttcgctattatcaataataattacctctcactatctgttcctgtcatctattcaatctacatgtaattacaaaactaatcctaaaatttttataaaaaataataataaaattgatttaaaaagttacaaactaatgaatcataatcaccctacaaaattatctaatcaaaattcaaagatagataacttctcaaagatagtcccacaagtcaacaagctgtgaaatttaatgagtaagaaaatcaggttcatgagaacttacattcatacttgtaaaaagtaacaaagaagccaagaggtagcaaatagtagggattataatccgataaagaaatattattgtcaaaataggaaattctgaaaggagaaatagcatagcattatgccatgatataattaagtgagttatattttttttttttgacaaagtgattagaatcactcatgaatttatgacgcccacgtccgccaccggcgctgg

SEQ ID NO: 110139 - DNA, 601 bp, Cannabis sativa
  modified_base (485)..(488): a, c, t, g, unknown or other
tatcttgaggaaattggatttgaaaaatgggttcagtcgtactttctaggggtacgttacaatgtaatgacaaacaactgagctgggagcttcaacaacacaactaaggacgcaagaggcttcccgatcactgctgctgtaacattcctgaggtccaaagtccaacaatagtttgctgcacgaaaagaaaaagttgacaagtggacgacgaccctagcaccagaaatggaggaggacttggcattgcaatttgaaaaatctcgatatttgaacgttgacacatgtggaccttacatgttgcaggttcaccctggagaaacatttgagaccggtagcgtagtggacttgcgaaaacagacttgcacttgcggcttgttccattgcatgaagtttccttgtcctcatgcatgtgctgcagctcagcaatgaagtattagcatgtacatactatgttcgtcatattacacaatagaatattggaggannnnatataaaggtacaattatgccagttggtgacgaggatgattgggaattgcttgatgacataaataaaaaattcattaatttcaaatttaaaatacaaaagttaagttccaaag

SEQ ID NO: 110140 - DNA, 779 bp, Cannabis sativa
gcccaaatactactcaatgaacctataccaaacctttctcgggcctttgctatgatcgttcaagaagaacgtcaacgcacacttggttcatctgaaaatcctcccctagcctcctctgttcgtccatcatccaataaccctccaagaaacaaaaaacctagaccttcttgttctcattgtggcaagcctggtcacttagtcgacaaatgcttcttcctacacggcttcccaccaggttatggagacaagaaacgcaatgacaaaggcaaggctcaggtcaatcaagcctctacaagcaacccaaccgatcacactactgctacccctactactgatctcagttcacaatgccagcaactcatttcattgctcagccagcagcttagtcagtccactccttgggctgatcctgctatgaacaatgcaacatctaaccaagctggtaattttctttccaatcactcttttcattgggttcttgatagtggtgctactcaccatatgtgctctaatttctcttgttttacatctttcaaagactcttcttttccaaaacatgtcattttgcctaatgaacacaaaattggtgtatccaacattgggacagtaagtataaacaaataccttactcttgataatgttctttacataccagattttcatatcaacatattatctgttactgccttggttgatcaaacacattactgccttttcattaacaccaaaaattatgttatacaggatccttctcggagtgtggtgattgggacagctaa

SEQ ID NO: 110141 - DNA, 561 bp, Cannabis sativa
  modified_base (535)..(535): a, c, t, g, unknown or other
aaccctaggatcttactcacacacacagaaattagtagaatgaaaaataaagagagaaatggagagaaaacaccagaaattatttaagagttcaccccacagaaattagggctacatctctgtcaagctcatctcagagatttggcttgagatccactatcaacaatggcgatttataacttttggagcttcctatcacaagatttgatcaggtaaggctcgattgcttctcttttacaatttttctttttttttttcttcccttttcaactactcgatctaactttatttttctctttgtgcatgtacttccttccttttaacctcctcaccaagagagctttactctctgcctagacctttctctctgaatcttggagctgaagtctcgaactagggtttactttctctcactctctactgtactgtatctcttctattttttgtagcttatttatagagtagtgaaggtagttggtcaggctggaagtgttggaatatattttaccaggatatagatttactaccatgtatnttgtttaacatcctaaatatgaatct

SEQ ID NO: 110142 - DNA, 819 bp, Cannabis sativa
ttgcatgattgtattttatgtgcattttagtaatttcaaaatttccttttattttcagaaccctagaaccaactaagcatcaacatcatgaggtcagagcaagtagagcacattgttaagcacattaaagccttaaagaaagttcccaagaccccacccatgcgagaagaaaacaaagtctttgatataattaacaaaatacatgaggggatggataagataatataccattagaattgtttactgaagtcacatgagaagtacatagccctgatgcacgctctcaatatgccacatgtccaacgtagtctaagagcaaactgggaacctctaaagcatgttagggtagatgaggctgaaagataggacctactcatgatcaacctagtggattaatacaaaattaccgaaaccatatatcactgtgatatcattaaagaagaaatatatcatcgacccaataatgttgttaggtctgaattccttcaaaagttactaatttcgtcaaacctggtgtatttaaaactcgactatgtagatttgacagaggatatgttagaggaagggctagacatagaagagtagaatagtcaagttgcattttttttttttttgtaataaggggttttagtatggctccactttagttaggagttttagtgtaactcctttagcttgttgaaattcataaataaataaagaggttttattctatctggtaaagatttatttgaatcttcctatgttaagtcttactgaatagttaaggaataattgttgcagatataagagatatgtctcttagaattaaggcgtcaa

SEQ ID NO: 110143 - DNA, 530 bp, Cannabis sativa
ctttgacgattttgtggcattatctctacggagagaaatgtgagatttatacttacaatatataagagcctcaagtacttctttactcagaaagatttgaatatgaggcagaggtgttggttagagttggttaatgattatgactgtgaaatcctttaccatcctgagaaggctaatgtagtggttgattccctgagcagaaagggtccagggcagataactagtatgattaagatttcatattggttagcaaaagacatggtaagattatgcattgagtttgttgtaggaaaacttcataactttacgctataatctaatctgttaaacaagttaaagctcctcagttagctgatccaaaattagtgaagatccgagaagaggtttgtgttccaagtagtgcggaacttagaaatgagattcttgacgaggctcatacaactcaatactcattgcatcctggcactaccaagatgtatcaagatcttaaaccctacttctggtggtgcgggatgaagaaggatgtggta

SEQ ID NO: 110144 - DNA, 577 bp, Cannabis sativa
  modified_base (50)..(55): a, c, t, g, unknown or other
caaaattattattactttttttataattttatatttaacaaatttaaatnnnnnnatattattaaaataattaaataccaactaaaattgagagcatgattcaagagcaataacaataaaaatagctctctattttaactttctagctattttccctaaaaaaaatagagagtactattggtgatgctctaacatgatgtactattgtcttattcttttgaactttttatagctattgagattgttggaattaagtatttttgtctaatttcgttcgattttactaatgtgatgattgtctttgtattgaatcaagcccattgaactttgatatgtactaaatcatgggtctcgaaccttgatttatcaaatcgtaccctatgaacttttattcatgtcagacttccattagtaaaatcatatggaagttattgaattcaacaatctcaataatttgaaaataatttttaacggctctaaaaagttcagaaaacgaaaaatcttaattaaagggtactaggagggtttagcaccacctaaaaggtattatgactatgagcattgctattaggcatta

SEQ ID NO: 110145 - DNA, 1162 bp, Cannabis sativa
  modified_base (32)..(34): a, c, t, g, unknown or other
  modified_base (262)..(262): a, c, t, g, unknown or other
  modified_base (1112)..(1129): a, c, t, g, unknown or other
atctctttctctccttcgggtttgattaccannntcatactcactatgattgagtacttgctatgtgtgggcatgggagtctatcactcaaggtttcgaatatggaagaacaatgaatgaggtttgaaatcactaaggaaagaactctctcatctaagttggttgaacagtcaagttgacattagttggatgagtgagggcatcgtgttccttttatagtgtttcaaatagggcttagggctgaattatatggattaaaaangaataaaatattggacaaaaataaacactagggccgaccacttaaaggaccaaactctagttacaattttgccactttttcaatcacttattcttctttcaataataccatattttccaattcaatctgttaacgcagatttttgttaaccaaaatttgagcctcacagtgataatttcacaaagaaaaaactgaaagcaataaactaagaggtatgaacacaaatgattttttacgtggtttcgcagttaaaattctgcatagtccacgagccaatcttattagatttttgatagtttttcagggccttttttgtatatttttttcgtcacatttttgatcttacttgccactatttctaatcacatatgtggcagttaattacaaagttgactgtaatattttcacaatgattatcccctgaaatcatggggtttgattgcatatcacgaagtgtaaatgcggttattatttgaaatcatatagctgtgattttctcacttttattgggtcaaaatgatcgtgtgtttaaacacgtctttaattattgcgctctgggatgtctcgaaaggatctttgttccagtgaccgtgatagcgagctggacccttttttcttatccttctgaggtcgacaatgtacgcctttttgcttctttgtttgaaagcttaacgcttcatttgagacactcgtggttcttattaacagacagtttctcgaggctcatttgaatgtcagcttctgactcgtcaagattgtaagtctctctgagaagatgtctgaagttaactgaaagaagttactggaatgagccttcctatagcgagatagtgttggaattattttaccnnnnnnnnnnnnnnnnnncaagtatgttattaacatcctaaacatgaactt

SEQ ID NO: 110146 - DNA, 502 bp, Cannabis sativa
  modified_base (288)..(291): a, c, t, g, unknown or other
catcaatacttcaagaatgtggcagacttcttcggcctctgcccggcccagttcactgctaagggcattaaatatttgtgtgccctcttcatcctctacgcttccaaggagtggggtacgccttctcctcacgaagttgcctggttctttgatctgaagtccacccccaagcaaggcaggtcagggtacttctatttctctcaaccaggcttcaagtggttgacgggcacggacgactcgaccatcaataagattgggcgttttgttgatgagtacttcatggtggannnnacgggcatcactcgcacttggttctagcagattctgacattacaccgtcctcccctcactcttgctcttagggatagagctcaaaggcttgctcgactgccgggggaagactgcaatatttcccagttgacctccgaagataattttgtgaggtatgggctctatcccaaggacttcattcctaagtccgtgatggggaagaagaggaaat

SEQ ID NO: 110147 - DNA, 614 bp, Cannabis sativa
taactatattttaatatattttaattttttttttgaaataggaccgaaataggaccctgagcggaccctgagcggtggggggcctaaggcggccgcctcattcgtcttagctcagggtcggcccaggccgcaacacaaatttaaggattgtaaagtaaatatgggattcagttaccccatatgcagtttttgtttgtacaactaaaattattcaatgaaactctaattttgatattttctcatatttatgtgcaccttaattttgtctgagaaaattatcataagaggaccagaataaacataaggtttatagtttatttgcttaagtaagtatattgttatataataaatatatcgtaatacatggaagataatactcaacatataatgaggacctatcgttgtgattcatatgtttattatgtaatgaggaacgttagattttaagtgaaaaattaattagatactaaccaagtgggagaatgttagaatattttaatattgtaacaaatcaattattttatttaatttgatttataacatataattaattatttactaattaattaaaatattctaattatggtcaaatttaattaccaaatattttagtt

SEQ ID NO: 110148 - DNA, 559 bp, Cannabis sativa
tcatttcaatttcttctgtgccagtgatgctaggctcttcaaggaactggatagggaccaggtttgccttgtcacttatactgctgctcgccaatcaggctaatgcacctgccgttgtatttccttctcttggaatttgtctgaggctgtagcttttgaattgtgcgagcatatcatgtattttgctcagatatgctatcattttttctccccgagcctcgtattcgccggatataagatttaccactagctgtgaatcactgcagatcttaatgtgctcgaccttcgtttccttcgctagttcaagtccaccgattagggcttcgtattcggcctcgttgttagaggctttgaatttgaatttgatcgctttctggtatgctttcagtttttcctgtgcattccactacaaagtcggccaaggcttggcctttgatagctgtttggggttggaagttgattttgtaattacccaattctaccgcccacttgagtaaccctccagagacatctggcttctgcagtatttgtcgtagtggttggtcggtatacacccgaa

SEQ ID NO: 110149 - DNA, 643 bp, Cannabis sativa
ccccggaacctcttgttctaccccgagccaccggatgcagtggatgttttcctcttatggtccatggccgaaccactacctttcctgctaaagcttgatgcagtaagggaaggagccccgccactcactgaagtcctaactgactccgacatacatccaactgcgccctcagttcgcagtgctttctccaccatcttagcataggtggtcttttcgtttgtagtgatcattaggtcatgcttgatcttcacatttaatccatccaaatacttttcctttttactgaagtcggttggcacgattcccgaggctaatcttgccaaccggggaaactgcgtgtgtactcagtcacactcatattttccctctgggtcaggtgcacgaactcttttctcttggcacttctaacggcctcattgtagtatttcgcgttgaacacctcctagaacctttcccaggtcatggttgtaacatcgtgtatctgggacaccatgtctcaccagactaaggcgtcctcttggaactgaaaggtggcacacaccaccctgtcatttcaggcgacacccatacagttcagaattcttgtaatcaccgtcagccactgttcggctttcattacatccggacctcccaggaataccgg

SEQ ID NO: 110150 - DNA, 685 bp, Cannabis sativa
tacgacatcacattccaaccaaggacagcgatcaaatctcaggtattagctgactttattgctgacttttctagtgacatgcaggtataagaggaaaaagaattgttgtgcttgaaagagcaatctgactttaagtggaggttatcagtagatggctcaagcaacaacagaggatgtggcttaggcattgttctcaccttcaccccaaggagatgtcattcaatgagcaatcaagtgtgatttcaaaggaacgaataatgaaattaagtacgaagtgctccttcctgggctcgacctcgccaaagagatgaatatcaaagctcttgagatcacgtcagattcccaactcatagtgtaacgccctaactcttaggcacatcacgacaactgattatgaaaccctcataccctgaactgggaacactagaaaggtaagcccaggaaaatttaaactttgtacaacagtatgaaacctaaacttgtaataacttttaactttacaaacaaacaaaaaatacacgtttcaggatcccatatatattttcacaaaatattacaagttcatttcacaagctgtcctaagtggcaaaaaggacacaacaagtatattatataatacccgattgtgactataccgcgctgacttgtcagaatacacctgaaaaaaggacacaacaagtatact

SEQ ID NO: 110151 - DNA, 621 bp, Cannabis sativa
  modified_base (26)..(67): a, c, t, g, unknown or other
ttattttcattattttagaattcatnnnnnnnnnnnnnnnnnnnnnnnnnnnnnnnnnnnnnnnnnnctggtaaaatatatccaacaagctcgtgtcttagcctggcacccatatgtcacataattgtatcacctaatcaggtgagcctgtgccaaaaacctgcacccatgatcatataattgcatctcctaatcaggtgagcccgtgccacaatctggcaccaatatatcgcattgtctaattagacgagcccgtacctacgcccggtacttatcatatatcactgacgcccgtacttacgcccagtacgttgccaggaaaatcgcatcacataatcaggtgagcccgtacctacactcggtactcgtcatatatcactgacgcccgtacttacgcccagtttgttgctaggaaaatcgcatcatctaatcaagtgagctcgtacctacactcggtactcatcatataccactgacgccagtacttacgcccagcacatcaccaagaaaaattgcatacctaatcaggtgagctcgtacctaggctcggtactcatcatatatcactgacgcccgtacttacgccagtacgtcgccaagaaaattgcatcacctaatcag

SEQ ID NO: 110152 - DNA, 701 bp, Cannabis sativa
  modified_base (41)..(56): a, c, t, g, unknown or other
ataaacctcgttgattagtaacgagctgcacagcatgtttnnnnnnnnnnnnnnnngcctatgttagttagggtgttagagatcacctaaacacaatatataaaggagtctaatgtgctcatttagatgagaaattttctatcaaaaaagtacattgttagaaaaccctaaggcttgataatactcaaagctattactatgagagttctcttagtgcttagagatagggaaaataagcttttagacaaaggtgtaataccttgttcaagtcatagtgatccccactaatctacactcaagattgtagtaagtgtatacatattcttctcttgttatatgtattatattacatgtgttgtattctttttcttctacctttcatttatatataatatatatagtgtacataagtgtattataacatctatttaatcaatctcttttattgttcttgtattatttttatgattgagttgtatatatcttgatttatctttccattgtaataaaatctctctaacataatatagtatatatataatacagatgacatatattaaagatatatagtatatataaagagtgtatatattctgtacatatataatatataatactatatagtagagatataatatatataatagtatgtatgtatatataagagtatttagaggagaaaaagagaataatataaaact

SEQ ID NO: 110153 - DNA, 545 bp, Cannabis sativa
aaaatttaagtgtattataagcaacaaatattcatagcttagttggttgaggtggatgacataatgttcaaggttatgggttctaatcccataacgctcttcttttgattttttttatatatatttttgagggccccaaaatttaatttgtcttgtgcccatatattttcagggtcggccctgcacctaataggaatgctcattaaatccctgactaattcatttcatacttgaaaaggtacattaattgtgttttaatttagcgaaatgttatattgtgtgctaaatttaacctaattttgaatatgtgccaaatttggataagttttagcacacaattggagaataattttttacaaaaaatatcaaaatataacattataccacttatttgacactctatatattaaaaatactttaaattgtcatatcattattgaagtaattaattattacttccacataatttaatttaatagttagtatataatattattaactatacaatgcttcacctaagtagtgttatgcacctaatcagggcc

SEQ ID NO: 110154 - DNA, 597 bp, Cannabis sativa
tattccatagtttcttatcgatgttgtaatatccgctaactcagaaagggtatttttgtaatttttttagctgagagtatttttattattttacatatttttgagtttaaatatttatgaggtttttgtgatgatataatatttgaattttattggcatgtgcataatgcctaataaatatatatatctggatattattaaatgaatatgtgatttggtttgattttggtacatatttttattagtgggaataataataataatgatatatgttaacttataatagtataataatatttttgattattatatttagtataataatattggtaaatattattatagtgttaaagggtatatttaacacacttattattattattattattagtatcgttgttgttgttgttctgttaatgtacttttgcacatatacgatatgatgtataaccgtataacaaccgagatttttgtagaatgagaatagttccacttcggttcaaagcgatttttttgcttgggtttaaacacgataaaaattaggtttttgagttgagatttcgtacgccaaaacagagaacgagagagagagagaga

SEQ ID NO: 110155 - DNA, 548 bp, Cannabis sativa
cagaccataggatctggacccaaacggaataaaatggacctgaacccagagagggatgtatctcagctgagagggaaggatggtgtcaaagccgtcagggatatcaaatatcatgagggatcgatcaaagttccatggctggccttccatgacccttctacgatcaccctcacagccaaactggaccaggaaaaggcctgaatggtattcagagaacgtgaaagggcatcgggcaacccaggcttcgttcatagctttctgaatccaatcgattttcaaggttttgggagacaagatcttaacaaccaaacaataggagtgggactgaggttctggatgtagggaaacatggtcgaaatcatggacaagagcttcttcaggggttaagtgggtggattgggaagtaggtaagtttgccatgggtaggtacagaaacgagaaagataaaagaacaaaagtagaaaaaagtacaggtgaaggatatattagaatatttctaattaaggaaataaaataatattattgattctgataaatgaatattttat

SEQ ID NO: 110156 - DNA, 513 bp, Cannabis sativa
gtgacatactcgtgtataagagtcttaaattcgtaagggaaggcccaatggaggcttgaaacgaggatattacaaatggtatcagatccttgacccagctagaagtgtggtcgatgaggacgtcgaacccctaagagggtgattgtgacagtcagtagtctcgtgatccttaaggagacacactgggtaagttgtgcaatcccacactgcttggggaaggtcaagtgtgatgattctgagactattgtaggtatgagactacacagttgaagaatgcttaaatggattgaacctatatcaacaagatgcattttcttttctagtaacccatcacgaaagaactccacaattaagtttgacctagggtaatttcaagatgggtgacctcttgggaaattttcccaagaagtgggcgagtgaggacaaaacacacttgaaagactcgtgttggtctgtagggccagtcgtcgatccaggaagcggctagattgatgtactcgtgtataagagcct

SEQ ID NO: 110157 - DNA, 1932 bp, Cannabis sativa
  modified_base (241)..(242): a, c, t, g, unknown or other
  modified_base (1017)..(1021): a, c, t, g, unknown or other
aattgggaagggccatatgaaattgaggatgagatcggctccgggacctatgagctaaaaagattggacggaatcattgtgccaagggcctggaacgctgatcatctccggaagtattaccaatagtccaaatgtaaacttaggctttgttaagagaatttgtaccgtaaagtatatgcaacctctaaattttgaataaagcttagtgccttaaaaacaatgttttcatgccactcagggnngtactaaggcataccacacggacaaatgtaaaacaggccaaaagtaaagacaaaatcaaccagaatatatatctaagcgaaaatatatatttaaatgtaaaagatatcctgacccaaaagcaggtcctaaaaaatattaagggcctggggacgggccataataactgtctccccttagaagataataatttaaattgtctgaaaggaaagaaaagagactataaatgcaaagaaaagaaaaaataataatagttgtgaactggttgaattggtcggcctaatcaatatggggaggaagacgagggccccgacgttctttgagtaaagcgtcaagccttttcttcttctcccggaacttagcgaggactttctcaggtttgggataaaaatcaagcttgatgctctagccattcgactgccaggccatgtagacgccatcatcaaagcgcttgacgtaatgcttacagacaactggggtcaggagctcatctcttttggcctttttcaaggcctggtcgttaaaatcccttagctccttcacctccacagtcagattggccgtcgactgcaagtccacctgatgcaactcctccaaggactttaacttagcagacatttcgtccatagcctccctggcttcccgaagctcgcgcttggccctggctgtagcctcaccctccgccttcagctcctctcggtgcttcgcctccgcaagggcctccctttgctgggcctccttctggaacgccctcctttcagcagacaagtcccgcannnnnctcacggcctcgtctatgcccccatattcggacatgacgaacccatgatcagtaagggtcttggagaggcgaccggtctctacggtaatctgaaaaaaagaaacaagaatgaaatcagatgccttagacaaagtataagagaagggaataaattacaagtactcatagcgggcagagcagcactgatgtcttgaacctggtaaacggagttgacggaggcacaagccgtgtatctcttggctgggaattgagtcaaatgggagacaaactggcaggtcatctccgaggcgaagggagcgagagtaggcccaacgaagctgttgaaccaatccgttaggggatccatgtttgggtcccaaggattcctgaaggcgtcctcgcgcaaggtgttctgctgctcctccaggaggatcttcttcaaggcctccacctcagcatgtccccggctgaactcgtccaaggcgtagttatgtttggcaacgcggagcatttgcctttcctcatccgcaaggaccggggtcagcacgatgtcgtgcggcatagtatactcctccgcttcagaagaaatcccagagtcagtgctaacaggtggagtgtcccccctccgggtccgcttggaaggctcgatctcaaccattttgcccttccgcttgcgctcaagggcggccgcaatctcgccctcatcctcctcgacttccccctcctcgtctatcaagacgatcgtgcctgaaggggcactggacgagaacatcccgggggttaccaattgggatggggccagaggcagagaagcatcagggctatagacctcgacaagggtagccagaagatctagcttcttcaaagctaatgggttctgaactatcaacctcttctgcaatcataagtgcatatgcaatgaattcagcata

SEQ ID NO: 110158 - DNA, 978 bp, Cannabis sativa
ctaggcttgttgccaaaggatatagccaacaagaagggatagattactttgaaacctttgcacctgttgcaaagcttgtcacagtaaagctaatcttggccattgctgctattaaaggttggtttctacattaacttgatgtgaacaatgcttttctccatggagatttgcatgaggatgtctatatgactctacctccagggtatagtcataagggggagacaccattgccaccaaatgtagtgtgcaaacttaagaaatcactgtatggattgaaacaagcatccaggcagtggtttgaaaagttttctgctgcattgctagaagaagggttctcacactctgcaaccgatcattccatgtttatgagacactcttcctctagcatcattatacgattggtttatgttgatgatgttattattgcaagcaataacatcactgacttaaacactttaaaaaccaggttacataacaggtttaaacttaaggatcttggagatctaaaatactttcttggcttggaagtggcaaggtctaacaagggaattttcatttctcaaagagcttatgctctacaattgcttgaagaccttggctatcttggaaggaaacctgttgagacacctatggaaccaaacctgaagctgtcacagtttggggaagataagtttgctgataaactagccgattgcactttgtacagaaaaataattgggaagctgcagtatcttgtaatcactagacctgacttggcttactcggttaacaagctaagtcagttcctatctttgcctaaagccaagcatttgcaggctgcccaaaggatattacagtatgtaaaatccactcctggacagggaatcttcttctctgctgcatcagaaattaaattgagggcatacactgatgcaaattgggctgcctgtgtttatactagaagatctacaagtagtttttgcatttttcttggaagct

SEQ ID NO: 110159 - DNA, 597 bp, Cannabis sativa
cacacttccagctaggttaaggctttgatactatttgtaacctcctcgcttcaagccttcattgggccttcccccacggactcatgggttttatacatgggtacgccactctgactgcgtcaagaactgacgactggccctatagaccaacacaaatttgtcctcactcacatgcttcctgggaaaactttccaggtggtcactcatcctaaaattaccccaagtcaagcacgtttaactgtggagttctttcaagatgggctaccaaaaacaagatgcaccttgttgagataggtagaattaatcaattcatttaagccatcttcaactgtgtagtctcatacctacacaacttcaaaatcatcacacgcgaccttcccaagatgatgtgggattgcacaacttacttggtatttaacttacggattatgagactactgactgtcacacaaacgacaataaaagtatttgaatatgagattacgataagtaaataaacgacacaataattttataatggttggactccaattatatagtaataacctattcctttttcttaatatttcttactggaatatcaagatcacaagaatc

SEQ ID NO: 110160 - DNA, 737 bp, Cannabis sativa
aaactacaatacaactataaaaaaactgaaaaataaactgacaaacataaacaactcttcgaacataaactacaaagatctaaaatcaaattgttacctaaaaatgaacaacaaacaactatacctactaatattcccaaaagacaacatacataaacggattaaactatttaaaaactataaaaaaaaaactaaaacaaactgagaagagacattaaaatgaaactgaagtttaaaaatatttaaaaaaatttggaaaacacaaacagaacaaaaaagacaacaaaatgaaacaaaagtaagaataaacaaactaaaatgcaaaacccacaaaagaacaaataaaattgaccaacaaaaattaaagccccaaaaatccaaacaaaaccaaacgaaattttaaaatggaaaacctagaatatcacaaatcagaaacacaaaatcgataaatgaaaaatacaagaataactataaaaaagggggaaacgaaaaagaaactgcaaataaacctcagttcgaataacaccaccaacattatcatttttctagcaacatcttcagtcatttgctcttggacaccgacctttgatttcttcttaggaggagctcgcccacgctttattaatggaggggcaaaatcagagtcttcctcctcaataataggtcgttttcccttggctttattagctaatgatttcaaacccattttggagctttttttttaacaggggaaggag

SEQ ID NO: 110161 - DNA, 595 bp, Cannabis sativa
tttcaacctcgaacaacagtcaaaggacaggccttggcagactttgtagttgagtgcataggcaaagaagaaagtagttcaaaggataactcggagcaagtacaagagtcccagctgaacaataatgaagacagacctacctagaaattacacgtggacgggttagctacagatcaactgtctggtgcagggattgcccttgtctcacctgggggccaacacctgcatggggcaatcaaatttggattcaaagcatccaacaatgaagcagagtacgaagccctcattgctagcttgaaacttgctcaggagctgcacgctgaacacatcgagatctgtagtgactcaaagttggtagtgaatcatgtgtcaggagagtacgagtcccgggggagaaaattatagcctatttaaccaaaatataggatctgctcgcataatttaagagttacgctctcaggcgaattccaagagaagaaacataattgttgatgccttagcccgacttataagtagcaatataactgataaggttaatttagtcctaattcaattccttgaagaacctagcatcacttgtgcagaaaaaattgag

SEQ ID NO: 110162 - DNA, 507 bp, Cannabis sativa
tatatatatatatgaaccactttttcccaattcacaatgcatgtcaaagatcgaataccatttttatgtactcttagatttttctcatacgtccgttgagatgttatttgtgctaacaacttacaatatcacattatgtctgagaagcctttcatttctcattatgttttttcatcaagaaggaaacaactctaactttatatgtaaatattcagtcattatataagtgaagttatatgccattattggcatataaccatcttgatgtgtaagaacaatttagctatatgaaaatgcaaggataaataaggtaaatgacattctatgataacatttcatcttagtctaccattaaatgacattctatgattttttactcaagcagaaggctttcacatcattcacaagtttgtctctatttaagttgtaatttgaatatgtcaaccaacaagctgtgaaacatttttcttcattggaatcaaactggaaaatagaaacataaaagaa

SEQ ID NO: 110163 - DNA, 752 bp, Cannabis sativa
catcgtgtcacgaactggaatgcctaggagcgtagctatttcttgcttaatcgcttgggttgtgtttggggagaagtataaggtcgatttagtgaaattaaccatttgtccagatgcttggctgtaatgacggaggatgctttgaatggtattcgcagcttgaacagaagctgagctaaaaaggaggctatcatcggcgaagaaaagatgggagattgttggagcatgccgtgcaattttaataccaagagaatgactccggggttgccgttgctgggttgtataattgataagtgaagaaagaccctcggagtacagtagaaataagtatggcgagagggggtccccctgacgaatgcctctggtaggcgtgactgttcccatgacttgttggttaagggagaaggaaaaggtagcagtggaaacacaagccataatgagatcgataaaacgctgtggaaagaaaaagtgttccatgattttgcgaataaagacccattcaacccggtcaaaggctttggccatatcaagttttaaggccatccaacccagtttacccgatttacgatgattgagagagtgcatgatctcctgaccgatgataatgttgtcagatattaaacgggaggagagaaaagcactttgtgagggagagatgatacggctgaggattggcttgaggcgattaactaagacccttgaaatgattttgtagaaagtggagcaaagactgatgggtcgatagtcagtga

SEQ ID NO: 110164 - DNA, 1141 bp, Cannabis sativa
gtggtggtgttataatggtgatgactgtggtggtggtggttgggtggtggcaatggtgatggtggtagtggtgttcatttgttgcatgtgatgattggaagcatgaagaaattttcaccgatgaagtagttggtattgatccagaggaagagaggaagcaatgagagaaagagactaaaattaggtttttttttaaatttatttaattaattagttatttaaaaaaaaattgaaatattttttctttttttaactttaatttgttctagtcataaaaaacttttttttttttaattttaaaacaatttttgatataatttatattaaatatactaatataaatgtgtcgcgtgtgcaagagtatacacacaagaaattatgttagttgttaaatgtggtaaatggatggtgtaacaaccattattttcatgtgtggcaaattatgttctagagttgtgtttggagttcgtggcattatgtttggtgtttatactattagtgatagtctacgtcaataaagatattttgggtgtttaattattcagctagttatagctgtctgtttcgggttttattatttagttaggtataaatatcatctcttgtcattattttgactaaccctcttagatcggagattaagatcacgttttaccttttctctttgttgttctttgattcttgcaggttggtgcttgaacctacgtgaatggtgattcagagttttgttgcaagacttgaagtcaagtagtttgagttgaagggagttcagctgcatcttggcaagcaaatctgaaggtgtttaaatctagagatttgttgaagggatttctacaaacaagaagcaatgggatcttactaatcttaccaagggatttcgtagttgagttatttcattactataagggaatttgtgaattgtataaaaattggattttgtatatacaaattatatagtggatgttattgctttccctggttaagggaacccaaacactactcgactggaatgtgtttctagtacagagaaagcttataaatttctggtgttgaatttttgatttggtttttaattatattcaagcatagatcaagataaaagcaatccaaatatgaaaaagataggttagacaagaacttg

SEQ ID NO: 110165 - DNA, 514 bp, Cannabis sativa
aatttgttatttaaagaagccttcgcagcaataggcctcacggaccgagatctatcacgaagcggttcccagcccacgggattcaatggaaccacgcttatcccgatgggaaaagtgaggtttccagtcaccttgtgcccgaatacaacccaaagtactttcaagtactgcacatttgtggtggtagactgcccaactgcatacaacgcaatcctcgcccgaccggccctagtggattttggtgtaattacgtctatccggcacttatgtttaaaattcctcacctaggacgctggagtggggacggtgaggggcaatcacggtgaggccaggcaatgttataatgtcgcggcccacttaccagggttgatggtccgtgaaggtatcgagccggaatcggcagaggaagatgagttggatccccgtgtgggattcgaaaaaattttagagcctatggaagacgtcgaggaagtgccagtgtgcgacctcgaccccaccaagatccttcggctag

SEQ ID NO: 110166 - DNA, 573 bp, Cannabis sativa
  modified_base (489)..(492): a, c, t, g, unknown or other
acaaggtcagaagaatatccttcaatggaaggaggacccgaacgaagacgagggtgatcttcgtgcagaagttgaagcaaatcctggtcgatctgatgtccgagttcccaagactcacctcagttcatctacaaaagacaacacacgagatgtgtgttattcggaatatatcaaacgataaacaagcaaatatgccgaccaggaagtactcatcagattaaagaacaggtatgtctaaagaaaagtcagaactcaagaagtcaaaaaaatttcttgagttagggcaaaaatgttcatgaagctcagaataagcaagatgaaaggagaacgcaatgcagttcagagacaggttctatgtctgtaaacccacatgaagacgtgataaagtaaaatcgcagaagtttctagccctagggtttcctaagcatttttctacagaactgttaaagttgcattcgatatgtaaaccagcagttgtatgaaggcacnnnngcaactttgaagccagaaaactttcttttcgctctggagcttacttagcaaagaagcgtgatgaaatgagtttatgtgcca

SEQ ID NO: 110167 - DNA, 705 bp, Cannabis sativa
tgcagaagacaatcttcaaagtccagttcatccatccacagtttatcgaaaaagaaccagttgttgtgattttgggaggctggcaagtgatggaggttcaagattaatggacgatgatcagatccgaaatagtcttcatgaagaagatgatgttttggaaacaaagaatcccattcagcattagaaatcgcccagtcaatgtgttcttgggtatgggattgctggcctggtttatttgtccaggtgaaggggtgaccagtatattttatatcatggagagtgaaagaatcaagaaaattgcaaaattgggtagaaggggcacgagaagtgtcccccccaattttgtcatgtgaatttaaataatcattaaagtcacccacgatcaaccaaggggagttatggatagtggatacaattctgtggagaactctccaggaatgagttttattatgatgattcggtgccccatagaaaccagtgaaataaaaagcagaaaattggttaggcttaaggtagcaatgaaaatgacttatattatatgtcaaaagagttacatcaacatcatgagtccataacaacaaaaggcccacccataaaagaaccaacactctaggaacttctaaaccattagggagactaagttgtaatttaaacctacttaaagcaccaacagggagtttggactccataataaacaaaagtgtg

SEQ ID NO: 110168 - DNA, 2526 bp, Cannabis sativa
tgcggaatccaaggatcccgccaaacatccgtagactctccattagctaccaacttacaggcccctttcctcaaagtagaattagcctttatgacactcttccaaaaccaagaatgatagagagtctaaaaaagaacacaaaaatttaatatattgacaggacttaaatctctcattgtcacactcaccaatccattactctctttcactcttaaaaaagaacacaaaaatttaatatattttaataagaatgatagagagaagacacactaatcagattttttaatccctgctttgctttactgttgttgtttgaaacacaatatgagcgcgtgtatcaacgcgccacaataagaatacaaaatactttgtatagatagatagatagaataatgcttgtgttttttttttaatataaatatttatatatgtgaggttagtaaaagggcccaaagggtggtctgttctggtctggtctttggtctggtcctatctactttctctgagccttctttgccttttgcctagttggcacccttcttcccattttcccatttcttcttcttcttcttcttctattccattgcttcattctcttctcttctctccaatctccatagctattatacaatacactaagagggccacataccattaccatacataaacaacccataagccattagccattagccattagccactttcctttcaattattatattatatatatttatataaaaacagaagcaaaggtccttcctttttcaatttccttgcctgcccatcttctttttcttctcattctgcaacaacattccattctcttcccttacttttatttcttttatttacttgtacctgttgttgtcttgtagctgtacaacatttacattaaaaaaaagacctcatttttatcacattccatgcttcaagatctctcttttattctattgttattatgtattatatctctccttcttttaccgatttcatgcctttaccttcacctcattgtgtctccaagcctctcagaaccattttctgaacaatgccactctcaggtgattcaaaatccttctccatttcctcattctagcttctgggttttgtctaaggtgcccacttctcaagatgaagccaggtaattgttttgtttagcttacttatatgagatttcattaatggatggcttaaagatttcccatgttgtggatccattgtactatccttttttagtaccaatttcccttctttttcttgaaacactttctttttttcctttttgttatttcgagattgatttggtgagaaattagaaagagaaaaataaaaataaagaaaagaaaagaaaacattttgttttaccattatgtgtctttacattacttgtttgttttttagagttagttgttgttttagcctttctagggtcaatgaagaaaaatacagtaaaaacttgagctattatcttccttttaaatatgtttttactttttaaagaaaagaaaataaaaagaatcttctttttgtttagttgggttagtcagattgaattgcattttcaggtagctgagttcattatcagttacaatcacagacagcccaagtactgaaattttgtgcttgtgcttgttcttagatgcattttgttgtttagcttcacatacaaatgacttgaacttgattcatctcatcaggttctcaacatgctgatttggattcttcccctggccatagtatgagtggcagttataggaacttcatgtctggtttgtattcattttcaatcttaaacaatccttatttgtctagagctgttttcatagtctgttgcttctaataatttgagacagaacacaatgtttttcttagagtaataattttctggattcttagtaatggcaaacaattgtttacattatgcatctttgttatcaatttcttagaaatgaatctcatgatcaaactttattttcttaggcatcccacacaatgatttggacatgtctccagagccaagcttggatggaagtttcagaaagtcaaatagtggtttgtaatttattgtgctcttctttataattttgctttgctttcttttctgctaattcaaaataagcattacaaaaagacaaatttagactgctctcatagcatttgtgccaagaaacaaacttcactatgtcattttaagcatctcaacatgtgtgactttttcatatgtttttttttttctaatgatgcagttatctcagcacacagtctatcaggggcttcggtttcaagcaagtttgggccttcttctagacgatttttaaaggggctaaaagattatggaaagaaactcgttgactttgagttgttcacacagaatcttgaggagtgggtttttgataatttatatacagattcaaacaatgcagaaccttttttcagctctccctttatgattgatgaattgcgcaagcttgatgttgcgctagagggggttttgtttcaacaactcttccgaatgccatgctc

SEQ ID NO: 110169 - DNA, 989 bp, Cannabis sativa
agtgttttggaattttgaaggtcttagaaaaaataatgtaagggtttttgggagtttgagaatccttggagtaagatcaacaaaggaggagaagaaaaattttctcattgaaagaggaattgtcgccgaaaaaaattactaccttggaagatgaagaacacttcaaggcttgatttcaaggctttttctaatgcttgggtgtggagaacaaagtaggaggaatgggaaattcgattgaaagctatcttgtttatttatgagttcactctcttcatcctagagcaattgggaggcttttaaatttaaagctttaaaggaagagataagaatatgaattcaagtttaaaaggtaacatcaattcctaatgttactaagattaataaaaaattagagatttaaaaaaaaaggataaatgataagcaaaagatcaaaagtcttttctcttcttcttttctcctctaattttagaatgacatcatacctaggattaggattcaaatccaattaattctaattccatagcaaatataagaaaatttcaaatttttaaagaaaaagataaaagataattttttcttttgtttctttgttaactaattttcgaaaattccaaaggactaagcaagggaatcgaaagtcctaattgtattgagaatacttgaagaacaaaaataattgcctaagattgttaaattaatatccatatggtagtttcaagtgaaatgggctcaattcacatcatcaagtcaactccacacaagtgtaaggttgacttgggggaaaatgttaacctagaaaattactctagtgacgttgacatcaatgtttgatacagggcaataaggatgatgtcacgaagttgagtagacctgagtcatagctatcgatcttggaggagaccctagccttgcgcccaagttaacttcaggagctttgggatggaagtttggacttcaataacttgaatccaactcactatcttttagta

SEQ ID NO: 110170 - DNA, 610 bp, Cannabis sativa
tttttataatttttatacaaaaaataaattaatatggtaaaaaaattcatcatacaattttttatcttaaaaagaaagcaacaaaaagatattttcaaaagttataataaaataaaattaatagagtttggaaaattctcacacaaaatagagatctaaaaaaaccaattgataaatctatagaaaattcatcatatgattttaaaactgttgtcattcaaagccgatgtcatcatcgtatctcacttgtagttgtcactgcattcaaaatcgctatcattatcgtatcttatttgtagttatcactattgatcaaaataagtttgttctatacataaaataaatcatatacttgagttaattaactactaactttttttatacataagtaaatgattttgttataaattccttacttgcctcatcatataatttgtgacctaaaaaagaaagaaaaagactattatcaaaaaaatataaggtaataaaagactaaaccaaaaccaaaacctaaatagagattaaaaaaaaaaaaagattaaaaattgaacaatcctcatcaagaataaaaatttttaaaaaaaaaattgacaaatctgtgaaaaaaaaa

SEQ ID NO: 110171 - DNA, 724 bp, Cannabis sativa
atatacaccatggaaaaatacatacattaagcttcactaaattcagaactcaacaaagaaaaaatcaagatgttacaccaatatgcaagcctccaaagtgccaacaagaatcacttcaagatcacctccaatttcaagtaattttctcaaatcaaaaacttcaaggagatgagtaaaagagagggggagggggttcgaccaagtggaaggaaaaccagaaatgaatttctttctatttttgccaaaaaaaaaatctcattttgtttaaagtaaaacaaaaggtcaaaaataccaaaatggccctatggccattatatcacataagcataacttaagggaaaatatgtcattctatcacattccacacttaaataatttttcaaattattccatcattaataaaattccaaaataaaaccataaaaatgtatttcggccccgaacccagttcggcctgaaatgccggattgtgagtataccacgccgacttgccagaaaatatctatggaaggacaaagcaagtatactatataataatataattcatgagcacgctataacattaaaattgtagttttactcttctcgggtcaaaattacgaaaatacccctggctcaccaacggggtcttaacatgtgatttatcagtataattgacacatattaaattatataataatatattttcacaataatacacatttaactagttagggttcgctaa

SEQ ID NO: 110172 - DNA, 566 bp, Cannabis sativa
gagtaataaggctttgtcgttagacagggtggtgaatgctgcaattacttaccttgattcttagaagaatgctcagctggaaaattgagttggtttgccagtttttggtccgaatacaactgggtgtgagcaatgggctaaaccttgttttggtgagataaaggttaattgtgatgttgctgtctttgaggatgataatagtcttggtttgggttggattgctcgggatcataatggtttattcattgatgccatagcggttaaaacttatggtcaacccgaccagttcatggctgaagctatggcattgaaggaggcgctcagttgggtgaaggggaggtgggtagaggggggcgtgcctgctggtgtggttatggagtcagactcgctgctgctggtgcaagccgttcaacagaagaagtggttgttgtctccggtggggcttttaatcacgaactgtgttgctctaatacagtcctctcatttgtttcatatttcaattaattttgttaaacggtccgagaaccaggcggctaactttttagttcgttcttttggttctatta

SEQ ID NO: 110173 - DNA, 518 bp, Cannabis sativa
atttctcggctctcttttctctgccaccatgagccacactctacgtccctctcctccactctctctcgctatgtccctctccttcgctctcttgtgacaacacaaaggtaaacccaacattttcttattcattgttttaatttctattagccatgatttggtttgttgatcgagatctgtgtgtgttcaaaataagtttcgaagcttgcaaatcgaagaaagtttcgaggatcatcaagtgaaaagcaatctgaaacttctaaaagaaaactttgaggatgaagacgagcacaacgacaatacagaaggatgaagcttgtaaaggttttagagctagcggctgcacgagaaggggtttcgaggaggatgaagatgataattttttggggggcaatccactatagcaatggtttaaaaccgtcggctatactataggcaacagtttcaaaccgtcggctctagtataaccgatggttttaaaccatggcctatagtatcgactatagccgatggtttta

SEQ ID NO: 110174 - DNA, 576 bp, Cannabis sativa
  modified_base (175)..(176): a, c, t, g, unknown or other
actttgagaccttctggactggaaggtccacaacaggccattccttagaaatgtccgagctaccccttctagaacacttggctttgcctttttcttcttctttttcttctccttcacaggcctcagcacaaagtcctatgggaagagcttgtacttaacataattggcctcagtnnccagccgagtgatgtttcaagcatcttctggtagttcgagaattttctgtgccctctccctgagtcccaatgtgaaaggagggcggtagtacgagggaatctactggaaccgagtgtggacggtatccatgccctgaacgaaatagtactagtccacaaaatgtcctattttgctaacatcagtgccacagtacccctcagccatttctcatccaattgagagaagtagaagtaccccgacctgctctgcatgggagttgacttcaggtcacaaagatagttggtgtcgtgcggggacgcctcaccccatccttccttgcgaggcgtaaaggatgaacagggtggataaatatttgatgccctttggagtgaattgggttgggcagaggtgatagtagtc

SEQ ID NO: 110175 - DNA, 654 bp, Cannabis sativa
  modified_base (362)..(374): a, c, t, g, unknown or other
  modified_base (400)..(402): a, c, t, g, unknown or other
tttatttttgtttcaaatataactttcttatgatgatataattattgtggtgcaaattctcaaataaagaattaaaaaaaattggtttcatatatattaagagttggttaagggttgcttcataaaaattttatgatgttattgtatattcttttttattattttgtttctatagtttcgaaactagttttcacacttatattttattttttagatcattgttatacattgtgtgttgttttgattatatttgtgagtttattttaatcatttttatttttgtgtttttttttctttcatttagttgactagtgcaaatagtttcagttctatattgtttattagagtaatttgcggcatannnnnnnnnnnnnaactctcagttgcaaataaatacctnnntttaatttttggcggtaataatacctaagttatatttttggaactctttaggtacctaaccgttaaaatattatctcattatccacgtgtcattttcttattggtatattttaattattttttttaaaaaaagtaaaaatttaatgacttggaccaattaaaaattgccacatgccaatttacttaattattttcatcatcaaagtaagtaaaggaaacatatatataaatctcatacgtaaagctcaaaac

SEQ ID NO: 110176 - DNA, 702 bp, Cannabis sativa
tttaatcaagaacatctggtcaattgcaacaaaaaaagataatttgtgggtcaaatgggtccatagtgtctacatcaaaaatgaagactggtggggatacaaagcccctctccaaagcagctggtattggaggaagttagttgaactcaagaatgagctcaaaaaccgaattgatcctgctatctttatcaataataaatatatgattgctgtaggttacaaaatgtacaatcaggctgaaaatcattaccattggagcaaacatgcttggaatagactcaatattcccaagcattgttttgtggtgtggattgctttgctgaatagacttaaaacaaaggataggttgctcaaataccatattgaatcagatgatagatgtttgttctgtcatgggaattctaaaactgttgagcacttgttctttgactgttctttttcacaggaatgcatacatcttttagagcagtggtttggttggaagatggccctcactccattacaggagctgcttcggaaattagacagagttaagggatacaaatttcgaaagagagtgattatggctggtatagcagtattggtgtataatatttggctaaccagaaatgatgtattgtggaatgagggggctgctagtgtctaaaatatttttcagcaaacaaagtggcaagttaggaatagaatttcttttgttatgcc

SEQ ID NO: 110177 - DNA, 614 bp, Cannabis sativa
gatatgataataggataaaatattggtaatagtttatttttgaaaaataattacaacatcactaagtaaatttaaattaaaaattgataatttatacaacttggtaattttaaaatcttacaaatttacttattactaaataataattagaaactttataaagttaaaatattggtaaattaaaaacttattaattaatttgaaaactttcatttattttagttataatgttacataaattgttaatttaaagaaattaaataattgatcatttatcactaataataacattaatataaatacataggtggtatataatatactataaaataacattgaatgaatactaaaattaattaaagtacataggtggtacataaaatagcataagacatggataagatatcataagacattttaatatggcataaaacattataaaatatcataagatattttaatatagtataaaacattataagatatcataaattaatatagcataaaatgaaatctgtatcctgaattcatttctttggttataaaccaaagataggatagaataattttgtttgtattatcacatagtaataatttatttcacacacacattt

SEQ ID NO: 110178 - DNA, 987 bp, Cannabis sativa
  modified_base (82)..(91): a, c, t, g, unknown or other
agctgaaagagagatctagaacttttatattcacaatattttttctaaaagtgaacacatcatagttaaaaattggcttgannnnnnnnnnttgattttcgatcacaaacaaagcgtgttgagcatccaaaacttagaatctttcacactattataccttagaactccaaattccatgataaattcatcatattcatcttatttaacatgtttcttcttatttttaatttatatgatgaattttactatttaaacctgaaacaagcagaaaacaagcataattttgcacaaaatgaatataatcagctgaaacacacatctaaaacacttcataaaatgtacctaaaactgacctaaatctgataatgaagcataaatcttggacattattaaatgattgtacctataccaagtgacataagtaaaatcgatgatggttcgatttgtaggggaaaattttgctcggtataaaaccatcaaaaaccttctaagccatgggaaaaaaccacattgagaagtagattgcgctagatgagaaaattgaagttattgagtttgatggtgaatatggttgatttacagaaggaagatttggaacattttgagaggagctatttagagtgtagggagataaagaggaagaaatcaaaaagtgggagaaggaggtagtagtaggagctgcgacgccggagctggaaaagaaggtcgctgacatggtggatgattcgatcggatcgatagacaaagaagagagtgacccaatgaaagacaaggcgaggctcttgcctatgctcattttttttttttaatttcttttcttaatgtatacaaaaaattaaagtaaaaataaattacctaaaagaaaataggtgtccgtcccttctaaataaatatatatagttacatttgtatattgaatactacaaatataagaattcgtgacggtcctaaaaacgatttttttcggggaccgtcgctaaaaaaatt

SEQ ID NO: 110179 - DNA, 1016 bp, Cannabis sativa
accgaatcaacagaacaaatgcatcacttccagctaggggtgcacaaaatatggaccaaaccattcaacccagccaacccaacccattttttgtagtaaagagttatgttaagagtaggccatgactcattgggttgaaaagtgatagaccatataattatgggttggttatgggttagacacattttaactctatataacccaaaccaacccatttcttaaaagatgttccaaatttgagacaacttacatacataaaatatattttatattcacaaaatatatacaattatatattttatatttttatacataaataaattatattgtgataaccttagaacatcaattgaccaaaacacatcactaacatgtagtctatagtttccctactacttctaccaacaagcctaatgtgagaatcaatcactattattaactttcctactcacacaatgcactactatcttagttttttttttttttttttaaagcactatattacacacacacacatatatatgtatcgtttttttttttttttttttttgtgtgtatgcactaggttgaataattttatcctatttataacataaaaattaaagtttaaatattcatctcaacccaatgaacccaacccaacccacctatattattgtactaagtaaggttgggttatacaataaaaaaaattgaatggtttatagcttatccaaaccgcaatcattgggttggcctattaaaatacctctaacccagccaacctaggccatgtgcacccctaattgctagcgtaaaaaaattcatcataattggtattgtcgccagcaaaatcactagaaaatttgctaagaaagtggtttctttatcaaggaactagtttcgttgcacaacaataataaaaattatgaaaacaaaacaaaaataatatacactaagaataattaaaaccagtttcatcaatcaaccaaatagagaaaaaaaaaaacacaaaaaaatactcataaatataaaca

SEQ ID NO: 110180 - DNA, 910 bp, Cannabis sativa
  modified_base (177)..(185): a, c, t, g, unknown or other
atcttctctggattggcttcaattcctcgggcattgacgatgaagcccaaaaaatttcccgagctgactctgaaggaacactttgagagatttagtttcatattgtactttctgaggactttgaagcattcgtccaggtcgtctatgtgccccccaaccttcctggatttgacgagnnnnnnnnncacgtacacttccatatttcgtcccatcttgtcattaaacattttgtttaccaatctttggtatgtccctctagcattttttagaccaaacgacattacttgtagcaatatagaccaacatctgttcagaaacttgtatattcttggtctggtagatgcattttgatttgattgtagcctgaataagcgtccatgaagcttaagatttcatgccctgttgttgcatctacgagctgatcgatccttggaagtggaaaacagtctttggggtatgctttgttgaggtctgtaaaatcaatacagactcgccatttcttgtttggcttgggcaccaatacaggatttgtgacccaagatgggtagaaagcttcaattataaaatttttgttgcgcaaattttctacttcttccttcagggctaatgctcattctttgtccaacagtcttcgattttgttggactggccgaaagttgggatcaatattcagaacgtgcaaaatgatacaaggatcaattccaaccatattcgcatgtgaccagtgaaaaacgtctaggtttgctgtaagaaattttacaattctgattttacttcgagcaacaaaccctttccgatctttagctttctggttgagatatcaggatcgatctcgatctcttcttactcttccacagacccaacattgctgcttaggtccccaagtcgaggatccacatcttcatccccg

SEQ ID NO: 110181 - DNA, 1894 bp, Cannabis sativa
gtatttttgagaagtgcaagctagctttgagtttaattatttagtgatagtctaaaccgcaaaaaccacagcatcgcaccgcaccattttttgtggtgcagttttcggagttttttagttttgtagtgcgagtgcagtttgggaaattggaaaaactgcatgtgcgggttggcttgaaaaaatggtcaaaaaccgcaccactcgcaccgcaaacacccctattgataactatctccaagtcactctcaatcacacacaaaagggtgtttcaaaagcacgaccttctacatggccaactgacaagccgcaacttctccaatcaggggatcagcgaagttaagcttgttagtgggcacccacaaaatagaacccgtgtatccctagccaaagtcactccacacatggaactgcaaccaactttcacatcacaattgattttgacccaatcttacagaggaggggtccacctatgagaaacagcaacttccaacaagaaaaataaaccagacccataatatgcgtaacagaaagtaatagagtccatacactgtttaaagttactcaaaaaatggttgtgtaacttatcatctcggaccttccagatcgtatctaccacaagtaaggtatagagaaaattgtaaataaaaatcgagaattgcagataaaattattttagaaacgtttacacaaaacacataaaattgcactattttttaatattcttttatgacaacatccggctacaaaatatttaagaacaaaaaactctaacaaataatatagaataaaatttcaaattttaaaaaccttcatattttagagctttcataaataaaatatatattattataaatttaaattacctactaatgaaataatattagattcaaaaatttcatatcacaagaatgtttgccacaagcttataaggtcccaaaataccgattcatatactggcaagccatgaatgagaacctcctaactcgagacttactagcgaaattttttcagttgagtcttctatttgctcgattttttggggagttagtaaatctcactttcacttgtttttttactgcacttactcaaagaaagtgattcttgaaaataattaccagttggttggggtaagatgattggccctcaaatctggatgagtggattatcaagtcttgtgatactcgaaacttgcactactaaagaattagatttcaaactgttttaaatagttgagtaaagtattctagttggtctgtacaaccgtcacttattcgtcaagaaaattaagtaaaataggcgacagtgcaaaaccgctgagaaatttttttcccgactatgcaaaatcgtcgagaaatttttttcctgactttataaaaccatcgaggatactgaggattatagttgactgtatataacagtcacctatactataggcgacgatgcaaaatgcctatactattattgccgatagttttgcataatcaggaaaaatcattacttaggaaaaaaaatcttcacgtccatatgaacaatatatacaatacaaatacaaaaatctcagacctatatccacaacatatctgtatatatgcacagataaaaagaaacataacaataaaagaatagtcattcgtcttctccggcgaacacttaaaatgggagttttgtttggccttaagagccccgaagagccgagatttgggccacggttttgccaaaactataacctcgagatacctgacgatctgtgaaatacaaaaatctcaaaaatacataaatcctaaaataaaaataatagagattattttgtaagcctactgtcactgacgaggaggatcaagtgccaccaacccttgagatatactatcgcgttgaaagagagagagagagagag

SEQ ID NO: 110182 - DNA, 1310 bp, Cannabis sativa
atttcattgttaacttcattgaaaattttagtattcgaaaagcttaattggagggcgaaaatgcacttcttatgagcttgactttgaaattgtttgatttgttgaaagattatttcggttcctcaatttatcatacaaaaattcttgtagtcttgacacatttcattgttaacttgtgtattgaaagattatttcggttcttggttgaatctcatgaatttcagtgtataagagaactagttcttatgctaagttatcacacaaagattcttttaatgttttgacacattttcattgttaaattgtttaaccttcatcgaaagatttcgtattcgaaaagttaaattcgagggagaaaatgcagttcttatgagcttagactttgaaattattgatttaatttatgtttttcttatcctatcaatagaaaatttgctggaaagtataaggcatttctcctacaacgagataaaatccgcaacaaataattttcacgtgagcaataaactagggcgcggaggctttggaaccgtttacaaggtattcgaactatgtcattcttatcttttgttgaatttcatttatgaaataggatcaaaatcttgaaaacaatgaacttagcttttaggcaaatttgtttttgtcgaaaaattcggtagggaactttgagagacggtgtagtagttgcggtaaaggcactatcggctcaatcaaagcaaggagtgcatgaatttttgacagagataaagaccatatcgaacgtcagacatttccatcttgttgagttgataggttgctgtgtcgatggagggaatcggattttggtatatgaatatgtggaaaataacagccttgaacgagcgttgttaagtaagttttaacaaaaataaatcggtttgaacacccgaaaatgagccatggatgtaacttttctttatttcttcttgtattgtaggttcgaggggtacgaacatcaaactcgattggagtaaaaggtcagctatttgtttaggcgttgctcggggtctcacgtatttacatgaagaactcgaaccccatattgttcatagagacatcaaagctagcaatatactccttgacgaagatctaaacccgaagattggtgatttcgggttggcaaaactctttccggataatattactcacatcagcacaaaaattgctggaacaacgtcagttcgccttttcttgttgacttttgaattgttctctagacagatcgaaagatagggtctttaagtgtagtttttagtggatgttctagccgaaaaggcttagtaggacattgt

SEQ ID NO: 110183 - DNA, 3513 bp, Cannabis sativa
  modified_base (3009)..(3012): a, c, t, g, unknown or other
  modified_base (3205)..(3211): a, c, t, g, unknown or other
atttgagatactgtgaaatcatgctgacattagaatgtcaaaatttactttgatcttaagtgttgtcttagcattgaatctcttgtcacaatgtctgtttatatgaatattaatgtattctttatcttctattagattttagtgttaaagtgcgtcagcattccctcggatgtgtttcaataaaggtagtcttgttcatcttcttggtttgatagtagaggaggtcttcgtcaactccttagctttacatcataggaggccttctacttccccttggctttgcaatagaggaggccttcaacattccctcggctttacagtggaggagggcttcaacatccccttaactttgcaatgaaggaggccttcattatctcctcggcttcacagcgaagaaagtattcttgacagttgctaacagttgctaactgttctttttgtcaattgaggatgtgatcaacttccgaattaatatatccaagatgggggtgatgtattccttgttttgggtgcacctcagagtgattgtatgtgcggtctccattttattcttggtctttcaccttagaggtcttcatcatcccttatgttgtattcatagcagaagaggtcttctttctctccttggctgtcttgacatcgaatgatgtcttccacttgcccttcactgttatcatagtgaaagaggtctttctcatacccttagcatagtcaaggaggtcttctgagcaaatgctagtgatgtgttataacattctcattatactatttggttgccaaggagacagtcgatgctagccgtgtcaagaacttgaaaaacaggtggtagataagtgagatggctcgaaggctactgggtgttgaccttccaagtagacttggtgtcaatcactatgaagctagtcatagtaatgttttccatgggaaaattttaactatgagtggtaatcttattctaccacaatgtcggctcacttgaaaccatacatgagctacttcatggctttgaatctctttaagagtgacccactcttttcaggttatgttttaattagaacaatcagtggtgcatgactattaaccatcacctttgtttccaagatgtttgaaatttctttgacatttttgagcttgactgctctttccccccagcattgatctcttagtgattggtgtgaaaaactatgaagtttgtatgttcaagcgatctattgtgagtgagatagaccattgttgaggtgtagtgcagaaaaactcgcctgatcttctatataggggcaaaatcacaggtttttggagaacctggtttgatgatttcaactcatagaaccttgtttaaagaaaaaattccaggggaggaaaaagaaaaaagagagattggattaagcccctgctaagtacaatgtcccatacttcggaggagcttagccactgaaagagtaccacaactagggcagcgtcccactcctagagggtttttttttcgatcaattagaaaatctcttttcgatgcagcattctgcttctagagagatttttgtaattaatgatgtttctcttttctttttgatttttttgattggaggagaaatacttgcactaacacattagatttataaactcgatcattatattcttgtgacaccttaagcatttatatcataataatgcttaactttggtgtgtaaatagtctatatgtgtggttgtttcaacttaatgaacttaccagcactcacactagcatttcaagattaagaaaataaattactagggataacatcaacatttgattaaaccatcaaattactaactcaggtatgtgaaatgccactgcaacccctagctctcgtgtaccaaggtgtatatgacatacatggctctcgtgtaccatgaattttttgaattttcatatagtgtgatagctcccgtatactatgtcttatttgcctcttgagtgatcaaagaaatgcctttattggtcactttccatattaaatcttgttaggctttcttgatcatgggtctcagggagttgctacatatgcgaccaatcatccacttatatgtagattcgtgagttggaagtatttaactcactaaaaaaaaaataaccacagttacctcaagaccaactctacaagcttggttcagtgctagagagcgatgttaggtttgtgagctgcaattgattaataacaatgaagtaccaacaagctttattcaatgcttttattcattagatactaaatttaattacatcattatgagctaagtggaaagaaaaagaactagtagtagtagatctccaactttcatcaaagcttagatgaagtgatccccgctacactaatgccctattaaaataatagtgtaggggccataccttagcgatggacctccctacgtaaagatgaattcgtcgcatcttgtcggttcgagaggcaatcgattcacttgcacaaggtaaagtgaatctcactatgaagcgaactgcctagggaataattgctttattatcatctcagattctccccattcaagcaccttggtactgacactagattcaagtggttgggttttgtgccctaaataaaacccatttcagtataatcaaatttactaattaataaagattagaaattgctttttttatgcatggttcacatgatttatttcatgattacatttaatgtataaattctatttagtctagaacatatataaatatatgtatatttattcatgattatagtgttgttagcacaagggaatataattgttatcccaatttttacactctgacgtggcatcacacgatggtgacatgtggaattgactctgggtatctgctcgcaagatacaggccgaactggaaacctcgtatgcttactcaagacgaagcagtaagcaacttgcacagaacgataaacacttagtgaattcagctttcacatcgttagtcatcaaggaaatccctataacttggggatcagattacagagatatnnnnagctgtccaaatcccacgatcagtatattttgtatttactatgcaatctatcaattgtaacaagaagggaaatacttcctctccaagctcatcgccctataaatagtgatgcatattcactgggcaaaagggtcaaaaacattatggttgagagattttgtctaagaattcatattcagagatactgttgtannnnnnntaagaaaaggaacctttctccttattctaagttaatacaaataacgaggattaggctattaccgaactacttggggctgaaccactataaaattcttgtgtctttaaatttctttactatatttcaatcgttataactacttgtcgcttacaaaattagactcactgtcgttggataaaaccaaggtcaacattttgatgctttcattgagagctgaacccaaggatcgctctttattgcaaatttaatcacaagtacgatggtggtacaaactcgtaggggcgtggttgatccagcaaatc

SEQ ID NO: 110184 - DNA, 1478 bp, Cannabis sativa
cattcatgagtaatacccattaaatatatacataaatatatataaatatacaagtttatcatattttttaatattttgtttaaaattatatataaaaataaattgaaaaactatttgatataattttattgtcaaaataattttcctatatatagttcttttaaaaaaatctatctaaacacgacctatttactagtttataaataaataaaagaaatataaatcatgttaatatgttacggtatgttaaatgtatacttgacattttaaattaggtgctaaaatattgttggtggggacaggaattagatggggttttgttatttttccctcccaactatgggtctttctttcgaacaaccccataagagattaaccaagctatgcttgctaaggaagcttaacgaattatttccttccctaattctcttattgcgaggttcttggaaactgcgtattttaaaaataactcttttatggatgctcgcaaaggttattctacctcgtttacttggaagagccatttatggggaaggaaatggcctaaacaggggatttgttggaagataagtaatggtaaatccatcttgactgttaattcattttggattcatgattgtagactcattaattacaaaagtaatttccatctcctagtagtacagtctcatattttattaataatggttgttgggatattggcaaactgcgttattttcttgatgaggttactgttaatgccatctttagtgttcctattggtgacttttctagtgatgattgcttcatttggggacaccatccttaaaattttactattaagtctgcataatatttagctaactcttcctatgctgttcctacttctaatcctttctaaatcaataaatggtagaaattttttcggagccttaaaattctttttaaaattaaacactatgtctcgaaagctttgcatcacattttacttccttctctgaatctttttgtcctctttgctctgcgattttcttttccaataatcgagccctcaaaacgtttctttattggtcgatttttcctttcttcaaactttcgacccagggttaggtttttcaacaacggtggtagtataatattttttcttgctcatctatgttattatgaataattacatgtaatattgaaaataataagttggattcaattctccataaggtacacttcttaatgggtattacccatgaattgttactaatacaaatttaactataaatattaattttaaaaatatcaaactatcgtattttgatctaataacgaataatgaaattataaatttgaatttctatgcttaatttaactacttaattaaaatagtataaaaaaatatctcttttacactatatcaaaaatatggtcgtacaaaaatatttaattcaaactcaactttttcttttcttatttttcttgctaattttttttttaatttttctttt

SEQ ID NO: 110185 - DNA, 1660 bp, Cannabis sativa
  modified_base (46)..(56): a, c, t, g, unknown or other
ttgaaaaatattttcacttttctacttttaaaaacagaaaactgannnnnnnnnnnttaccaaacgccaccttagtttagaaaataaggataattatgtaatatactattttttatattttaacgtttaaagaatttttttttttacatttttttacaattttctataaaaataacactaaaaaaattaaaaaaaaaaactacataaaaataacaggaaaatacaacaaaacaacaacaaaatataacaaaaaataacatacaattaacaaaaaatcaacaataattaacaagagtacaatataaaaatacatcaaaagaccatattttttgtaatgtaaaaatcgtaaaagtatttaaaattccgtacaatcgtatttttgtaattttttttgttgtttttgtatatttgtgaaatactccctaaaaaaataaaagcaattaaatcttacccaaatactttttttctttacaagtacattggtcatcagaataccaaaaaaaaaaatcatccaactaagtaactttgttttctatctatagtgtgcatttagtgaagcaaaatgcaacaaaaactagacatgaacctagaaagataaataacaaggaattaaattcctaaaaataatctagaaaaagagaattgaattatccactaaaaatatcaaactctatgaatccaaaaaagaaaaacttttagaaaagaaataaatgatagacatttatgtatatgaaatgaagcatatataattattgtataaaatacaaaattaataaaatatatatgtactataagtaagaatcgaaatatctccagtcattgattcttgagcttcaattccacagaagctttaatctgcaaaggaagctgattgatgtgaataatcgggcttccaagctctctctactctactaaaagtaaaattgtctccaaaattactacttcgttaagacacttttagaccatctctaatagaatatgtaaaagttgaagtagactttaacacaccattgaagtagacttttaataaagtgagctatattttatatttgcatcactaatttgtattttcattggagatcctcttatagtagtaagatatatatatatatatatatatatatcttaattattaataacatacatattcaatttgctattgaaatgtttattaaattataataatatattattttaatattacaacaaaatgtaatggaacactgtaaagaatttcatatataagatcaagttttggagttctattgagatgcatttattgccaaatgattacatacttcactttttgaagtctgattagagttggcgtaacctaaatcattgaagactgcacaaaaagttttatatcttccaagaatctgtatttttttttatctatgtatttgtggtgatgggaatggagagaatatgagaatttatgttttttttacaattatttattgttagtatagatggttaattctgtaatttcagttagttcttctaactaatttctgttatttgtttgtaactgtttctttcattttggttgtctcttgtgtatataaacagaccttcagtgaataaagaacaatgttctgggtttactctctctcttgcatactctgcatttttctctgtttcttcttttcttcatact

SEQ ID NO: 110186 - DNA, 703 bp, Cannabis sativa
ctatacctcaaactcaaactaataatatttcatgtttttttaatttctcccctttcacacattaaaataatataccacaatcttaaacttatatgtatactaccttttgattttttttaatatactattagacataaaaacgatataccattgttcaaaataagtatacaaaacaatttaaaatattataccacaaattaaaaataatatacaactctttataatttttttatttcttaatatatcatagtacataataagaatatataccgcagtgtaaaattaaatatatcagaaacttaaactaatatcctactcatagtttttatgttctttctttcattcaagtatttcatatcacataaaaatgatataccttagagaaatatgaatatacaagaaaactaaactaatgcacttttattttttcttttccttcatgatatactgtgccaagagagaaggaggaagcgagatggtcaaaacacgagagaatgagaagaggtagaaagctagggttaattacccaaggtgtaaattgtaattttatcattaaaattttaagtgataggccattttgctaaatatttataaaaatggacatttactcacttagttttcatatttagggtcattttgcatctcatcccttttaaaaaccaaaatgtaatagtataacaatttgaagatgcaaaaataatat

SEQ ID NO: 110187 - DNA, 818 bp, Cannabis sativa
tctctctctctctctcttgtgtttagctcagcccaacactaaagggttgtcactggtcactgttgggtaaacggtggtctccacagtgctcagggaccctcaaaatcccaaaccccaacatccatgagttttaagaggagactttgagtttgagagagaaagggattcagagatggagagagaagtatagagaaaagagagagattgggcttgagttttgtatgaaaaatcttctgtgaatgataaaaattcttgactaagtgtgagagttgaaacactttaagagaatctaacaaagaatcctctcgactgtattatacatgttattgttcaatcaataaagagaatttggtagtattgcagaactagagtagagtcatagatcacatcaatctatcgaacttgaaccaatctatatcttgaagttaatttatcattttattgctttaattatttttaaaatttataatattctattcattcttatttttttttttcaattattattgcgtgtttgttattcttattattactaattaaatgatgattaaattttaattaatatgattatccactttagtcttaattttttcacatatactattagagtttgtcacacattactaatgcatagaaataaaagggaaatttgattttctatacttacatatacctaatattttttccctaaactaataatttctacattgataatatatgaccacttttccaaaacccaaaaaatatccctctcaaaaactctttttttttttttttcaatttttctgggcttttaaggggtcgggtccgatggggcc

SEQ ID NO: 110188 - DNA, 1022 bp, Cannabis sativa
agatcctggtaaaaataatttccaacagttcgaggaggttctcacgcaatttgtggatatctagatcgtaaattcatgagtattctaatcactgcatttaaaaaaagttaaagtattatgcggtgacatgacactttaaattggcttcattctactataatcctttctctctttttttttcacattttttaagtaatattaaatatttaagttaatttgaaaagaaaaaaaaacgcaacccaaatctcaaatattacattttaaaactatatatcacattaaaaaaaatatttttaaaaaaattaagatatttaaaaaatagtatatatcatacactatatctatcctaaactatttctcttaattttataattgaatttactacttaacttttcttaattttatttttctattttttactcatgatggagtgatcttttcttaccgaatttgagtctctcaatactaaaaagaatagaaaattgataagtgtaatgtccctgcttcaagcctccattgggccttctctcatagactcatgctcttataaatgggtacgctactctagctccttcatggattgataactggccttacagaccaacacgagtatttttatcgtgctttgtcctcactcgcacgctttttgagaaaatttcctaagaggtcaccgattctgaaattaccccaggtcaagcacgcttaactgtccagttctttcgtgatgggctactagaaaagaagatgcaacttgttgatataggcagtactaatcaatccatttatgcactcttcaacagtgtagtctcacacctacacaatctcagaatcatcacacttgaccttccccaagcgatgagagattgcacagcttaccccgtattttcccttacagatcacgggactactgactgtcacaaccaccctcttgcggggtccgatgtcctcatcaatcacacttctggctgagtcaatgttctaataccatttgtaacgtccctgcatgttggaaattattttac

SEQ ID NO: 110189 - DNA, 1767 bp, Cannabis sativa
tatatgaccaattttaatgactattaatttaggggaaaattataggatattttaatcatggaatttcaaatttccctacacaattcacattcccaaaaatattatgactctcacaatatatatccacacatctatctttctctctcgccctttctttcttcatctttttctttattctcctatgtttcaattttataagaattatagtaaaagtaagaattatagcaatacttttactatttatttcaatttatacatactttattataaatatatgtctcacattcttctctttctattattctactccttcaagttactttcaaaataatattaccatttatgtaatcaattttaaatttatttttactatttttataatttaatgaaaaaattataattattatgtatacttttactataaaaattatagcaatacttttactatcaatttgaatttatacatgttttattatatttgtttttactgtttttataatttaatgaaaaaaattataattactatgtatacttttactataaaaattataccaatatttttactatccatttcaatttatacatgatttattataaattttaatatatttgtctcacattctacactttttactattcgactcctttttcaagttgctttcaaaataatattactatttctgtaatcaattttaaatttatttttattgtttttatactttaatgataaaattataattactatgtacattattttttagttatttgaaattaaaaaacaaaccacggttcgagtaagattgtttttttatatctaatatttattattttttagttatttgaaattaaaaaacaaaccacggttcgagtaagattgtttttttatatctaatatttttgttaattaatattttattattttattttttttaataatatgaagaagatcttaataaaatttcattctcactcttaatttctggattattttgaacatagtaactatttcaagtttttgttttttttttataatttttttttttgttttttgatatatttttatgatttacttattattaacgaagcgcgtgattaaatagttttatttaaatttatataatatttagttaaaaatttagaccgtgttataatagtctaacaatacatactctatgattataccatatattttaaatttatgatttattaataaataactaaaaaaaattaagaattcaaaatatatctatgacttttaggtttttttttaattatttgttttatatttaaacttacagtttttttttttttttttaactataagagattttttttaaaaaaaagagttattgattttttttttttgaataataataatttagttaaaagaaatcgtatcgctaataaatttctttttcttaataataatagtttaattaaagaattaatttgtataaatatatgtatatatatatatatataaatattctttctcacatctcaaatttaataattcttctttattataatgtttcaaattttgctcaatttttttttatgttttaaaatttttatcactcagattattgggtttttttcttctaattttttttatattagttttttgtcaaaaagaaaatatataccacttaacttatatacacacctaaacacgttaactatttttgagattatggcatgtttcaatgtccataatcttaaaaaaaaaaacatacatgtaacatttaactcttttttttttttttt

SEQ ID NO: 110190 - DNA, 850 bp, Cannabis sativa
ttgcaaaagttaccaattagacccttgttaaatgataaaatagactctgtattttccaaaatggtaaaaataggataccgcgcttaatttttgacaactttttttttatataaccaacttgaagacaatttttaacacgaacagatacagaaaatgtaaacagttttatcataatatctttaggtcagattattattaaattttattttggcgccaaagaaaattaatatattagaaaaataaaaattgcataaacttaaatttaagtcttgccaaataaattaacctgaaaaaagtattatctgtacaccaaaataaaaaaagaaggaagaaaaagataaaatgttggtataataaccactggttaaaatatgattcttttacaatagttttgggtcgtatttataaagaaatattgcttataaaattagtattttggtgtaccattttagttgatttagtggcataaaaagctaataaaaatgaagataatggtagagagagtgggaacatgcagatatgtggtgcgcttctattgctggctttatgcgcgcgtcagtgtgtgatggaagggaggaacctgctggaaatggaaccaattcaatcatggaccaagtttatcttgcttgaaataaagaatcattacatatgtatccaactttgattgaagacatatatcaggtgagtccaaaggattctaatcttgatgcttcatttgcttttaatgggcttgtgtcattaggctctaatttcatatataccattttctttctaaatatgaaaaataacataaagttaaaataaattaaatatttatgataaaaataaatttaccattaaaattatgaaa

SEQ ID NO: 110191 - DNA, 1793 bp, Cannabis sativa
agaccttaactgaattgaattaagggttacattgagccgcattcatcatgctgttattatgtgtagaatggctggaatgttagcaggggtgattttggtttgttaaaacattataattatataactgtcaggtgggatggggtgaagaaaggggtatcagatgtgtgagtgatggtgagctctgttttctagagaggtttccaggtccctcgaagaacctgggtgttatctgtgtgttgttccaatattagcaatactattccatatttaacctactgtgttcaaatgtgtgagtgatggcgagctctgttttctctggatttcattcctgcctccaagaaattgcagaaagaagtccagtttgataatccttgccatcaatattctcacttgatctatcaactaatattttttaaccaaagcacaaacaaaatgggaaaacttttccttcctctttaaattaaaggaatcaaagtttgacagtcctatctcaaactgccccgcatgaagctgggaattgaactttagattttgcccaagttgagaaatgagaatcttaaatgagataccttgcttctctaagtctctaaccaccatcaaggatgtcagaacaagatttatcatcctcatgccaacaaagcaaacatgtttaaaacataaaacaaaagtaatctgtagttctcacaagatgttttcagctcttgaaaccattaaaaactacaccgaaaatgtggcattttggggtttctgagtcccctcactatcaccggtttagataaataagtaccttctccttcttctatatataatcatggacaccctcaattgtttaatttcacaaaatgtttatgacaaaatcaattgtgccactgaaacttcaacacttgcaatcttcaaacctaaaaacagagtcttcctatggccgatacagattagttgctttaaagtgaagctttagcttgcgtgtaattataaacttatgtcctctgcactaaattttgaagaattccacaaatatgtaaacaaaattcgtaaaccatatgagaatctacatgctccataatcagctattccatgctccatttctttatcaaccgaagagaaaacaaacaaaaacagcgaaaccacacatttatagtatactatcattccatgcgattttcttagaagacaaacaaaaaaccaaaagaaactaaaaaaaggagaactcacatggagaatttcgagctgttcctcgaggttctcgagtgcggttcgaatggcattgagactcttggcttcccgaatagcggaatcgtcatcgtggtggagacgaaagtccttgacgaaaacaaaacctcggtgaccgggaagggcgtcgttgggggaggcagcagagggtttcttcgtgtcggagtttctgtgagtttgaatggagttgaggaagtgagttcgagagatggagtgaatggcgtcgctaagcttatcgtgtaagtcccagatcttctccaggacagcttcgatttcgtcaatctccatttcccatttcatttgagaaattttctctttcgttattttcttttcttttcttttctagggctttctttcttttgttttctttttcccactcactgccaattccttcaaaataaataaataaataaataaataaaaaagaaaagaaaaagaaaattcatggcgtgtgcccagtctccgacaacgtgacacgtcactgttcattttctttttctttcttattaatataattttattttttatcttctagccaaaaatcactgttagccactaaaata

SEQ ID NO: 110192 - DNA, 1616 bp, Cannabis sativa
aactctctcctccgcccccccggccgccccgccacccgccaccgccaacgaatctattaggtttagctcttgatcataatcatcatcatcattattagtagatgtgagatttagatctaaagaaaatttatgatcatgatgatctaataactccaactttgtagtgttttgacatgaagaaatggcctgatgatcattattactactccttgaataaattgttgttgttgttgcagcttcaatatccatcactaagaaaataaatgaaaaagttttgtgatgatatgaggggaagttgtagtgttggggggttgtgttatatataaatatatatatatatatttatattatggataagaatagatgcagtagtactctcaatcacacttgatcagtactgtcctaataataagagaacacaagcacaagtgttggggggtttaattaattatagtacttggattaatgaaacctatatatatttatataaatataaatatataatatgtaatgcaatggcagatcaaacctgcggggcttgttcctgatgatttaattaaataaatatataaatatatatatatatgatgattatgatgtgaactgtgtatatatcactgggttatagtactgtgttgtgtatcatgtgaaattagtggatacagatatactattattataactcatttatttaataaaagttttattatagacgttgattagtggaaatattatattatttatgattaattaattgaaaaaaattgctgacaaagccaccgatatatattgataagagtattttctgatttttttgactaaattaatattcttggcttttttacaattgaggtttgagtttgaaaaaaagtagattatacataatatatatacgatgatcacttttgaaacaccactattgattgagaattattgttaaggacgatatatatatgttccatatgtatatatagataacatatattaataatatatatcaaaattcgatgataccgattcatttgtagtgtatatataaaaggacctacagcttgaaattaaagaccagtatttgacaaaagcagtgccaatgtacttgtttccaagtcatcttttttgcctgtacttgtttttgtatcttatcatctatatatattatcacaagttttttgtccatcctttcactatatgtattttgtgatgtaagacagttgttagatgagaacgttatttaatctgagggctgggattgatctagagataattagagataattagggttaaaaaatggtaacgtactctgacacctgtacctgatatccatctaatgtactatagaatacattccgtaaaaatacattacagaacaaaatcatgtccctatatatatataaatacgatcaacccaaaattatatgcacctacttttttaataaatagactaatagtgatataatatttttttaaaattatatttttttaaattatatagaatttaatatttaattatactaagtatatatgttaagtacctaatttttagcaattttgtacatataatatgccaatttatatattataattcaatcttactgaaaatttaaataattaataat

SEQ ID NO: 110193 - DNA, 701 bp, Cannabis sativa
gagagaaatgtgaagtgaatggtttataagagttcacacatgcatcccaagcttagttaattctattagttgtatcatcaagtattaaaactcatctaacaattaaataaaattaacatgaagttaaaaacactaatggtatagggtaccaataagaacaattctgatttaccaacagaattagaattattcacttcaagaattttgttaaaatgtcttcactagaggctctattgaatattatgggcaaacataacaacataagtaaaatgtatctcaagaattcaaaacccagacaaatggaaatcaacatcataaatgatcagtatatttctaagaaaattaaaaagtaatggtaataaggaaacttaccttgataattatttgagatgatttattgaattgctagtattatacctaaaaaagaaagataaaaatgaataaaattgtctatattctcatatagcaacataaaaccaaaagtgatcaaagctatagtactttataattagtacagtaattatgtttccattgtagttaaaaatatattttacaattatatacatgtacaaaaagaaaaaattaagaagatatttttaagatacaaatataagaattctagtgaaacattttatagaaagtatcattttataagaataactcacacaaatacgttattcatacatactcctcatcatcct

SEQ ID NO: 110194 - DNA, 1710 bp, Cannabis sativa
  modified_base (1468)..(1499): a, c, t, g, unknown or other
ataaagaataagatggttctcattatcataacctacatcacactattctgtcaaataattgagaaacaaagagcctttctagaaatttgaattcttcttctcttcttccctcttgaaattgtgccctatagtgaaagagtagatgcccactaatatcaagtcaatacttaatcataatgtagaagattgtgaaaaattccatcactaaaggagatccatgtttagattttggcatactctacgacagaaagaaacaagggttagagatctgaacggaaggaaccataatattccgctgccccaatgtaagattttctacaactttatatgtatttatttcattattttagaaaattcatatttagagtgttagattatagaatataatcaaacatacatattagtaaatctagattttaaaattcatatttagggttttctacaattttttttatgtaaaataattacatagaataaattacataaaatttctatcccccaaattagcttacattattttttaaaaataataacaacaaaacctacacccaattataccatatattaacgattcctcacctctcatacattcacaataaaattaccatccattcacatatatatatatatgtatatatatatatatcacacacacatatataaatgcataaaatccacacaacaattaatgtatacacattcatagaattactctgatatcaattattgattttatggcactaaatcaggtacgtagcggaagagtttcatattatcttattatcattgtaccacaccccaaaggatctccatatcttcgcacattaaattaaaataaaaaaatagtaagtttagaatatagacctcttgaagcttatcagggtattctcgaaacttctcgtatgttgtatcccttaatctaggtttcaccacacacaaagaatagtgtgggatattaggataaagtgtatagctttgttcttattgatttctcagcacatgagcaagaacactttgagagagaaaactgttttctttttctctctcttaatttcaaaaattatagtgtaaagtgatgttctgatttcttcaatcagacttctatttatagtagttaaatcccattaattaaatcatatttatttttttaaaaaaaaataaatatctataaccaaattcggttactgatatttatgaggaaatctctcaactacttgaaaaaatatttcaacaatcttgaaatatctatgaccacttttcaaattagattttgacttaattaaattaattaaataattaattaatccaaaagaaaacttcatagggacaggatatgctaggcacctaaccttgttgtttaggacaagaatggtgtcctttgtcctgataactttattcttgacaaatcttgtcttaacaatttttatctttttctttatttaattaatttgaaaaaattatttatttnnnnnnnnnnnnnnnnnnnnnnnnnnnnnnnnttcaaaatagatttttccgaacatcattatactactttttatccctattcttgatagtgtttcaaggtggtgattcatagataatggacctataattctaagctccaataaactattatttattgagtctcatcaactaaataactcttgtttattaattctatgattactccactaaaaatatagaattctgtaacgtcctcgcttcaag

SEQ ID NO: 110195 - DNA, 708 bp, Cannabis sativa
actcctttaacaccagtgaattttatggatgagaactcttggatgaggttgttgaataaagatttatcggaagtgtcaaactgctcatccatcactttgataaaaatctttaaccttttcaggtggctccaccgatccactcatccccaaaagaattcaggacatgatgaacatgatgcagacgattgaattgcatatataaatgatatgtaatgcagaataaattgtaaacatatcaaaactggatatgcaatgaaagaattgaaatacctctagccattaatttatgataattaattaaattcaaatttctaaatatgtaattaatgacaggttttttaaaatttattaatttagacaataaattacataaatttggtgaatataattaaatgcacaattataaaaattaacgcaattattacatgcctaaataaatcatgtaataaattaccaaattaaaataaatttccactttaaatttatacatgcagtaaacatttgatggaatctttctttatgacagccttgggagccatgggctttttccctttgttcttcttgatttttttcgtttttttattttttggtgtttatttcaaatttttagaatatttctaattatggaataaaataaataattgattttgagatatataaatattttatatttattgaatctgtacaaaattaattacgtaatattct

SEQ ID NO: 110196 - DNA, 747 bp, Cannabis sativa
ataaataaaccacaacaaaagcaacaaacgacatgagctttatattgaaatgagtcataagtctcattttatttccattaataaattagaaattaactaaacaacaataaaattgatttaatataatcatcaagagtgagtagtgtttggccatatatattgtaactcataatcattatcttgccaaatataaagatataatccactctttaaaacttcccaataacacttattatcaagacacctaaaagcatctcttttggtcacaaacacatcaaaatgacctctcatcatcaccattttttccttatcataaacccaactcatgtcacaaaagaaaagagttgttctcatgaaatttattctaaaactccatttaaaactttccccgaaaaacaactcatgcataccaagatcgtcgtcttttgattggcaatggagagttagcgtcgtgtttaaatcgataaaatttactagagagacttggtgcttggctttcactatagatgataatgcaaggagtagtagtactagaggaaacatagagcttagaaaagatttcatggtttttatttttaatttgatttgagttttcttttttttatttctaataataatgtgaagatgtgttgttatgttaccttttttatattggtaaataagaaacgtatatgtgtaattttatacatgtggcaaaaaggagagaaggaaaatttgagacttttgtttggatgtgattaattactt

SEQ ID NO: 110197 - DNA, 1735 bp, Cannabis sativa
gtggtactagaacaacttttatattttcatcatcccgacccaatttgtatgcttctgatgatgtgacttcagttacttggtatgccccttcctaatttattccaagcacacttgatgcactgtctttagtgttaaggaacactcttctgagtaccatatctcccacaaagaatttcttttctctcacttgcttgttgaagtatctagctactttttgctgatgagctcacaactttaactttgttagatctctccattcttcaatttcatccattgattctgttaggggattgtgattggtcttctattcataagataatcttttgtagatagaggctctagttctacgagcaatattgcctcatagccataggctaaaggaaaaagagtttacctggtagctatccattcagtggtcttatatgaccacaattctttgggtaattcctcaagcgaattgcccttagcttcttcaagatggtttttagagtgtccataagtttcttgtttactgcttcggcctgaacattttcctaggggtgtgcgactgccaagaagcttttcacaattccatgtactgtgcaaaaatcaatgagcatttggctgtcaaattattttccattgtctgacacaattttttgaggaagttcgtatcgacatataatatttttttaccacaaagtctaaattttttttggaagttatagtggctagttgtttggcttctatctactttgtgaaataatcaacagctacaactgcatattgcccacaacattttccctttgggagctatctgatcaagtctattccccatatggaaaacgaccatgaactttacatctggatcaattcatcgggccgagcccttggcactttacaaaatctttatcacttgtcacatttcttcacatatgcttttaaatcctcaatcatggtcggccaaaaatatccttgtcggaggattttcttagactaactctgcccccagcatggctgctgtagaacccttcttctgttgttacacacctcaaaataggtagagagaaaccccatttgtacgttactccatccaagtttaaataccatgaaacctttctcatcatctttcgagcttcattaatttcacttggaagctttctaattttgagataagctacaattggggttgttgacctcgaatttagccaaccgactgaagaatcatatttatgactgatattagcacatgtacacaataagaataggaaagtaaagagcacaatatttttatagagatttgacccccttagttagagggtcatgacctactccccttttggttgtattaatactagagataataccactcagatcacaagtattgtggattctaaagtggctgtcttaagattacaatagtgagaattagtaggcaaatctcaagtaagagagatgaaataaactttatctcttctacaaagcttggggcgtgtagaagagagggagagagagaattagagtttcagacttagagcttgagagcttagggagcttgagacttagagaaattagggttagttaatgctctttatataggagagcttacaagagaataataacctaatatccctaaaaaataagaactataaagtatttgttacataataaaataataaataataaataggttctcccttatttttatgggttgttgaagcccaattcatagctaggattgttgtcccagatgaat

SEQ ID NO: 110198 - DNA, 1030 bp, Cannabis sativa
agaaagaaaaagtgtaccgaattttgcagggttttgagctaagttgagataatagtgataatttttggccactacaaaagtggcttcactcattgtggtgttgcctaattgtgatatctttttatataacatttgattgaaattgaaaaccaaagagtttagttcatcaacacatctgggttttgctgggaaagccatatctactacaaatggcaaacaacccaaggcttcaacatcaaacacaacaaattttctagctcccaagttatacattctctgcatacgtaaattaattaacattaacataattaattagtagttaattccccaaatcaatatataaccaatgttagtaaataagaaagcgaaacgagtaaggataagtgcacatataaattacacacaattcttaacacaaacttatgcagccaaatatttcaaccaatgatcatttttattaaaaataggtctcatttattaaaagtaacttgctattagagtaattgagagtataattactatgaggtaatttagagtaaaactatgaggtagcatcctatgaatagttaccagttttttataattattaatatccaatattaaattacatcaatactaatatgagactttataagagtgttagacacataagtgtccctagcatttctcttgtagtttattagtgcacatttcattactctaaaagtatttataatttaagtgtaacagtcaaaatatgcacacaaaaatacacaatcttaagcttcttcacgaccagaatacttaatattgtacatatttttggttcaaatattagttatgagtagaataattatgatgattttttagtataattagtattacattatctagttttagcaaattaaaagaaatgtcacttttaccagcacatttttgtgttgacaaaaatttagtattgcgctggtaaaatataatttacttttgatgtgttagtaaaaggggttggcaaatcaacgttggttgccagcacaaaatgaaaagaactgac

SEQ ID NO: 110199 - DNA, 770 bp, Cannabis sativa
ctttggatgttaccaatcataaaatgagtatttatggtattaattcaattggatgattttgatgagttttgagctgttagagaaactcccaagcgttcaaaaaaagtatgcacttctatattgaaaaacagtaactagttaccattttttttaactttagtcaattcttctccaaagtttgggcctttgacaatttttatcttcttcttattaaggaaaatttagatagtactatttttattaaaaattttcacttttacctttaaatatataatttatattatttacaatattctataagaataacaagaaaatacataaaaatagtatccaaataacataaaaataatgtacgaataacaaaaatttatcaacaaaataacaataatataatgtaaaaataacatgaaaatattaaaagaacatattttctttaaataaaatctaaaacactgtaaaattatttaaaatttagtacaaccgtatttttgtaatgtttttgttatttttttctatttctgaaataaccctttttattaatatggctttacttgttttaggtaagagcaaactaaattagcacgggataagttgatgaatatttcttttttgtatctattaataaaaaatactcttatattatatttcattgaaatatacctacttgtgtgagtgagttgtctaatatactctcaccctctagttaagtctagcacataatttatattgacctaagaagtatatagggacatcatgtataaaagtgggta

SEQ ID NO: 110200 - DNA, 909 bp, Cannabis sativa
ggaattgttcttccaagttgattataaaaaaaaattgtcgaaaattgagttcagggtcctatttgtactatttttgaaaattcagagtctgttttgtcatttaacaaaacagagagtttaattgataacttttacaaaatataagatccaaaatgatacttaccaattatttttttatgtaaatattttttttttgttttattatattgaagtgtaagatatatgttattatgtaaaatatatactactttctttttaaataaaaaaatttgttttagaaagaattgtgtttactttcaagtaatcaattacaataattattgaaaaaaatatatattttaattaattttacaaaataatattattttgatataaattagtcttttatatgtgtaaaaaaaagtattatttcacaaagaagttttgctcttacaaaataaacttaaaaagataaaaaagaaattgttgagtccaacatctttatacatgatatttacatatgcaataatttgtttgtttttgtttttggtgcaagagatcaatgttagtttcataatttgtttcctttgcaataattagaagtgatttggttaatacataatatatgaagttcaatgtgttgttcttcactccacgtaatgttttgaagttaggccgaagaacattacttgttaagttgtattatcaaccatacaaatcatagttcaagcaacaaaaaaaaaaaacatacaaatcatatatgatttaaggctaattaggattgttttctttccgaaactttgacatgtaccatatcatgtcttctacacttttttttccattaaaaattctccctaaactattgagattgttagatttaaggatttttgtctaatttcattcaactttactgtttcagtgattgtttat

SEQ ID NO: 110201 - DNA, 633 bp, Cannabis sativa
ggctacatcccaatagaaaacttgtcgatcgccgccgcaagaaataagcttggagttgtccctgttgagggaaatggcagaatcgaataaacattgggaaatcgaagatttcaaatacagaaaaacccggacaagaaaaagaatctaacagtgtgacatgaacgtctcgaacttcacgaccatgagacttgtaagtcttgatgtgaattccccggtgagggttccagagacggattgtacggtccttgccgcagctcagacagtagtttccatcggcgttgaaccttgcggcaagtactgctccttcgtgcccttttaatacgttcacctctttcgttggcaggtccgccgagctcatctctctctctctggcaaggttttggaggttggtacttgctgattattcagaggcgggagtccaccgtcggagaagaacttcttcttgggcttttgatttgggctaaaacctggtaactcaggcccaaccatgaaatatggggaaatttaaaaaaaatactgaaatttgggtcacttttgcaaaaatactgtcacacggaaaagttttcaaaaatactgtgtttttataaaataccagtagaacacaaaacataacaactcaaaacaacagtagaa

SEQ ID NO: 110202 - DNA, 894 bp, Cannabis sativa
  modified_base (52)..(63): a, c, t, g, unknown or other
ttatttataactggcccaaatcgagacttgatttttttataacaaattagannnnnnnnnnnnatagagtattcttaaatagaggttttattgtattattatttcttgagtggaagtattaattaatttgaactagtaaacatacatagtacaaataaagtcatcgtttcacattaaatatattactcttccattactatatctaaatatcaataagttttgaaatagaagaagaaattaataatggggtcacttttacatgaaatgaaatatatttatataaataataataattaaatagccacctaattattgggttcacaattattcatcaataatatcacaagctataataaatatataatatataaaaaagagaaattaattaaaaagaggaataataaagagaaacgagcatgaaaagtttctatctttggtggacgatacatggtctgtcacgtgaccctaacatggaaagatatcacataacccacaattacaaacataatattttagggctttccttcctatccgtgatggtgttcaatattactacgagataattttattaatttagaggagatttagtctctatatgagctaagggatcgaaaactagaaggtattgtcataatagtatttatgttacaaactggatattatttaagctaccaaattgtacttatagtagcatttagagcaaatttagcgagcgaattcgctccctcagccgtaatgaatccctgtaaaaccctagcaatatgtaacctagtcgcctaacaacccttaaaaccctagtgttgcctcgaattcttcctaaaatatgtggttgcggctgtgtgacacgtgggtctcaaggctccctcacccacgaaattagctaagttatatata

SEQ ID NO: 110203 - DNA, 686 bp, Cannabis sativa
attgtgattcataatatttaataaattttcttcaccatattaagcatccttagcaagcaattattatcgataggataattaattacttttaaggatcttaatcttattttggaggaagatacaatatctaaataaattaatatttaaatgttcctcattaccaaacaattttccatgcttaattttacgataggtaagaaaataagcactaattgttaagaaaaaattcacaaaaatttaatccacaatactaaaattaataaccaaaatatgaataaaattgatgtattagtattgtgcttaaaaaaatgatagaaaactaaaaaatggaacaaataatgaaaaaagggcccaaaatgggctatgcacgcgcctgttttttttttggtggaccgtacgacatgtcgtttttaagagacaacatatcgtttgccccgaacgacatctaaaagggtcaagaaacggcccgtcatttttctcagttgggggctgaaccaaagtgcgaacgatgtcgtttttgcccgacagaggcaaacgacatgtcgttttctgtcgtccctgtcacccaaaaaacccacacacgggtccgcgggtctgcaacccggattggcgcgacctgattcgtgacccggtcatatagaccatctccggccaccaaaagtaacgtcatttgaggggttttgttc

SEQ ID NO: 110204 - DNA, 671 bp, Cannabis sativa
caagatgatcctagtttttaaattaaaatactagtaatgttaatcttgtccaacacttaaatttatttccttccaaatctattatgtccaactcaaattctcttcaattaaaactcacataacatacacggtaataaaaataatatttcaatactttaaaattaaaccaaacacaaaaataaaataaaaaattattctctttcaattccatcataattattccaatttcataacctaaaatacaaaagtttcgaaattgaaaataaagatggagagaagatgtaagtcaaaatttctacactatttattaagagatattattaatatttatttttcttaaaagaaaaaatgataaagtaaaaaaaaaataaaaaaaaaagtcaatgttagtgtcactgggtcaacacgcctgaatgtgttgcagtcatagattactatgcgaatacgtacatttcatctccttaatcatcattatcatactcatatatgaaaccaaacccccaatccattgaaaattgtcatcaggggaaaattacaaacagaaaacattttcccaagtttttgtttttcacaaacattgttttaactattataaaaatctcacctttgccctacatgggctgatgctctttagctatagaaattttatacaactatgtctatgagcaagt

SEQ ID NO: 110205 - DNA, 531 bp, Cannabis sativa
ttcccctacctcattgtaacctccgaagcgcaatggtcgagcaactccttcatcctcggcctcagagggactatcaggacggacttcgccctgatcatctatttcttggacttcaacgtccccctcatcaccctcctccttggtagcaggtcgggcctgtttagcgctcggcattgtggcatgccaacctacgtgaggatcggtcacagaaatcttctgcatagtttgttttgtgtgggccatcatcctatctttagacggtggttagttggtatgctgcacaacagttacagtagaaatggcaattggaattccaaaggcacaagaacttggacggccaatagggatggtatcaactacgtcaggctgaacaatatatgtccagttggacgacaagtatcatctccaccccttcctgagttcccaaataaaatgcccgtaaccttcgcctgcgatctactaggaatagaagtggtgatgcacctcgggttctggggaagtgtaccctcactactcacttcccaatccttg

SEQ ID NO: 110206 - DNA, 540 bp, Cannabis sativa
aagctataactaattagtatatattttgagaaagtgtatttattggcgaggtatatctatattttgctggggaagttttatgcaaggagattttcttttattattttataagattgcatttcagttttggaataattgagttgggttcttgtggaagtttttttatttttttattatttttcaatccaataggaaacgatcgttacccactattgatgttttgttttaagattatgtattcaaatattgtgcattgttgattttatttgcctcctttaaaaatcacctgctttaacgacaaatcaaatatcttgccttttaaattcctaaaagttggatttttaacaccgacatcattggtccaattaagaattctcagaatcctagatgcaactcttttgcaaaaataatttatcattgccggacaacattcataaaacgatataaaataaacacctacaaacagccaaagctctatacgaaccatcataagactaaactccctttttttctttcttgtttttcatcttgataccatgt

SEQ ID NO: 110207 - DNA, 794 bp, Cannabis sativa
  modified_base (464)..(466): a, c, t, g, unknown or other
gcttaacttatgattaattactgcccaagcttgatttttttttaaaacttttggacatcaattgaaatatcatatttgctaatgtctgaaaagataagtgcatgtttgacttttaatttaaagtctcaagcactctagaacttgtttgataattatttgaggcgaaatcaataaattacacatagttttgagatatgatacaggtaacttttttttttggatcaattgagcatttcaagcctactttatttgttaattccctagttttatccaatttaagccaaatgttgacatcttgtttttcttataaccctatacactaacctttgagccaaaaaaaattcttattcatcatttttcacactatagatattgatcttttatgtatttgtaaatatgtgagagtttatgtaggggagaatattcatgattatgtgatgatgaagaaaataattactattccnnnagaataaatatttgtaagttgtaagtatttcattaaaaaaaaattaaaaaaatgatgagaaatacgtcgaaaaataaatgaatacttgcaacaagttaagtgtggagaaataagtaagttttatgaaaaaaaaaaaaaatacaagattgaatttttgagggaagtgattggggaatacaaataggaattattttgagagaatgttgtagatttatgttatagtgtgatttgagcccaaaattaactttcttgatctacgtttcaccctaaacttacgttataagcctataaagtcttattgatctttagattgtgtgtaattacatta

SEQ ID NO: 110208 - DNA, 1208 bp, Cannabis sativa
cgtggtgatgctcacagcacctgcaaacccagatggcggtggttttcccttttgtttctcattacaacctaagcggcagtggtggtttctcattcgtctccggtcttcttctcaaacgacggacaacctagcatcgttgtcgacgagctaaacgaaggtcactgctgcatgagattttactgagattcgatattaggcatttcaaaatatttgtatttttttgtttaaagatttagggattaaagttttattttgaatgtatgtaaatgcccttttttttattattcggagatttgttttactgcttaaatggggtatagattttgattcattattactatattttgtttcttagtttgtatgtattttttttttggtatttttgttatattgatttacattaactcttgatatataattagttaattatatgattaagtatattattattaaaatataattaattcaattattttaataaattttataatatataatctgaatttaaaaaattaatatttttttttttaaaaaaaaatagatatagtgacactcctaaagagtagttgattctgacaaagtctgactctaaacgtctatagtgacgcacggagagtgactgtaaaagtgttcagtgacacatatgaattgtcactaaaaattgtctttccaattaccttcattagtgacatgcggtgaagtgtcactaaatagttttagagttactcaatgtgggtcactaaaatctgtttttctagtagtggtggtatccaacttgttgtaaataggctccaacacgattgtccaagctatcaagctcactcatatggtcttcaaattccctctctatgtatgcttttactgctgcaaagaatggattatcgagtttgcttgtattctttttaaaggttgcttcaaggttgcttaataggtggtatacatagtagtcgcgagttacctctggaaatacatgaacagctgccttaattatgctctcatgtttgtctaagatcaagcactgttcttctctaaccccatatgtttcccttaattttataaaaaaccattgccatgagttgttattttctgaatccacaataggaaacgctagggaaaaatgtgtccatttgcatcttgtgtagaagctgagagcaatgtccctccatatgtttatttaaggatagttctgtttgaaattattttaccag

SEQ ID NO: 110209 - DNA, 866 bp, Cannabis sativa
  modified_base (469)..(490): a, c, t, g, unknown or other
  modified_base (768)..(771): a, c, t, g, unknown or other
ttctattgataacaaatcagattacattgaaataatttttatttagggcataaaatccgaacaaactcccacttgcacaaacataaaaaaaatagtgcatttcagtctatcaattgtcttgatatctagatcatgagtagtatatttgactaaacccaaattactgagactataagtctgtggtaagcaactgctttctccaccattacttcctttatgtgcttaaaacattaagcaacatcatattttatatgcattactcctctagggatactgaattctttactgcttataaagtgcatctgaataaacagaagacatgtctctaattctatcaaaaaatggaatagagataacacagtaagaactttcttcagttgaatgacttttcagtgcttttcgaaagaaacttagttatgtagcttaactgatggagcttaaattattatagatgggtttttacatcctnnnnnnnnnnnnnnnnnnnnnnagagtaaccaccatctcgaataggttatgaattggtgtagatataaggattctaatatacacccttatcttctaacatataggtcactttcagagattcttccttgattgtctcctaatgttccttgcttgattacatcttagatggctcccactcaacagtaggagtccggttaagttcgtacactagtgtacacttagcctcttactattggttctaagggacatcttgttgtgacatactgtcttagtgcgaaactataagttccttctagactnnnncatcaacatagcattctagtattaacattaatgtaaagtacttgcttaagattaagtaatcattagagataccataaaatatttcatgaggacta

SEQ ID NO: 110210 - DNA, 530 bp, Cannabis sativa
ccacttttccatctaagctatcaacgatgtcatctttacaaagtcggaataaatagtggcagtagtgataaatatcaaagcaacgattacgtgctttcgacgataaatattactgatctggtgtagttggtggttttgcggtggtgtggtgatggtggtcgacggaggttgtggactttgtggtgttgtggtggttgcggtgtatcctccggtgactttaacctctgtcggtttgcgacagttattttatttttaattattatttatttatttttattttttaaatatttttttttcagtttttgttgcttaattttaacaagaaagttagtaatattaatatttattattttatttaatttttgagcaattattttgttttattatattatttcattacttgttttttgatggaataatgcagtaatctttgcattttttgaatactttttatatttttatgagataagtattggtagttattaaggtatatatattattttggatagtatttcttatttcttattgat

SEQ ID NO: 110211 - DNA, 1264 bp, Cannabis sativa
ggttttcagcattcttttttttttgatgaataaggaaatcttgtattgctcaaactaccaattacatctcaagtttttgtacataatctgctatttacggctataaatcaaaaactttttacaaattacaaattcaacacccaattcttgtccttctcctttgttttgcttggccaaacccctacaattctcctcttgctttcttgctgtacccgattcacaattatcctaatttgccattgtttttgattccacaacacatcataacgtgcaccccagatcttgtataccaaggcagccaacatagttaacatcatgctcctccttgttgctgaaattcccttaaacttgctgatgagttgcagcagcttgtgtacttcaattgctttcgtaccccagttcagtctaatcttccattcggcaagacatttgctactgtattcacattgaaaaagtaagtgctggaccgattcatctgccttcccacaaagtaaacaggttggatctacctgtgtatcatacttacatactctatcctttgtcttcaacctatccaacaagacatgccataagataaacttgtgtttgggaataacaagtctatcccacacatgtttgcaccagtccttcttgtccggcctgataaacaacaagtgatatgtatttgatatactgaatttctgcatgctaaaggtttgccgatccaccttagccttcacctagtttttcactccaactaattttttccaaaaccagctacaatcggtgggggcttcataatcccaccaacacctatcttttaagtatacattatgaatccatctgtcaaataagcaatctttcttgctagctatatcccatacataccttctcatagctgctgtgttccacttctgaagatctctaaggccaagtccaccagcacttttgggggtacaaacatgctcccaagccaccaaaccaggacccatcatcatttgggttcccttccataagtatgatctacatattgcctcaatatctttgagcaatttctttggtaatatcataatctgagcccagtatgtatgaatagctataaggacagcatttatcaaggtaactcttcccatatatgacaagttgcgggaactccaccctctgattttacttaccatcttctcaagcaagatttgacattcagaatgagaaattttctttgaacagataggtatgccgaggtacctgaatggaagggaacttcggttgaattgtgaggcatcta

SEQ ID NO: 110212 - DNA, 543 bp, Cannabis sativa
gaatggggaacatttaagaaagtaatatcagtaaaagtaccaggtcggatgaccactctaagtacaaaattaaagaacatttactctaagtaaatggccttctgggcggacccctcccaaaggttcggatgaaatgattaagtactcaggttggagggccacctttgaaagtacaatttcttttaagtgaaatttgtttgtttaaatttagctaaatatcatattagatcaatataatagcttttatgtaagttactacggtaacaaaaatattccgaccaatgaatgaataaagatgtctatttaaattctgattatgtcaattatattagcaagttataaatttaccattaaatgcgtacaaaggtctgctcgaatccaaagaaccaaacaaacaaaaaaaccacacttgtgaaatacaagtgaccaagagtcaaaagtttgctcggtcacttggggccacctatactcgtacaaagcattggtaaaagtaacaagctcaaaaaaaaaaaaagcacagttgctgttggattttatgcccta

SEQ ID NO: 110213 - DNA, 1074 bp, Cannabis sativa
cacctcaccagaaggggctgtcacctagaataatccaccaacagacttggagcattggcatttcagtgccaatttcttgttcttctctaggatatcaaagatcctttaacccactggattgttccacttagtcacactttctctttgcttttggattctatccatcaaccaatatcgaacatactctaataatgtgatgattgacttgtctctaccatctaagattgctgaattgaaactctcacacaaattcttcaacaacatatcacactgaacagaagtcctaaagtgggatttggtccattctattggtgattttttggatagccaatcaaatgttttttcattagtccattttaacacatccaactttctcttgaattcctccacagtagttgccctagcaaaagcccataattgttgcttcaacaataatcctggaaagtccttcttgaagttggcataaagatgcctaacacaaaatcgaacctcagatccttcatacactgtccccacagccttttccaaccccttttgtctatctaaaataaaagtgagttctgcagtctcctccatatctaagtcctccttcagtagttcaacaaaccatgtccaactatcagtgttttctttttcagttacagcaaaagcaataggaaacatgttgttatttgcatcaattccaattgctacaagcagcatacctctgtaatagcctttcaataaacacccatctagcccaattattggtctgcaaaacttgaagccagctttataagatgcaaggcagatgtaaaccctttcaaaaacccttttgtcatctactaaatttgatttgatcaaagttatactttcaggattaagtctcactagttgtgtacaataatcatcaaggattgcatagtgatctctcacaattccttgtaccttggccatagctttattcttagctctataaaaattctaaggggagactttggaatacttactatctgtatttgcctttttgaaatcacctaatgacatgctcggattcaatctgaacaggtttaagaattcctttgcaatccagtc

SEQ ID NO: 110214 - DNA, 655 bp, Cannabis sativa
atgaagaaagaggaaaagaatgtgttagtgagggagaacagcaacataaactgcctataaaggtagatagcagaaatgatggagttgataaaaaggaatctaaattgagcaagtcctcttggcataatagtggcaactttgacaaacatgggaatgacaatagtatctaatgaggaagcaaaggtagtggaggagggaatgagaaggaagtgaaaaataaaagcagggaattaaaaatttgaattttaacataaactatgataaaagtcagaagaagtctagggttccaaaaaaagattacaataaagattcttacatggatattatgggcagtggggatagagagaaacgaagatccggatttaattttttacaagtaaaaagagaagcagtggacagaagctttattgggagtatttggaggtctcgtttcaaagcgttgattcttatcccagctatagggagctcgggtggtactttgatagtgtgggacactagaagcatcacgattttagactcgatggtagttgattttacgatttcaactttgattcaactttgattctagtactaaaagtatgagaatgtttgatgagttagttcaagagttgaggcttatggatccaaaagaaatcaacgaaaggtttacttggtc

SEQ ID NO: 110215 - DNA, 2577 bp, Cannabis sativa
tgggagagaggatcttctctcctagtgtacatcttacacgttggcattttgaacttgtgaggcagtggcaggagattgatctttggtgagaagggaaatgcgacaattgtgtgatgagttaggaattaaaaaggcatttttagcatactatcaaaggaaaactcaaagagcgtaagggggtatggccagaagaactttcgtaagttttatggtcacatagcacgacccccgatccacgactggtgaaactcctttctcgctctcttattgatgcgaagctatggtaccagtcgagtttggggcaggttccctacgaagagatgttttcaacattatccagaacgaagaaaaacaattgctccaccttgaccttttagaagaaaagcgcgacgaggctcacttgaaaaatgcggtttatcagcagcgaactgcgcaatattttaacactaaggtcaaggagagaattatgcgagtaggggatttggttcttcgaaaagtcatgccaaacacgaaaaacccagcgcatggggttttcggagacaattgggaaggaccatacctcatcgatgaaaagattggtaacgcaacatatcgacttgcagaactcgatggcactgcaatccaaagatcctggaatggcgaaagcttgaaattttatcatcaatagtactcgcagtatatcatatgtactcgttatgtatttatacttagtcaatttatatataaatgttctaagtatagggggtatatagctcactttgtactattgattaacttgttccttatgaaagttatatttttctcaagttttaaaaaattcatttttaccttagcgtttcatttttaccttagcatttttacaccaagctgtaaataataccgcaatcaaaatagcaaaagacacgagtacccgtgtactgcgaatatgataacataaataaaaatccccgaagggatatatgttgttcgaaatattaaaaaccataaagagaaatttgtctaagtataaatcgcgagtacccacgtaccgcttaaaaagtttggcaaaatattcataaagtaagcaaactaagcattgggagagataggggcagttggagtagtggattcatctgcaactttgctggcagcctcatcagcaacctcttcagtattcgcagcatcagcgtcctcgggaaaaagatttcccccacctccttgggtctgtgtaggtgacatagctcgaaaagcctcagccatctcagccgcctctgccccgaggatcgagaagtcgaagtctaaaatcttggaaagagttgtatatatgtagttagagaccgcttggtcatactgcttctttccattctccttctcggcctccaagtcgcgagacatctcctcaatctttgccttagagttcttggcttcaagttcgacttgtttacgaaattcctcgagctctttgtccttgttagtcacttcctgctttagcttcttgacgttctcctgaagctggacattctgcttctttaaaagctcgacttctttggaaccagcaacgaaggccttcgaaaacatagtcataaactgcgaagccaactctgcggagcgaggcataagttccttagagggattcctctcaatctttgacatgaactccttgcccacaaacttctcctgaagaactagaaaatcgtgagctcgaacagctagatcgatcacgactttcttccccttgtcttgtgagggcctccccggcttctttgacgtatcagcagctggagtaatcacgatgtcacttttcattttctgaggaacgacaggagacattgtcgctgttccggtcttcggcttgcgattgagaacaggagcttgcttcaagaaagtcatttctacgaagacaagaaaatataagttaaaatataaacaatgactcatatatatacaccgcatatatgcgatgtgttacctgatgttggtcgagaggtctgtttagaaagacgtttgtctatcttctctttttgcttctcaaacgactccttgtatactggctcccgatgaaggctggcgttctctagaattaacttgtgttccctcagcttcaaggtcgtgcacagcaatcgccagtcgcgatgttgaacagggaggcagccgagaacctcagcgacttccttgctagtcgagtccaatgcgggtcgagccggtctatctgcaaacaataaggaagagcgtgttagatcatatcacaaggtaacgtgaaaattaactaagtgttaaagtgtgcgacgtactaggtcgacgattaaaatcggtcctaattcatggtactttaaacacgtaaaaccacttagattttcaatcccccatattggaaaccatgccttccaccccgttgatttcagaagtagcccatttactaaagcaatagaagtcattgtgaaggcccacgatctttatgtcataaaagtagctacagtgctccatcgaaggctccttatgtgtgtattccatgtacatcgcataaaacccgagggctatgcgataactgtttggggttaattgaaagggggatatatcatatcgcttaagaatagcagc

SEQ ID NO: 110216 - DNA, 509 bp, Cannabis sativa
  modified_base (264)..(283): a, c, t, g, unknown or other
ttataaatttaagccaataacatattattattggaatgtctaccaaagtatcattttcaaagggtcaagcacaaaatttcttatattttaatattattagaataatttacgatgtaaatacttaaatttaactctgagttgcatataattacttaattttaattttttatggtaatattagccaagttatattagaaatcgtaggtatctaacccttaagtgtcaagtcattatctacatgtcattttcttattagtatatttnnnnnnnnnnnnnnnnnnnnaataaaaatttaatgacctagaccaatcagaaattgccagtgtggccaacacttcatgacccgatacttacggaagttctaaaaatataatttatatattattaccgtcaaaaattaaatttaaatatatatttacaatcagaattaaacttaagtatttatgtcgaaattaaattactcatattattatataactattaagaaaataaaggaaatatactcattt

SEQ ID NO: 110217 - DNA, 584 bp, Cannabis sativa
gtcatagatggctttcgggctaaataatagtagtgctcgaaaatagagggcctataggccaaagcaagaacatgaatgccttgaggtcagatatgagattggttcgcatgcataaggccaaggccctgctagaacagtatagctagaaaagacctggacagagctcctatggggccacgtatcgggctacggctagggtagagttccttacaagatccaagccatgttgagtcttaagttgaacatttggctataatagactcaccattaagcctcatacaaagtttataaggaaaccacgtatgaggctaaggctgtatatgcctacaaagccaaactcttaccgaagtcacaagacgacagaaaactggctatcgactgggaaccaaggcccatgccaaggttcttaagctatgaaaggctcggtcatggtcccatgacttaggcaaaaactggccagggtcattaaacccaggcatgaacaggaaagctttatagagcaaaaccctaaagctggcctactcccatgattaagccttagggccagtcaggtcttaagcaagacctcctaggccagccaaggt

SEQ ID NO: 110218 - DNA, 551 bp, Cannabis sativa
  modified_base (55)..(55): a, c, t, g, unknown or other
  modified_base (509)..(521): a, c, t, g, unknown or other
tctgttaagccttgtaaataggtgtatgggcgcctagatacaagttggtattatntgttatgttatatgcttttcttaccaaaactgtcgactcacagttctacttccatgtgtaggaaaggaaaggcgaaagctgaacaggagtgagcctggctgagatgaggttgtacatgtcgtggcagcacgacctagagtgttcggtgtcgggacatctagggatactattttgtagtcgttgtgcgaccggttatgtattttggtatattttgtataaaagtttaaaaacgggatcccggtacttgtaattagttttgtaaatcataaagtttggtatttaatataaaagttttaatttgacacgttttttgagagaattctttgattagcaaagatagcactgtagcgtgccttagcattagggcgctacatttgtcctcactcgccacttcatgggaaaacttcctaggaggttacctatcctaaattaccccaagtcaagcacgcttaannnnnnnnnnnnntcgtgatgggctaccgaaaaataagatgca

SEQ ID NO: 110219 - DNA, 667 bp, Cannabis sativa
gtacatgtcaaaattcaggagacaaaaatcctaattagccttaaaataaactactcaaaacaaatttatttactctctcattttgttcctcttttgttctatctttctcctattcctttctctattttcaatattatttaataacaaaaattatattttaagcctattacgataactcaaactcaagtgactcgtactgactcggtccaagaactcggtgtaggccttaggtttctctcccgggaaaattcacaaggaaaacattctcaattcccaattacattttactttttccattaacaatcccgatcgtgattccaatgcttcatcgaaattaggtacctttcatttctctgcgcctttgttgtttcttgtgttgctcttcagtaaattcttcgcttagaattttgattaggattggtgtacaagaattgaaaatttggcatggcggacgcgtactggaatcgacagcaaccgatgatgcacccatctgggggtgtgcttaaacgacctcgtatggattacggtactaatctaaatctccctttttctcaggccatttagttttgttttgatccgtttttgattaaaagaataatttttattggacatccttagaaattaatctgatctatttcttgactctttttcgcttaatgtcattgtg

SEQ ID NO: 110220 - DNA, 818 bp, Cannabis sativa
  modified_base (288)..(292): a, c, t, g, unknown or other
aagcgatttgttataacctctcactattgattccatgtgaatcatgcatgccaaaatatagtgttcactttgtgtccacttttctggttaagtacttaagctttgaaaattaaaccataaaagattaattttcacgcaactcaaattctcaatattttgataccaagcatatcaaaaatacactaatttatacactaaacatgtctaaattctcatattttaattttaaataccaagtatgtctaaattttctcatattggagtatacacccccacactttcacattnnnnnatcaagacaatatcttgattttaaaatatagaagactattttgtctctataatatttcttaaatttaatttctttgttaaaattattttcaccaaaatttgacaccaaatatgtcaagattttcacatatgcacatagccatacttgatttagaatttaaaatcatcaaataaattaatcaacaatgtctcaacacattttgattaaatttgtggctcacccccacatttttagcataaagtgtatataaaatatcacttttgtgtgtatttctcttgaaatgactctttaaaatcactttgaaaataccatttgatatttttagttttctcaacaaaactaaaaattcaaactcacatcaccacttacaaaataatatgattatttttactcattattttaaagttatctcctcaatgagattaacccaaatattacactaaagttaacaaaattctcttcaattttgtttaccacattgattatttaagattcaaaactatttctccaattttattatcttttc

SEQ ID NO: 110221 - DNA, 736 bp, Cannabis sativa
cccttcaatgattgaattgtcataaccaaaaaactcctttccccacccatattcattgtatcgaccactattaacatctatttcctaatggaaacaactttcctaggaggaccacccaacaaatagtacttaacagaatataacacaaccaacttgactgcaagatcattattattcttaagattgttagcaataaaagcaatttgaatagaaatcttgataatttttttgtggccctttaaacactgtttaacaagcatattatcatcttgcttgtacttgaaaatgcgagaatcaatatgacaatccaaaccgataattaacaaaaactcctcaacactaaacctcaaatattttcctttcaaagaaatcctaaattccaactcatttgggtgttgaacctccctcaacaacaaaccatatatgagttggaaatagatactatactctggcatacgaagaaaatggccaaacacaatttttgaaaatatttttaattgggttagtaagaatagttttaatatcattaataacagaataataactaaaggttataactctggaatggtagtattccgatcgggtgtacttgtattcccaatcctataaaaaaaatagaagaaaaaactactaaaaaaaattaaaataacacaaaaaaataaagaataacaaaatcaagcataaaaaaatattagaagaaaaataatgaaatcacacacctcaacaactcttttcc

SEQ ID NO: 110222 - DNA, 705 bp, Cannabis sativa
  modified_base (458)..(469): a, c, t, g, unknown or other
agcatgaaaaattgaagaaaaatgaaaaaattgcaagttgtacgaatggtatgctttgcataccatccgcgtgtgctgagcggaggacacgaccaagaaaactcggccagggaggctgcacgcagccttgtctgggcacagtgcctgtcattcagacaaaactgaggcacctgaccgagaaaattcggacagatgcataactgaagcgcgcgtgaccgagtaaacactcggatccgtgcgcgtatggggtgtctccacccctatcttttttcaaaactttaaaaaatcataattaattcaaataaaatcgaaattaagttctctaaaaaaaggaattacttaattttttccaaactatccaacaaaataattccagaatgaaaattcaattatttttcgtaaaaaattcataaacatcaatcaatcatcaaagaacacacagatcaacatgaaaccannnnnnnnnnnnacaaatcgttttaagtccaaattaataagttatatgtttgtataaatatgatatcacctatttaaaataaattttattctttactttgttttctttcttctcttattttttttctcttatttttatattattttatagtaaattattaattatgaaaaatcgtgtttttgcaaatgtcaattatataaacgaaaatataaaaactgtatgcgtctgcagaagcataaagtaattct

SEQ ID NO: 110223 - DNA, 1355 bp, Cannabis sativa
agaatttacaaacattggtaggtattggtaccaaggatcttctactgactgatcttctacagttggagagtctgaagaaattaggaatttatgtggatggaaattttgacagattcttacacaatccccaaactctcacattcactcgtcttcagtctttacaaatacgcaatacatttgagaagatagatattgttcctttgatattaagctgtcctcacatttataagcttagtgtggtctcgtctattgtaagattaccagaagtcaaccaattctccccaaacctcatcaagttaacgttgtttgatctcagacttgaggatgatccaatgccaacattagaaaagctaccaaaattaagagtccttagaattagttttaatagttttacaggggatgagatggtgtgctcaagaggaggtttccctcgacttgaatctcttgagctttatgggttacttagcttgaaagagtggaaagtggaggagagtgcattgcctacacttgcctatttgggtataacactgtgcatgagattgaggagagttccagatggagtaagaaacattgttacactcaatgagataacgataaagcgtatgcctaagaaattcaaagaaaggatggaggaaggaggagaagatttccacaaagtcaaccacgtgccatcacgtgtattcatcgattgtgatgaaggtaatatctatcttttgttgttaactccattctttttctttttctatcattattatctttacttaaattctcaaattaacatgttattttcttttatgtttttgtaaagaattgaaaaacctattgttattttttttgtaaaatctattagtagggactaattgaattatggaagaggtttcaatggtttcattaaatatgaaaccattatgattacattttttttaagctattagattactattgaatgattgtgattaatttagaaattaaataaaaataaataataattaacttataacatatagttacctaataatttatttccttataagactttaatgaagattaattatatattaaaattaaatttttgaatttattttcaaataaggatctgaaacaatgaaaatcaagcgtaaaaccgctctaaaatacaccaataaacgagaaaatgcttacttttcagacccgaaacataggctaaatatagcctaacattaagcaattaaaatattcttagttatattattaactagggaatagatttgcacttcgcgcggttttaataatttttttttaaaaattttacattaaaaaaattaatttttagttacgaataaaatctcaattcagtctaatactattttatattt

SEQ ID NO: 110224 - DNA, 951 bp, Cannabis sativa
ggacgtgagcgcggccatgaccgcagtaagttcttatctgtttagaggtattttcagacttcttttctttttggtgcctgacgtcatgtaaaccttatatatatatttttttgttgtcagattgctgccgagactagtcatctttcgaagactcttatcgaccatgggtacaccatgcccgagtttgggggcatgtaggaggccatgaagagtcttcgggacttggaggtacagaaaagagctatccgtgaggaagcccagcagaaagcggcccttacggagcggagccactgagggctaaggatgaggcgttaaaggccaaggatgaggggttgaaggccagggatgcggtcatggccatagcgaggcaggaactccgagattctaaggaggcagtgcaagaattgaccgcaaagttgaagtctctggaagagctgcaccaagcggatttgcaagctgttgaagtgaaggggcttcgtgaattcaaacagcaggctcagaaggaggcggccaaggcaaagagagatgccctcctggcccgagtcacctaccaacactacaagaagcactttgacgatggagtctttatggcctggcaatccaatggtcagaatcttacctcagcttttatcccaagcctgaagaggtccttgttcgcttccgggagaagaagaaaaggctagatgcggcgttggaggagcgcaggggtcctcgtcttcctccttgggctgattaaattgtttgtttatctcctttgttattgccattatcatcatcattttttttgttactcctgtcttcccctcacttttcagacaatttctttctttttcttaaggggagacttttatggcctgtccccaggccttttctttctaaagttttttctttgttcaaacaatctacattacgttcgaatatatttagtttttaagttccttacatttgatc

SEQ ID NO: 110225 - DNA, 604 bp, Cannabis sativa
actaactctggatcttgcaactgtacttctttgatttgctccaaaagagtagattacagggtaatatttagccaatttccctataattaactcaattttagctcaagtcatttcatttgctaactactgggagatttgcttcactgtatttatctgaccctggccttttctactcaaggcatcaacaacaaagttggccttaccagggtgaaaaaggatctcataatcataatcctttaccaactctagccagcgtcttagtctcatattcaagtctctcttggtgaagaagtattttagacttttgtgatcagtgtatatctcacatttctcgccatataagtaattgtcgccgaatctttagcgtaaatactactactgcgaactctaaatcgtgagtagggtacctctgctcatactcctttaactgtctagaagtataggctattacttttccagctttcataagaacacagcccataccatgtctcgaggcatcacaatagacaacaaacttttccttatctgaaggaagagttaatactggagcggtaatcaagcactgctaagggtcagctcagtccaaacaaacgtcaagttcttt

SEQ ID NO: 110226 - DNA, 585 bp, Cannabis sativa
ttttacatgtatagaaatttattctttctgttaggtttcgtcctattattctgtttaaatactgacgtgtctttataaattaacaattttttttccctaaattttgacaattattaaactgtaccctcaaaataaaaatgagaaagattcaacattttttgtgtaaatttaaaaaaattaatttagatcttaagaaaaagttattttaaatgattaaaaaattaaaattttaaaactaattaagcgatttaaaaaattattattttttattcaaaaattcatttagatattacaaatataattttgtaaaaactaaatttgggaacaaatttgagtctgttttgtttatctaaaaaaaaaataaatttgtttaagtaaacataacaattttttagtttaatttctaactttttttttttcaaaataatcttctatctttattgaatatttaattatttttctttatttgttaaaatatgagttcataaatatagataagtttgatgtttactttagaaaatcttaatttatttaaattatttattagattctcaataattttagtttaattttttaagatacgtg

SEQ ID NO: 110227 - DNA, 637 bp, Cannabis sativa
atatatatatatataaaaactaatataaatttttacttcttttcacagtttggggaaaaggagacaaacaatccaaaaattaaattattactattacagcgacaatggatagaacgattgatggcagtcattcacgcaggcttggacgattgaatgctgaaatgtataagaatttttttctccgtagctcatttttttaggttaacttgtaattagatttattaacttgttaacacttggactaattttaaagtctttgtgtaatataattgtaatttttataattgcttctataatattggctagttatttaatatataatttagctttcaaaaaaataaatattacaatattaaataatatttattataaattagtaaatatataattaaataaattaaatttttgaaataataatacattttaaactgaaaaaataattattaaagatttgacatcgattattagtacatatggcgtcggttattagcagcagacttgtagtagttaaagttttaacttgtgttaatggaactttaatcatcgatacttcttgtgtttactattgccatcattatgagcagacttgggtagcgaatgacaagtgtaaaaaaacaggttgaggaatcttggggaa

SEQ ID NO: 110228 - DNA, 566 bp, Cannabis sativa
ttagggttgatgcagattaatccccaacctcaaaaattggcggtaatagtccccaagataacattttctgtaagtccgttggtccctaacataactgatccattaaagataaataaaatgccatgtgtcaatttttaattggtctaaataataatttaactaaaaaaaataaaaactaaaaaaatatattttaaaattataatttttttattatattttatttgttcttttctttttttttttcttttttgttttttttttcttttttcttcttattcttcttcgtcttcttcctctagctagccacacctaaccccctccccaccgcatctttttcttctagccacacttagacccccacccccgtctattgcaccggagcaccaccattgttttgaccaaaaaaaaaaaaaaagaaaaatcaaacatatataaactaatatgtatatgtatacacatatgagaacaaaaaagggagggaaccagtcagatctaaagagagatatacttaaaaatggagctccttcgcaatcatctattgcccatatctccagccctcgatgaac

SEQ ID NO: 110229 - DNA, 699 bp, Cannabis sativa
ttaatacaaggtttgcttctaaggcatatattggtttgtgtgttaatgtgattgtaaattgttgtttatgagggacgtgtttagaagtgttatgattgaaataaataattgttaaaaagtatgattcatacttagtaatttaatcttaggttttatatataacttaagaaaataatttttaaagaatattgttaatcaaaccgtaaaatactatctattgagtactactaatacctaataaaaatagactttgaaatattacatctacagaattttggtcaaacccaactaattagtgtgtgtagaatttgaatttagtataaaaatgtcttaagatagaagtgaggatatataagttataagtatgtataatataacatgatatatatataagttattactatatatatatacgtaatagagagagcagagacagatattaggattagtgatcaacaccatgaaaagagctccgacaacttgtttctctcttcttcttcttcttcttcttcttatttttctgatttcattgaagattacatgctcaccaagaacacaagcagaagctctgctaagatggaagaacagcttggtggttaagccaacttctctggattcatgggacaacaacaacatcattaatctatgcaattggactaatgttgtatgtgatggttccaatggagaaatctcacaaat

SEQ ID NO: 110230 - DNA, 802 bp, Cannabis sativa
ttatccctctctcacctgacccctctccctctctctagctctctttcatttctcttgaaatttgttggtgatattgcttgagattggattaaagtgaagcttggttttggggaaatctttgtttttgcctttggtatgattttaaggtagtttcttcaactttgatcactttaattcaagctgaattatgttggaaaaatatggattaagtgatgttattcttgagcttgcatgttttgtgaattggggttgattttgatgattttaagtgtgatattgctaaatgttgtacggattatgttgttatttgttaagatgagttttcaaggtatttttctagtggaaaatataatttaattggtgtttttgttgctggaagaatatttgaattagttggaattaagctcaagtttaaagagcttgaattttactagtttggaacctgattttttatgcttttgggaatctaaattttgattttaatatgggattttgatgcatgaaatatgtgtttttgaccctctattatatgctagcagctctattttgtgattctgagagatatgtatgtttggggtgagtttgggtgagttttgatacttattttggaagcagaaaactgggtagttttctgggtttttaaacccagtggtcgcgactatcatagctctggtcgcgaccatgataatggctgtttatttatttttttgagtttttatttttgccataacttttgactcgggactcaggttgggacattttcataccgttggaaagctcttttcgagctctatgtgattat

SEQ ID NO: 110231 - DNA, 1446 bp, Cannabis sativa
agaacctaatttacgatcagttgtaaatcaatattacatataagaattacatataagatttttgacctttaatgctttacctatcctcaaaccagtgatcaaggcttcatactccgcctcgttgtttgatagatcaaattggaatgtcaagggataatgaaacttaaagccttttggaaaaattaatatcacccctacacctgagccctgctcgttcgatgcgccatccacggataatctctaagtatccgcgtctcactgaataagcgaattttcctctggagttattccttctatcaggaaatcttccaaggcttggcctttgatggatgtttgtgtgtgataagttatgtcaaactgccccagttcaattgactattttatcaatcgtccagaagcatctagttttgataaaatttgtctcagaggttgagcagttaacacctaaattggatgggcctggaagtaaggtcgtagcttgcgagatgcgtggattaggcataaagcaagtttttcaagagggggatacctcgattctagccccagtaacctcttactaacatagtaagcaggttgctagtgctttccctcttctcgcactaatcgcattctatgagatagccaaatagaggagtaatttctctcaagatacttgtttcgccaaaactggaggtgtcgaaaagtcccttttaatgctcctaaaggcctcctcacattcctgtatccattcgaattttttgttgcctcgcaatatgttgaaaaatggcagacacctatcagttgacttcaaaatgaacctgttaagtgtagctatccttcatgtcaaggcctgaacttcctttggtttggttggtgatggcatatctatcaaatccttgattttcttagggttttcttcaatgcccctcgcgttgactataaatcccagaaactttcttgaggaaactccgaaggaacactttgttggttaagctttatattgtacttccttaatatttcgaagcactctgcgaggtctattgtatgacttctactctttaccgacttgaccaacatatcgtcgacatagacttccatgttctgtctaatttgtttcgcgaacatttcattcacaagtcattgatatgttactccaacatttttcaacccaaatggcatgactttatagtaataaagtcccatgttggttacaaagcttgtatgttcctaatctgggacgtgcatttttatctggttatgtccagagtatgcatccatgaacgaaataagctcgtgtccagcagttgcatccatcaactggtgaatccttggtattggaaagcaatcctttggacacaacttattcagattagaaaagtcaatacaagttctccaagttccattttgctttgggacaagaacaggattggatatccacgtgggataaaaagcctcgcgtataaagtc

SEQ ID NO: 110232 - DNA, 514 bp, Cannabis sativa
ataacagttccacacccaaccaggacattcataacacgactgtttcgcctggaaccaacacccagacaaccatcggagatgccactgaattgcaaaatctccgtgatgctctcgggctcatgcagggtcataacaataccatacatcatgatcaagacgaagtgcgcgctgcagtaaatctcgcgttcgacgaacaaaggcgtatgttcgccgaatggagagatggaggcattaagggctcaccatgcagagatcgaagatcgtagtcggtaagctaccgtgctgatacaaaaaagcctaccaaactgtaggtcaacaaccgccgaacgtcattcccctaggtgagacacacgaagatccagcgatgaatgcttcttagacaccaaatggtcagccgcccaatcccctgtcaagagttccactcgtgggccaagcggtaggcgggaagaccttgtcaagtaattcattgggagaagtcatacctgatggttccaaccagataaatggtgccatt

SEQ ID NO: 110233 - DNA, 634 bp, Cannabis sativa
  modified_base (581)..(600): a, c, t, g, unknown or other
cttgtatatgcttacttagggcaacttaagcttagagttagattagtagtggtggtccaagctagaataattactcagaaatattttgtataaatttaagtgttggactttaaatttagattccaaatataaatttttatttcaatttccaaaatacattggacaatacagtatgactttcacaagttattattatccattttctgtcaatggatctaatatgtatgtttatgtatggaatatgtgttttgtattctatgaccaggatccacttggactattctaagaactctttagtgtaactagacctaagttatcaaaagtccacaaccatattctttaagatatctatggcatttgcatcttgttcataatgattttgacaagatcattctctacaaagagtcaatatgcctatatcctcttgaaagtaggagcatttgtatttgacatatggatgtacattcaggggtggctatgagttgatattcttaatacgatcactctagattgaaatgtataagaaatttcataaatttctagcaatggtgaaaaataattaaggtaagtggttaaagatnnnnnnnnnnnnnnnnnnnngagaaatatttggtggatatgcagttcaaagatc

SEQ ID NO: 110234 - DNA, 786 bp, Cannabis sativa
  modified_base (641)..(641): a, c, t, g, unknown or other
gactttgaagaaatattttctcctattgtgaaaatatcctctattagagttgttattggtttagttgctcgcttgaatttagaagtagaacaacttgatgttaaaactgtattttttaatggtgagttagaagaagaaatttacatggagcagccagagggtttcgaattcaagggaaaagagaatcttgtgtgcaagcttagaaaaagattatatggactcaaacaggcacctagacagttgtacaagaagtttgattccttcatgtcgagccatggatataccagaactacttctgatcatgtatgattacaaagaagttttctgatgatgatttcattattctcttattgtatgttgatgatatgttaattgttggccatgatgtcagaaagattgaaaagctaataggatacttgagaaagtcttttgctatgaaagacttaggatcggcaaaacaaatacttggaataagaatttcccgtgacatgaagaatgtaaaactttggttatctcaagaagcttatgttgaaaaagttcttgaaagatttaacatgagtaaagctaaattagttaattatccacttgtaggccatttcaagttaagctccaaacaatgtcctacaagtgagaaggataancaagaaatggcttcaataccttactcatctacagttggtagtttgatgcatgctatggtttgtacgaggccaaatattgctcatgcagttagagctgttaggcgattcctctctaatcctggtaaggatcactgtgaagcaatga

SEQ ID NO: 110235 - DNA, 680 bp, Cannabis sativa
  modified_base (40)..(43): a, c, t, g, unknown or other
agggtgttaaacaacatacatgtgagtagatctaagatcnnnntaaaataaattccaacagttatacattatgttttacctgaaaggtacccttgggtactgctaacttgaatgtatatgtagctttgtcaggttgctcacctcccgttatttcttccattcaggtagtaccgggcgttgaataggggaggtgatagttgcataggtccctcacttactttgcagttatggccagaatgatacagactcttcgtagggcgcctccacatgaccttcacatggctagggtgcctaaggggtcgagttaggatggtagaagagaccgctcagccccctgctgatgttgacttagagattgaccaagggttgagagttttgatgcagaatctgatctagaagtggttgctctagtgaggaggaggaggtgtaggttttgttctgtcctcccagattttatcccttaggtcactatgacactaatggtaggccactgaacaggctcggtgagccttcagagcttacactggatcatgtcctagaggatagggctgcacatgggctgggttggagatgttttaatgggccaacccaataactgcggtttggaaaaactatgaactattcacttttttttaattgtacaacccaaccctacttactataacgatataagggttggg

SEQ ID NO: 110236 - DNA, 901 bp, Cannabis sativa
ttgctgctatggacatggagagtgaatttgatttggaaggcttgaggaagagcagacctggggacgaggttgattataataatttagtggaaattccaataagttatgatgttgggattgagaggttaagcaaggaagacgaaccattaaagaggagaaaagtgactccaagaagaacaaagatcaaagggaaaggggttcagacagagaattctacagtgcagatggccatgaatggagggggtactctttcaaggggaatttctaaggaattggatttgacccttgacgacaatttgaaagcggcgaacctaggtaatctaggtcgccgagccccatgatggccatgttttggaatgtccaaggtcttgggaacccttggacattgaatactcttaagtcccatgtcaaagattatcatcccgggatgatttttttgtatgaaactcggttaaatagcaatggtatggagtcggttcgggtgcaattgggcttcgctggttgttttacggtggatgctagaggtaaaagcgggggtttggcgcttctttggactaatgatttcatggttcaaatcaagtcttttacggtctctcacatagacgctttggtagagaacgatatggggtttgtttggcgctttacgggattttatggaagcccggatccaggtgggagagtggagtgttggaagttgctatatcggctaaagaatatgtttaataatgcttggatttgtggaggcgatttcaatgaaatagtaagtataaaggaaaagaagggagggggtccgaaacccgattatcttatgaaaaattttagaaaagctatatcggattgtcatttacgggaaattgcctctaatgggaatgcatttacttggtgtaatgggaggacatcc

SEQ ID NO: 110237 - DNA, 1432 bp, Cannabis sativa
caatatggttgcgcatagtttagctaagtttgctttaggggtagatgagacttgctcttggttgagggatctacctccacctttttactctgttattgtaaatgacattccatcttaatttatgataacaagtatcttttcctcaaaaaaaaaaaaactagtagcatgtaaatgatttcaaaagtaaaaaaaaaaagctagtagcttgtaacgaacacattatcacttacggagagaaatgaacgactcacaccaacaccaggtaaataacggagtgtacttgctacttattacacaaagattaaaaattatgaatattaagattcctataccaaaaatttttaggtagttcatctaatctaatctaatccgcattattttgctcgtagtacatccgatccgcactaagtgcagatttcatattttggatccaatctaatccgcacaataccataaatccaatccaatccgtaaaagtgtgattggatttgttattttggattagttactttttaatattaatttatttaatatttatgaaaaaaaaaatatatatatattttcacataacagcaaaataaaataaattattgttattttatggctcaaccaacaaattaaaataaataaaataataaatttagaagaaaaaaaattgtaagtataaaaaaatattttattttgtttgtatgtaaaaaaaattatatatatgaataaaatatacatttaatctattaagttttgaaatatacttgtattatatgtattagattttttaattattattttttaattaaaattttaaatatatatattattttttaaaaaaaaatttataaatatgtgtggattaaatttgatcagttacttttacatgtaaatcaatatagaatcttcgtgattgcgtattttgaattttttaatctaatacaattctcacaagtgcgaatatgcgcacaaatgcaaaaatatccacacttaacgaattggattagatcacagaattaaattgaatatttaattaaaaatattcattcataatttgaaaaagtgagaccgagagtcaccaataaataaaatttaataattatttctataataatattcgtaaaatttgaagtgaacatagtctttggcttcgcgtgagaaaatctaagatcaatggataaacaatcacaacaaaagaagcaaaacacctcaaagaagaaaaaaaaagtgacgtgagaaatgtgcagagaaaaacatcagagatagtactaggagaagagtgaccataaactatggggggtaaaattgggtgggtgaagaggtaaatgacggtctaccatgagacaaggaatcatatccaccttggaactcaaaacacagaaacacaatatatatatacatatatatgtactattatctaatttcactcactctttttatcaat

SEQ ID NO: 110238 - DNA, 970 bp, Cannabis sativa
  modified_base (43)..(51): a, c, t, g, unknown or other
  modified_base (159)..(181): a, c, t, g, unknown or other
  modified_base (348)..(362): a, c, t, g, unknown or other
  modified_base (498)..(517): a, c, t, g, unknown or other
  modified_base (899)..(929): a, c, t, g, unknown or other
ttcactaaaatatcattcataggttgctaagtgttttaaggannnnnnnnnttgaagggtgtaacggtaattttgtccctgctcaatgtaaatcatctataggggatcattgattatatggttaataaaaaatagataatctcatagcgtatctatatnnnnnnnnnnnnnnnnnnnnnnntataattgagagtgcaatttcaaatctatagtagtgcaaagaggaattaataagtttattgaatttacttggtaaattcaaagatcggttatatatgcccatggttcccatactagttgagacaaactacttgtaagactcagttaattaattttagttaatcaatnnnnnnnnnnnnnnnagactatgtctagtttataaatttttactaagttatgggttgattgtgaagaaatagaattttagggtttatttattaattaagagactttatggagtctaattaatcaataatataaatgacaattttatttgannnnnnnnnnnnnnnnnnnntaaatagttttgacatttataagattgaaagtgcaaaaagtggtatttgtaaaaaatagataaatggttaagaaaaaatgcaaaaatctaactagtgttgggcccatttcatggcaggccactagagcctatttttgctctattttttatcttttttttattccaaataaatcaatcctaaccctttgtgaattagtataaaagaaaaagaattgtctcattatccaactaatgtttctaatgactcttaacctagttttcattctatctgacaactagagagtttgagacttcttcttcttttctctttaattcgaaatcctatagtgatcttcactatcaaattcgagccttcgcgattgagtgcatgcccacccatagnnnnnnnnnnnnnnnnnnnnnnnnnnnnnnntgtgaagaatccaaacaacagaaggagtgtcgggctcagat

SEQ ID NO: 110239 - DNA, 500 bp, Cannabis sativa
ataatttacatgaccatgagaaaaaatttaactaataaaaaattattttgactactaaaacaaatagagatgtatcgatgcatcccttttaaggaggtacattatagaattttcctatgttttataccaattaaatagtatacatatattatttgtttaataataacttgtggagtctaaaactacttagattagtgttaattacataaatagtataataaatataaaaaagtattaaaatttaagaacattaatattttgtattaaactatactgtacttaattgttaaaagataaactatatgagattgtttgttagttcaaaatttagtggtgtataatatatatatatatatatatatatatttttgaaaaaaaactagtgtaattttatatttgtaatttttattttgattttaatttgtgtaattagaattattatttcttaagtaaagaatttgttagtttgatcatcaatgaagaattttcattttgaataa

SEQ ID NO: 110240 - DNA, 640 bp, Cannabis sativa
gggcaaggattattcgggcaactttgctgatcgcattaagagttgcaaaacagaaattaaaaggtggaaaagaggcagggattcactgtctgttcaaaattatcaatcggctgaagctaaactacaagagatcttgatgcaaaaagagattttttggcgacaaagatcgaaacaattatggctgagggaaggagatcagaattctaaatacttccatgctatggcaacctcgagaaggcgaaataattctatccaaaagctaaaaaatgaccagggagtttggatggattggcataataatctttctgggctcatggttgattattttggcggtttgttctcatcttcttcaccagatatcgatgaggtaacaaacgttattcctagagtcattacgaatgatcaagccaatatgttgatggaacccattgcggaggatgaagtaagacgagcactttttcaaatgcaccccgataagtctcccggcccagatggcatgacaccaggattctttcagaaatattgggatgtggctcgtcatgatgtaatcgctcaggtaaaagatttctttgagtcaggttattttcctccagttttgaatgaagcaaatattgttttgattcctaagaagaaacaacct

SEQ ID NO: 110241 - DNA, 642 bp, Cannabis sativa
tctgggcggttactcaagtgggcggtagagttgggccagtacgaaatcactttccaaccccgaacagcaatcaaagcccaagccttagcagactttgattgttaaccccgagccgatacaagcaccttagccaagtaacaatgaacaaaaaccgacctggaaactacatgtggatgggtcggctacagatcaactatttggtgcagggattgcccttatcaagacctggggggcaacacctgcacgctgcagtcaagttcggattcaaagcatctaataacgaagctctaatcgctgggctaaaactagcatgggagatgaagaccgaacacattgaaatctgcagtgatcacagctggtggtaaatcatgtatccagagaatacaaggctcggggagaaaagatgatagcatatgtgagcaaaatacacgatctacttgcacaattcaaaagctacggtctcagaaaaattgcaagagaagaaaatacaactgcagacgcgttagctggattggcagcagcaatgtaagtgacaaggctaacctagttccgatctagttcctcgaagagcctagcatcactggcacgaaagaaatcgaaatgattgatacattcccaaactagatgacgccaatagcaacc

SEQ ID NO: 110242 - DNA, 597 bp, Cannabis sativa
attttataaacatttgaggttgtactaattatacaaacagaatcaaagatttaaaatatttttttttctcattttatttagatatacatatataaaaatgtgttttttaatgaatcaatttgctgcacgacttgcaataaattttttatcataaattagaaaaaaaattattttttatttgttgttcaatttttttaacaagtgaataaattttgtttaaaataagatctagattttattaatgaaggactatttagtgaaatacaatttttggtaagccaaatagtagaaattttatttacactttaaattttttttaaaatacttaatttaaataataatttatatctttaattgtactattttatccaaatttcttatactaaaattaaataaaagtccttaattctaacaattttaatagtttaaaaaaaatttaacaaacttaaaagttaaaaaaaaaaaacataattttgtacatattaaaatttgaagaacaaaaaaatcttaattaaccatattaatttgattgtcttttaaaaaaagaggagtgttaccgtcaatctcgtgttacaacctctacgcccgaaaatatat

SEQ ID NO: 110243 - DNA, 927 bp, Cannabis sativa
gtagagacactgatacggatgcgttaatgaagttgttgatgtcgaatgaagttagtagtgggaagatatgtgtcgttcctatagtgggaatgggtgggattggaaaaactactattgctcaaattcttttcaatgatgaaagagtaaaagatatgtttgaatctaaagcatgggcatatgtttcagataaatttgatgccatggccctcacaaaaactatatttcaagaagtagctccgtgcgatacttgcaatgacatgaatttgaatttacttcaagttaatttgttgaaaaaaataatgggaaagaagttcttgattgttctagacgatgtttgggaagatgattatgttcaatggacagaagtgatgaagcctttcaacggtggggcaagagggagcaaaataatagttacaacaagaaatcaaaaagttgcagatatcattcgaactctttgatacatgccatcttagagaattaacagaagatgagtgttggaaactatttgcaaagcacgcatcttgtggaaatcctgaattagaaagtatcggcagagtaatcgctaaaaaatgtaacggtttgcctttggctgccaaagttctaggaggccttttgagatcaacgaatgatgctgagaaatggaaacaaatagccaataataatctttgggagctccaagataaaaggagcgaaagtcttcctgctgcattaggagtaagctatttttatcttccttcacacttgaaaggatgttttgcttattgttcaatattcccaaaaggttatgaatttcaaagagaagagttggtcttattatggatgattgaaaatcttgtaatgcattcctgggggaatagaagaatcgatgaagtgggcggtgagcattttgatgatttagtatctatgtcatttttgcaaccgagtcag

SEQ ID NO: 110244 - DNA, 1126 bp, Cannabis sativa
acttgaccgtcggagtcccttcggtcggtaccatctcggtgtcccaaggtttcccagttactctcttatttgttctacaagttgttggtgcccgcgtacaatcatcttcgattgattgtggattttaacatctacattgagtaactatttttcttgtttaaggataaaggagaataggtacatgttcctaattattactattatttttgtgataggctcatccaaaagatgctcaatataggattaagaagttacctgactataacactttggctttaatttttggagatgttgttgctgatggtagaaatggttgtgaagtaaatgatgttgaagacttccaaaatgaattttctgatgatgatgtagttggtgatacataatttcctaactctgaaaatgtgcttgatcatgatataagcaatatggatagtgaacaaaatcaatcaactcagcatgataagagtatgggaaagagacatttacatgatcaaccaacattgacataaaagaaatagaacttccattggaagtagtatagcaaaatctgttgatagatggacatcaatatctgaagagcaaattaagttgcaacgagaacctaaaaatagttctgccgagaagctaatgcctatgattgtggaattaggactcagtgatgaatggattgtccaagttattaacattcttacagatgagaagaaggctgagttttattctgcaatgtccccagaacttagaaagaaatggatttatcaagaactaggttctaatttttagtttgcattttagatttttattatggaactttgattatgtttcttttatgttcaagaacaatattttgtgttatgaaacatgcattgagttgtttaacattataagttatgttattgattatgttgttcaacttgtagttattattattgatacatggatttctttctgtttttttccataataattaggaatggcaaatgaagatgagttcaagttatttatggcaaaatgtgtgcttttagtttgcattattggaacttatttaggtgttggatcgaaagaaaaagttcaccgatcaattttaacttgagctaacttccttaatgaattgattcaaggacatcca

SEQ ID NO: 110245 - DNA, 526 bp, Cannabis sativa
taataactaaattaagtttagtatagtatattattatattgcaacaaaaatgaatatgttgtagtaattaaattatataccataaaaaattataacaatactaagttagtactcaaaaatatatatatcttgctaacaaaattatatataccactgttaaaatatgcatacatatcaaaaaaaattatatataataaaatagaaactaaatataatcttaaactatagacaataaaccatataccatacaacaaaatatatatacttataataaaaaataaaataaaatattataatatattagtattaaaatattatatatatcatattaacaaaattatatatcacctttatatataacaaaataaaactaaacatgcatgatctaaaattaaatgatatactatataataaattaatataccatataacaaaaacatataccttacaatagagatatatatataataaaaataaataaaaataaaaatttagaggatggtaataaaattatacaccatgtcaa

SEQ ID NO: 110246 - DNA, 518 bp, Cannabis sativa
  modified_base (210)..(212): a, c, t, g, unknown or other
ttgctagcccaatccagggccctttgaagaggttggattttctgatcccagatcgcctaacccctagtgagcaggtggatctagaattgatcccaagccagcaggaaattagacttgacattttaattataatctcgactatttatgttcgagctctactaacaccaatcaagttatataatatgtcaaatagactttggaaatctcaannntatttggtgaagttctacccatttacctcatcatttaattgagttgttgttgggcatgcgggaggagttggttcgttcaaaatcaactgtcgttggattggttgttttggatctataatacttggtatttttcttcgtgccattgaattaccaaaatatgatatgttagagttgagcttggatgattgagtaattgcacaacctgaaaatactaattataagtaaatatgcataagagccaattagtgcaaatctcctccacaggagccatgagaggcatcgcctgtggaggagaatgtcaaatct

SEQ ID NO: 110247 - DNA, 702 bp, Cannabis sativa
  modified_base (357)..(359): a, c, t, g, unknown or other
gtgattgttacgggttatcgatgatatgtcgatagaatatcgataagatttcgatggttttggtgtttgtactgtattgttgttgttgtatgtcgataggatgtcgtttgtatgtcgataggatgtcgatagaattggtgtttgtttgtattgtattgattttttgtatgtcgataggattttgtgtgtatgtcgataggatgtcgatagagggttgagtttatttttgcccttaaatgtcgattatgtgtcgacagtatgtggacatgttatcgacggtagcatgtgaatttttaaatatttgttaatgtcgatcttgtcgatagtatgtcgacatgttgtcgacattatgtcgannntgtggattgcttagttcgagtggtcacttatttggaatatcgatttcttgtcgatagtatctcgatacattgttgataattgttgttattgttgttgtatgccatatgtgtgttagtatcgataggttgtcgacaatatgtcgacgggttgtcgatgaaatcatgtcgtgttcactgtttgataatgtcgatatcatgtcgacaacatgtcgatattatgtcgacctttttttaaattttttggcagtaatattggtctgttttttatttttttttcagatggctcctagactcataattccagcacccgagcattttactggccgcgtgacatatagaggca

SEQ ID NO: 110248 - DNA, 937 bp, Cannabis sativa
tcccttgcctttgggtaattgtccgatcaggtcaattccaaaaatggcaaaagcccatagactttgcatcagagttaactcgttgggtggagctccaggaatcttagaaaatatcttgcatttgtcgcattttttgacataggcctttgaattttcaatcattgtcgaccagaaataaccttgccttataattttcttagataaactctgccctgcggcatgatttccacaaaatccatcatgcacctcagataaaagtcgtgcagcttcttcttgagtaacacatctgagcaacggcatagagaatcctcttctgtacataattccctttactatgttataccgtgcatccttcctcctcatctttcgagattcatttcgattatctgggagttctccagtgttgaggtaagctgatgttggtgtcatctagtttggggaagtatcaatcatttcgatctcttccgtgccagtaatgctaggctcttcgaggaactagataggaaccaagtttgctctatcatttgcattactgcttgccaatcgagctaacgcgtctgcagttgtgttttcttcccttggaatttttctgagatcgtagcttttgaattgtgcaagcaggtcatgtatttttctcagatatgctatcatcttttctccccagcctcgtattctctagatacgtgatttaccaccagttgtgaatcgctacagattttgatgtgttcggctctcatatcccgagctagttttaggccagcgatcaaagcttcatattcggcttcgttattggatgccttgaatctaaacttgactacaccgtgcaggtgctgccacgcaggtgtgacaagggcaattcatgcactggagtttccaagtcagcttttcttcactgttacttggctgaggtgtttgtactggctcggggttactttct

SEQ ID NO: 110249 - DNA, 579 bp, Cannabis sativa
tgtattatatactaagtgtctttctagccaccatgtctcgtcttttgatgcgtagcgagattgacgcctcgccttatacatacgaaattgtattatggtttctcactaatgcacgagataaacagtttgtatatctttatctcgcttgagacttttcagtcaatcgagttgtaaatatactctgtcaattttgcacttaacgagttattctatttcaaatatatttatcattacgtgtgttgattcgtattctccccagtttgacacgtgtcctcctctgatgtgctagccgaatttaaggtataacaattgccccttaaaaagctctttttaataaaaaaaagtactttttaatgattacagagggtatttttgtcataatttcttttgaaaaaaaatgcacgtccttgattttggcagttttatggtttcgatacacatcaatagcattaatggtctatcttttccatttcccttatattctcatccattagatcttccatattataatatgatggttgaaaaatacaaggtataaaatggtaagaatcaaatttttctaccattttcatcttctcc

SEQ ID NO: 110250 - DNA, 551 bp, Cannabis sativa
tggataacaagtttcatccaaataatatttataactacaatcgctaaattttaattgttgcattaaagttattttttggaattttaatcttcaaatgaattcgattccaaccacaataataaactaaatttgcattcatctcgcgtcatggatatgaccacataattttgatatttgttaaaaagttagaaacaataattacgggttaattattaacaaaagaaatagtttagtagggttttctctctctagctttctctcagctcattgaggtggtgccatagcaaagacgagggcaaagcagagtaagcccaaatctccgaagaagaagaagaagaagcgcggccttgactctaccgcggatgtgaagaagaccaaatccatggatcaagtccttggaattgagcccttagctttctctgatgaggaggctcatacagtcgaactgatggatgtgaagaaggaagtcgctgattttccttttttggatgcgagcgacaacatcaggagagatgaagttcgcatgaattttgcacacttcatggaagcca

SEQ ID NO: 110251 - DNA, 616 bp, Cannabis sativa
gggcacccacaccgtacaatgcattgaactagcatagagaacttatgcagaaaatttttagcacttagtataagctactaaaccttcctcttagggttgttcattggatcacatccaatggatttggacccaaccgatccaatccaattatttattagatgttgaatttcgtcatatgatccaatccaattgaattaagtcatccgatccaatggatgtattggattggatcgattccaaccattggatgcattgattggttttctattggattggattggatccatctaatctattttagctaccatttaacttgattttatcaaaaagaaatatatacaatatatatataaaagacataatttaaaacctactattcaacatacatagtaagcattagtttattcaaacttaattctcatgatctcataataaatccgccaaaaattaaaacttattcaatacacattgataatttcattagcgtttaggaagatgagaattaatattttagatttacaatatttttctttaatctcgtgtgttaaatgtatattaaatcaattaatatattttttaaataaaatatattaaattataaatatattttaaaaat

SEQ ID NO: 110252 - DNA, 612 bp, Cannabis sativa
ttataaatgtaataatgtctattgctaggcgtgtgtggtgccttgctcttcttccaaggcaaaaaagaagagggcagtccgaaagcctgcgactgcaactggtgattcgactcttcaagctgctgagagtccttcgatcgttgaggaaggatcgggggaatgtaatatcaagattaaaatagtatttaatttttttcttgggatattaattgtgagagaataattatctcatttatttgtattgttagtgagtaaaaattattgcttagagtagttgtattgattttctaaagagagttaaagttgtattaattacgaaagtaaaaaaaaatattatgatattttcataagtaagtaatcgtttaattaaagcccaatatgaaggtttattagatttaattaattgtataagtggtattaaataatattattatttaattaatgttagaaaattcgtaagtttagaaaaaattcgcaggtttagagactgttttactaaaacgaccatatttgaagtttgataactcggattgaggtgatttcagtggtgttggaaagataattgaaagatctataaattttgtagaaatagctatatcataattcataatt

SEQ ID NO: 110253 - DNA, 655 bp, Cannabis sativa
aaaaagtaacatatcaaaataaatcaatttagattaaatgttgatacttaccaaacaaagcacaaaattttcttagcccacaagccaagtcactaacgcctccccctcttttttttatttttttttatttttgaaaaaacgaattaaatacaaaaaattaaaatatgcacaataaatataaggtattctatagcaagcatctaaacaaatttcataaaaactgacaaaaatacaagttatgctttttaagagaataactaattagtatctcaagaactaaccatacttaattgatgttgaggaaaaagatatgcatgttacaaataatgtgaaccaggatttcttttattttagtagaagagacttacaaacttgtacacacttgtcagacattagtgtgtgtagtgaaaataggatcattgtccttggcaagatttttcttttttgcctttttcaaattgatcctgcaactggatcctatcacaccatactgaaggtggtcttttctatggtagtacatcctcttcataactcttaattagaaagtttcatcttactcaaaagatggctttcacaccttagtatgggtagctctattccagcaatgggcctgacaagtaactaaaacaagatacgctcaactctgtataagaac

SEQ ID NO: 110254 - DNA, 835 bp, Cannabis sativa
aatacaatacaatacgaccttatacgacgttccaaacgagcccttagtgtcgatctactaaccgacacttaaagtccttataagtatcaattataaactgacaccttagagttacggtaatctttagtgtcagtttttttaaaaaattgtcctcgaactgacaccgaaaatctattttgtagtagtggcagtcgacttcttcactaaatggacggaggtcgagcccctcgtctccataacctgcaagaaagtccttgactttgtcgtcaagaacattatctgtaggtttggaattcccatgaagatagtattgataatggaatccaatttgatggcaacttgttcactgaattctgtgagagaaataaaattatcaaaggcttcttgtcagtatccaagcctcaggcaaatggacaagtggaagtcgtcaataaaaccctaaaagatactatcaagaagaagttagacgctgccagaggctgattgattgacgaactacctcaggtgctctgggcccacagaactatcgagaaaacagccacgggacacactcctttctcgttagcatttggctcggaaacaatgctgcttgttgaagtgaacatatcgactcacagaagagagttttataatcaagaagaaaaccaggaacttttaaaattgtcctcggatctacttgaggaaaaacgaattgagtggcaaattaccaacgccgcataccaacaccgagtcacaaggtacttcaaccaaaaagtcaagaaaagactattcaatgttggagacttggtgttaagacgagtctttgcaaatacgagagatgcatcagcaggagtgt

SEQ ID NO: 110255 - DNA, 691 bp, Cannabis sativa
  modified_base (42)..(46): a, c, t, g, unknown or other
  modified_base (505)..(511): a, c, t, g, unknown or other
tttcaacaaacaagtgaaggctcaaaaattctttgtgggagnnnnngtcctaagaagagtatttttaaacaccaaagacagtatggtaggtgtgctcggacctaactaggaagaaccatatcaggtggtcgaagttctagaatcaggggcatataaattgggtaagtatgatgaaaaaatgcaactcgttctggtaccacagtattggaatggggaccatttaagacaatactaccaatagaaggaccaggtcgaatgaccatatcatgtacgaaacacaagaacatttgctctgaagtgaatggccttctaggcggaacacgcacaaaagttttgataaaatcttcaagtactcaggttagatgaccactattgaaagtacgacttttaatttctgcaatttgttttatttcatgttaagctaaagattagattaaatctatataatagctttgatgtaagttactactgtaacagacatattttcgatcaataaatgaataannnnnnntatttcaaaattcaaattgagtcgaatctattagcatgttattaatttaccaacaagtgcgtacaaaaggtttggtcaagcccaaaaccctaaacagacaagaacgtatacttgtaaaaagtataaaaagtgaccaacagtcataagtctgctcggtcacttgggggcacctatacctgt

SEQ ID NO: 110256 - DNA, 500 bp, Cannabis sativa
aagcaatgtgggattgcacagcttaaccaatatttccccttacggatcacgggactactgactatcatagctcattttttcacttttctacagccaccgcggtgccaactccgtacaggtcaaggataacttcatcttttctcatttttgggctgaaaaactctatttaatgaaagggggtcgcgaattatagaaggagagacaaaatggaaccctaaaaatacaagaagaaggctcttgaatcgaacatgggcgatccgtgacaatcttccatctagtttccttctctttatgtttattttatttatgtttagtttaattatggatttgattatgagctaaactctatatttagggatttgatggatattgattgagattattgtatggatcaatgttatttgattgttctttctttctttctctattattgtgatttatttatatttgtacttattacatgtgtttgattgacgaccttatccatgatatatgatctc

SEQ ID NO: 110257 - DNA, 1127 bp, Cannabis sativa
gtaaacagattgacactggtgtttgctattcccttcctttcatgccgaaagatgtttatataattctctgaagaagataatatatataatgtcaagattgataattttatagattatgttatcaactgccattgcttatttgagagatgtaattttttgttattaaaagtgttcccacttatataaacaggcactcttctgacaccaaaagaattataatgttgtgaatttaacaacattgtatggattaacattcgaaggaatatttttcagagatccataataatcattgttgtatttgtttgtttatttgtttattgaccctttattgtagttgttatggttttgaaaactaagttattatatcactacagaagaaaaattaaactctcattttagtacttggataatgttctgtcagtattacaaagtagcatatgatttggctttcaattttatctcaagaatttcatgtggaacaaattaactggtagtatactcaaggagataggcaacatatcattttccttttaggtgagatgtcatagtatatatatattgtgcaatttatgttcaattcctcttgctattgtggattcctctctgctgcaagacaatgcaaagtggaattttgataaataaattgtagtgacagctatgttttgctgctttgctgctgttttctagtatttttttcttttggatagtccttttgtctcgggcaggctatccctattcagtaagtatttatttttttatatttattttacagtcatctgttcttaaacacagttttgaattttgaaagaattagtagatatattttgattttgctcataaatagcaatataattattatttatttttatttgtagtgacaactaaaaatgatgatatgttcttggtggaagggttcttcaacaccttccctcgaggtgagctgtggtagtattgcttcactgaacctttgtattgtgagtgccttaacgattatatcggaaacttgaaattttttgggggcatattgtattttcggttcaatttttttgggcatattataatatatcatagaatgtttgattttcttagcacaagtgagaggcattatactttgttagacatttact

SEQ ID NO: 110258 - DNA, 716 bp, Cannabis sativa
gtgaagggtacctataccatatgggaagactagttgttacagatatccttgatcttaaggagtccattttgacggaggctcatagattcaagtttgctatacatcgttgaagtacaaagatgtaccaagatttgaagagacaatattggtgggaaggtatgaaaagagatgtggctagctttgtagctatagtttgtcagcaagttaaggctgagcattagagaccttcaagtttacttcaacctttgcctatacctagaatggaagtgggacaagattacaatggactttattattagatttctattgacacctttgaaagatgttttgtgggtgattattgatcgtttgactaagtctgcccattttattccaatcagagaggattacaagcttaccatgctagcttgactttatgtagacaacatagttcgaatacatggagtcccttcgagcattgtttctgatagagatcctcaatttacatcaaggttttggaaggccttgcaacaagccttaggaactgaacttcacttgattactggccatcatccacagatagatggacagtctgagaggactatatagactttagaagacatgcttcgctcttatgttttgatttttggaggtagttggggagaacacttgtcactagtggaattcacatacaacaatagctaccaagccaatataggcatggctccttatgaggc

SEQ ID NO: 110259 - DNA, 682 bp, Cannabis sativa
gtatcgtgtccctagtctggttccatgttttggtctgagttcaggttcggggttgagtccggagtccaggtttgggttgggatccggctcctaattcaagtctaggattgatttggagtctgggtcctcgtcttgttggggttctgtatctaggtccaatttcagttatggttcaggtttgggtttgggtccttgtcagggttcgggtcaaggatgggcccaaaatccagacaccgaatacaggttttgtccaagccctgggtccagatccggatccctatcaggggtcccactctggttccatttctggtgccgggtcatgagctgagtcctaggttcaagtttaggtttaggtcggttactaggtcccggtcctagttcttgttcccaggtccctatccagattttgggtccagctgctgattattatgtgggtttgggtcccattctatgttcgggtttgagtcctagtctcggttcaggtttaggtctgtgtctgggttttgatcttggttatggtttgggtttaggtcctggtcccagtcctagtccttgttcggttctagttccatttgcgattttgagtcctagtgtgagtttgggttcgggtgcggatttgagtttaggtccagctcaggctctgggtgtgggttcgcgtcctaggtcttggtctaggttgggt

SEQ ID NO: 110260 - DNA, 513 bp, Cannabis sativa
atagaatatattatatataatagaagtaaaatataaaaaaaaccactagtcaggttgggcgggttattttagtttaattgagcaggttggacctatttttaacctgtccacttaacagattgggcgctttataattttgtcgagttttttcggtttgtatttttagtcggatttttcggtttggtttgaacggtttaggaaaatttatgcacacccctagtctaaagtaagtgagaaaaattcgtgatacaaaaatatattgatgagttgatattgttttgtatattgcaattaggtcattgttttgtttttttttcgttaccttgtagtttatctttttgttattttatagttatttttatgttgtttgttaaattattttagagttatttttattttactgaaacacaatatttttgtaattttgaaactttaacccagtagttttgcaaacttaatacagtaaaaatgtaaaacaaaaaatataacagtaaaaatataaaaataataaaa

SEQ ID NO: 110261 - DNA, 508 bp, Cannabis sativa
  modified_base (296)..(320): a, c, t, g, unknown or other
  modified_base (421)..(421): a, c, t, g, unknown or other
tcccactgatcctcaagagataaaggacatgagaagggttccttatacttaagcagttgggcgtctaatgtatgcaatgctatgcactagacctgttatctgttatgcagtaggaattgtgagcaggtattagacgaatccaggacaggaacattggaatgttgttaagcatatcttgaagtacttgaaaagtacaaggcaaagtctataagggaggtgctttaaatcccgtaggctataccgattcagatttccaggcatgtcttgatgaaaggaaatctacatctgggatggtnnnnnnnnnnnnnnnnnnnnnnnnngtttggagaagtgctaaacaaattgcaattttagactctaccattgaggctgaatatatagctgctgtagagactactaaagaacttgtctggcttagaangttcttcacaggactcggtgtcgttcctggaatggaaaaacaactagttttgctttgtgataacactggagccataaccaacagtaa

SEQ ID NO: 110262 - DNA, 689 bp, Cannabis sativa
  modified_base (333)..(336): a, c, t, g, unknown or other
ttaatcaaaatgacactaaatatgcttgttaccaaaatttttggttgcttatgaatacttttagctactaatattttttgtagctaaaattatatgttggtgtacaatatataattgatgcattttgtgtatattggaatttattgctactaaattatatcatatttttacactagcaaataaaatatttctagttgaagtgttttatgtattactaattaataaatgtagaatataatataatataatatatatgtaagaatagtaaacataaaaacataattaaatctgtactcgtgctccaaataaaaaaaaattaatctatattttctnnnnaaacaatatgtatataaattatattttgttctaatattaaagaaaggtaaaaaaagataattaaatttataataaatgaacaagataaactaaatttataaaaataataaacgccataaaaacttgaaagaaaaataatgtaataaacaactacataagtcatataggatacatataactttgttgaaaccaacatagataaaaacatcttaggaaaaaaaaagagcacttactaccttaaaacaaattaataattgactataaaaaatgtatcataatactaaaagaaaaagtacaagcacaaatgcttctccaacaactttcaaaaatgaaaggtttgcataacacaataa

SEQ ID NO: 110263 - DNA, 1420 bp, Cannabis sativa
gtttaattattgggtttatttaacagaatatttttttatttttaagtatattctgttaaaccaaaaaatgtcgttagatatagacacttttaatatataaagatatatttataaaaaatgagaaatgttatctcattcattagtaacattgttattaatatatgcaattaaaaaccgggtcataataattattatgtaaatgtagaatcactaatcattcccacatacattaggttttatggtaacaaagaaaatgtaattaaaaaaaaatctctaataaatattatattttcttttaatattaaaaataaacaaatttcccctaaaataatccacttcataaataactatattctttaaaaaaaataattttcattatttctaactttcccaccattcttgtaatgtaaattatttctccattatactcaagaaacatataaagaaaattaagaggtaaatatgaaattttaaaaattgatgtgccctaaaaaaatgtaacaggaaaaaaatgtctctaaatattattatttttcaaataaaatcactccataaataatgaaatacataaaaaaataggcatttttttattcatgatccaactcttataaatataactaaattaactaccttactttcccactcattctaattttctctcaaaacttttcaagaaacacataaagagaaaagcttttcctctctaaatcttttttggtatggcaaatcacaaagttgatcgatggttttaaatcccaactaatgagtattccaattctcgaaatcaaagcaaagatgatgaagtttttgaggaaaactatgacaataagatgatagaagatctcaaatattttgctacattagatttggatttaagctcattggaaaacatcatcaagattcgcgaagtcaacgctttcaaacgcattttccttaaaatagaatctaagttctattataaaaatttgtatgagaattcacaagcatggaatgacaaaattgtcaaaagaggaaaggtaatttctttattgaattcgatttctatgattgatttatgtaaccaagaaggaagaaatattttcaattggtttgaacaaatattgattggactcggatctcagcttagtgaaatcattgtgaattatttgttgatgtttatgaatcgcgaagagttcaacaattgctcgattcgaaatatttcaagaaagagggaagaaaaatttcttcattaacaagtttctttgtttggttaagtattttgaagatataataattgttgacaagaaagggaagaaaaaagttcagcatgatgttttttatcatgatgtttttcttgattcgatcttcgatatgattatgcttgggaaatttgagtttctatgcattttttatacctaaattaattatctaaactaatact

SEQ ID NO: 110264 - DNA, 939 bp, Cannabis sativa
  modified_base (46)..(54): a, c, t, g, unknown or other
  modified_base (869)..(885): a, c, t, g, unknown or other
aaacactaactaaatgtgacttgtgttttaaaaacttcaaaaactnnnnnnnnntctcatttctaaaaacaattttttgaaaacaataccaaacatgctcttagttacttgtaattaggaagtcattttcatggatactatctaatcgtagtaatgtaagctgcaagtactagtttccaataatagatttatttagggtaaaaaaagcttgcaaaaaggagtagagagataccctctttcaatttctgtagggcttcaaacagtgcatcttgtttctcacgatgcaagaactgtattttcaaaccaacaaaagaagtaaaacaaatttagttgtctctcttatcactttcttcttgcaatgtgaattttgtgataaagtagaacttgggtccttgactatacttttttttattttaactttgagaaaattggcttaattttgttatcgtattttacatgagtcatacaataccatgatatgaaagttttaattttcattttcctaacatactacaatttatgatgactcattatgttagtgcctcgagctcatttagatgactcaatttgaggtctaacactttgcttggaaattggcgccattcctctaatgttttatatcaaatgttgttgaaattaatatcttctgtactgcccacacttttcataaaagcctctacttgttaatgatattgtcaacttttaatcccaaccaccttatgattttgttaccaaaatccttactgattttttacataaaaagacttatacctctagacaacatgaaaccacctgaaatacagcttttgtgtacagcaagggaaaaggataagtctctttggtaacatttttgttttctaattttttannnnnnnnnnnnnnnnnaaatttttgtttttaaaatttttgtttttgaaaaacaaaaaggcgttctgtaac

SEQ ID NO: 110265 - DNA, 806 bp, Cannabis sativa
gtaaaataaattccaacaatttctcgaaccattttctttatttcccccttttatatctgcgcgtatcggtagggcctcacagaaatgggttcggtgcttggctttaaagtgatggcatgttcttgagaacggatcggaggtagacccggtggcatgtcaaagacatccttgtacttctccaggcgggttgcaataggtgctataggtggtggctgttcctccatggcagcagtggagatggcatttaattgcacccaatatccttcccctcctttttccactgtcaacatcattgccttaagtgaaattggggatttacacaagctaggatccccttgtaatgtcacccaagtacccgctgttttgaacttcattaccatggttttccaattcactttcatattcccaagtgtctctaaccacttaattcccaagattacatcacctcctcctaactccaagggaagaaaatccgtaatgacgcgcatagcgcccaaatccaactcaacttgcgcacaattaccctcagtccgcaccttcccgcctgtccctaataggatgccgtaacaagtggttgcagtgaggcaatcccactgcagccactacctccattgacacgaaattatgggtggcacaactatggattagcaccgtcacagggtgtttcccaatatggccagcaagtttcattgcgtgggcggtggagatgccgattaaggaattaagcgacaaagttggtaagtataattctaaagttagactatatatgatttgtgaattttcactaagcaggggtgaaattgtaa

SEQ ID NO: 110266 - DNA, 805 bp, Cannabis sativa
  modified_base (45)..(53): a, c, t, g, unknown or other
aattttaacatacttaactataatccttgtgggatcgacctcacnnnnnnnnngtttactacttgtcacgatacgtgaacttgcgtgtgcaaaatatcacaatataccttccgaggtgatttgtgttgggcacatcttgaaataaggagcaatatcacaaaagtatgaatgaaaaggaagtaagactccttgatcaatgtggtcttctgaccatgccattcagttgagagctaacctatgagctagttgatttgggggaggtatcttacagtagatatcccctactagcccagcggcctgcatcctctcaaagttgtcctttgagagggacgaagcagggaaaatccacctgaccctttgtgaactttcatcaagaatttcgggctcaagggattggtccaagacatggtccaggtatagtactgaaggctcattgagcttgttcaacgaatggccattgttatcatagtaacctaagggacaattggataggatgacacaaggcttgacaggatgacacaaggcttgtgtctctccctcctgaccggaacaacttcttcacaattgcactcaaccccgggactctcattctcatggtcaattctgaagcttgtgttggcatgaggtaaggcaaccccttatacaaccttgatgtgatcccgcacaaccattctggttgtttgcgggtcgtgtggagtcaacctgccatttctctatttcgtatcaaccataactataaggaaatttaagagacctacacagctgtcacctgttggattttgtgccctaaataaaactcatttta

SEQ ID NO: 110267 - DNA, 2103 bp, Cannabis sativa
gtttgggcgggttattcggtttaggcggtttacaaatttttttgtacagccctagtttctacagataataccacaattaacttaaacatgaattcgacataattgttcacaaattctttttttacaccatctttttgagtattgtcttcatgttgtgtcagaaattgtcatccctacttggtaccagggcagcttgcttatatacctgatatgactttcttttctgtcagcactcgtccagttactgcaaatttttttgaaacaagcgtttaaccatttttgttgcatttgctattggaatttatttcgcttatgtctgtcttgcagtcagttccccctacccgatggtatcgccttgtggctggtctaaatgcacaattgcgtctagttcgtcgtgggcggttaagagtaacattgcgacctgttcttaggtggcttgaaaattttgcgaatcctgctttgagggtccatggcatacgcgtagatcttgcctggtttcaggccacagcttgtggttattgtcactatggacttttggtatatgctattgatgaagagacagattggatgcctatcagaaatctagatggatcaatacaaggtggacagctgccacggtaataatttatgagctctattatcttcgtgggaagtgtaagcagatctttgtttgttctcttaattttaatctgtttacacttttgtagtaagcacgtgcataagtctcttactaaagtagtacacctagcagtgtcgtaaacatcgcgctgtatggttgatttggaatatgaacactctagtaccttataaaggttcaccaaatttatgcatacataaacggctagatgaacaagttgtgtacatgttttcctggcatcataaaatatgatatttacatatcctgcaaggcaatacttactatatcctttttaatctcttatcatcagtgtaaagagcattttggaagacaatctatctagtcatatgagagatgaaacccaattaagccaagctccaggagatactgaaaacgatgcaaggcagacaagagcatgtggagggatactagatgctaacaatttacagatgcttgaagagaagagagatatgttttatcttctctcttttatacttcataatactaagccagtcggacatcaggtatctctaattctaaacctagatatccaagtttcttaccatcaaaattttatatttataaccttgttgatctccttgaggcgttcttttttgtctgattgcaggatcttgttggcttagtaatatcaatgctacttttaggagattttagtttagtgttgcttacgtttctccagctgtattccttttctcttgtggacgtctttctggttttgtttattttacctttcggcattcttctttcatttcccgctggaatcaatgctctattcagtcatggaccaaggcggtcggcaggccttgcacgagtctatgctttgtggaacatggcatctttagtcaatgttgtaagttgcaacgaaaacttttggtatctttgtttttgtttttccaggttgaaaaacagttttcatttcttctgtcattcctgttatgtattacattcgtttgtcattttgaaatgttttctgattcgtgaaccaggtggtcgcatttctgtgcggatatgtgcactatagaactcaatcgtcgagcaaaaagcatccaagctttcctccttggagtagtatgaacatgtgagggtttcatcttttctcatttaggtagcactttacaaactaacgatgtttgttttgactgtttccatggtggttgtgaactcagggatgaaagtgaatggtggatttttcctgctggactggttttgtgtaaaatatttcaatcccaactcgtcaattggcatgtggcaaatctagagattcaagatcgttccttgtacagcaatgattttgagctgttctggcagtcgtgatattattcgactagaagatatactcattaacctgtttttattttctttcttattttatatgaaaaaaaatcatttatcttgaacgtagttgagtgatgacaaaaaaaaaaaaaaaagaaaacaaaaaaaaa

SEQ ID NO: 110268 - DNA, 500 bp, Cannabis sativa
ttcttgatagaaaacttgatctctctctctctctctctcgctctctccttaatcaatgtgtttcatatcgtttttctgtgcaaaggtcgaggttcaagtccgggatcggggccaggggccaaagcctggggtttgggtccttaggtccatgtccgagtctggggttgggggttcaagtttagggtcaaggtctaggaccgaggcaagctttgagatcttaggtcggggccaattttggggtccatgtctaggtcctaggtccgggttagagttgaggttcaggtctggggcttggtcaaggtcaagtcattgtctgggttgggtcaggtctggtgtaaggtctaattctggagtcggggtcgtggcttggtttatgggtgttcatccaatccaatccgcactattttgttcatagtgcattcgatccgcactaagtgcggattttattttttggatccaatccaatctgcacaatggctcaaatccaatccgcaaaagtg

SEQ ID NO: 110269 - DNA, 1584 bp, Cannabis sativa
acaattatttaaacaattttttttattttttttattagaaaagtaaatatatatatatatatttagaaaagcatggctagttattgtggaaatagtagtgcgtaacagaaaaataggaactcagtagttggtggagaacaaatgtccatctcagatgataatcttacacttgattggtgtagctactagcttatgtgatagaagtcaacaagtaagttttcatacgtctcatagaagaatactaacaagattatattagaaagatctatcatacaataataaagaacaaagaacactcttacgttgatgggattcgtttgaataacctgaggtcccagacatcttggggtacaaccaacatatttataaggtcctggagaaatttcataagaacatttgtcaatagacatattcatgtccacaacccctaaaggcgtgcgagaaacaaaaccattattgaatatgtttaaggaaattaaaaaagagaaaaagttatccccatagaaatcctaataagagaataaatgtccatattcacccttgaaatcatgttaccaaggagtataagagcagcatcaacctgcatgattgcatacataatgaattaaattagaactattcttgcaaatgctaagataatttgagagagataaaacattggtgtccgcatatagattgtgaaaacaagcacatctttttattgaaatccctatttaatagtcaatgaaacccaaagagtacatgttattaaagattatagctaatagacatgtcttaaagtataaaagaaaatgaaaaaaataaaacaaaagattaggaacttcaataaaagaaacttaatatacatggaagaaaaaaactactgccatacaaaattcgtccaactataaattaaattgaatcccaaagatggttatatgggtacaacttacaactgcagttacattactgaatattggcaaaccatgcatcaaagagccccacagtagtcgccaactgctgttatactgaaatttttcatcaaatagtcagtatcaacaacaaacacaaaaatcaaacatcacttgtatcagtaccagactctagctaaagttttagtttcacagttcataaaaagaccagcatatccaaaggttcgattcaagagtgcacaaaaatacagtaaaataaaaattgaaaagagacaaatgtgacatgtccatgagtgacattatcccaaagttattagggcccctcacttaaggcggagaaaaaccatggtaaaaaacagatggaggagagtagagaattccagcttagtcctgattcccattaaaacacatttttgctcattgtgattcgtgagtttgcattgtccctatggtccatgtttttgacagaatttcaaggggggtgggttactctactcctagatgttattatgcatttatggttaaaaatttagttgggaggaatataaaagaataatgatatgtgcacccataatagaaagacaattacaatttggaggtgtggatttaggactcactacatcatatttgtttgggtttttttttttttttttttttttgaaaaaaatggaac

SEQ ID NO: 110270 - DNA, 510 bp, Cannabis sativa
  modified_base (27)..(46): a, c, t, g, unknown or other
tcacaagtaactttttgttgtgactannnnnnnnnnnnnnnnnnnnaaaatttatattgtgactaaaaagatgtctctaaagtagaagttttttgtagtgttgataggtagaggtgcaatatttaagcacttcgggttaagaaaaatttgatatttaaattttatgtctaattaagttttagtattttttatcaagaaaaagtttgaatatttaagtgtaatatatattctttaactattaaatatttttgccgaaaatataataaagtttgaacgagatatatcttgggattggtttaaggttacaaattaaataaaaggttagatgagtgaataatgagcttaagtatgacagactgaatattttttttccttctttaaaattaatatatgatttgttataattaattatacgttcttgttttttcaatatacagtagaacctctattcaagaatacacgaccaagtaaattatattctaattgggaggttataactaaatagaatta

SEQ ID NO: 110271 - DNA, 587 bp, Cannabis sativa
  modified_base (554)..(561): a, c, t, g, unknown or other
tataatagtttttagggagtatcgctagccaatcgcaacgcgacatgtcgagaaggtactaggcaccactagtaccttatagcaatgctctaataaaaattacaatgtatatattgaagaatcaatattatattattgtttagaaaccaacaatataattaaattgcatttattgctatagtactatattttcatagctgcaattaaattgaaaataatgacttttgttggcttgtttcaaatctaagaaaactgttttgttctcactcacatgacaatatgtttgaattgactttaatattaataatggctataatgtctttgtttttgttacttgtaattattgctcttgtcgtttttgaatttagttgtcgttttccctttatatgtttctgtcgttttctcttcttgtgtttttattgaccatatccctatcaattagttttgtttgcttctcaaaactctctcatattctaatcgagaaactccacaaaataacttaaatttaccaaaatatatatatatatatctttatctttatctttatatattannnnnnnntatctaacggcatttcttggtttaac

SEQ ID NO: 110272 - DNA, 539 bp, Cannabis sativa
aaatagaatcataagtatagtttaatagtacttaatccaattccctgtggttcgatctcacttgcgtgagatactacttgatacgtacacttgcgtaataaacataattttcgtaacactaagcttgagtgcgacggtaagaaagagagaagaaaggaaccctagaccctttggaaaccctagctacatttgagagaggaagaagaagagttggaaccctaaccctagtttggtgtggttttgtttgaagaagaaggaatcctagacacttaaaaatccttagataaaagaaaggagaaagaggtgttagggttgggtcttaacgtgtatactttcccttttatattaaggttagtagttcagggttacactttagttgggttgatctctttttgttttggattgaaccaatttggtttatttaagtgagtcttgtgctttcactacaaaaaaactcattttccccgactagttttttggtcattaaaactcattaattagtcacccaaaattttttgtgactaattatttttagtcac

SEQ ID NO: 110273 - DNA, 500 bp, Cannabis sativa
cttagagagttgattacaaacagagacataattatcaatattccaaaaataatgagatcctttcagcgctttgataacagtttctgagtcactctcaaccaagacataattatcaatataaacaagccttctaatctatttctgtgttttttctaataaattcattaaataatgtttaataataagattggggtatgagatgcagttacaataatggtttataatatcatctaccttatttcagcatttgatagatcaaaaaatcataaaactcacaaaaataaaaacttgttaatttatttctgatgcaaaataagatgaatttttttttaagtctcgcaagctagtttgtttatgtcgtggtcataacactttagtagaaatttctttgaatagttagaaattataagatcctatataggcatacatcattttttaagtctagcaagctagtttgtttatgcctgttattttttttttttttggtaaatatcattttg

SEQ ID NO: 110274 - DNA, 1382 bp, Cannabis sativa
atgagataatttccctaaaaaaaaaaataatgtatgatattatgtaaatgcttgatgtaatataaagaaatttgagtttgggtaagttattttaaaaaataaaataaactaactgatgtgacgatgggagtgctctaaagatatatataaagtttactattaccgagatgaaaatatctcttacccgattaaactatcaaccactccacatgcattatatatgagaaagctggctacacttggatgtaaagaagatactgttgataaaaattaagaagtagctaaaaaatagataaaaagaaaaagacaggaagtctcccttctctattctatattgtactgagatttactaaataggtattttcattgagatgggtatcctgactctttgactaaagaccctctagaatgtagatcctcttcccttggtgggtttggtttaaaaatattaaaatatagaaaatgaggttaattatatattgtagataggaactaacttcagctcagaggtccctcatcgtatggcctgaccggctttgttcccacaatcatgcttctcttcattaaaaatatttatatgaattttttatttataatgttttgttaaaagagagaagaaaccaagaagtaagagcatacacagatagatatgctctctgtttttcaatttatttataattaatatgtatatgtaatgtcttgaattaaattgaattgaagcatgttgtccttacttgttaccctaactgtaatgggcatcaaatttggacatcaatatttttatggttttcatctccttttgtcgcccttggagggctcaatttctgaccactaggattggaggagccgattcatgttgaaatatgattaattttatttataaataaataaacatttgtatttttattttctttttttattatgcatctgaaccagtgatctccagtcaaatttttctgaatccccataaagttgtttgctaaaaactaatctccaatacgtggattgacacattcctttttcttctatttattacaacaaattaatgatggagatgagggaaatgtttattgggagtgcactgtacacatatttttgtttaataagtcactgtacacatacatatttaagagtaagcaaagaaagttggaaaagaaaatctccgttgtatgacaagatttcaaaaatatttaactgtcagccagcctcccaaaaaaaattagagattttttcaaagggatacgtaaaatataatataatgacaaaaataactgaacaaatcttaattataataatattttgtcacgtcattaaaaaatactttaattctaaaataatatgcttgaataaaactaattttgatttttttttttttttggata

SEQ ID NO: 110275 - DNA, 856 bp, Cannabis sativa
  modified_base (93)..(96): a, c, t, g, unknown or other
tctaattataaaattgaaaagtaaaaacagttttatagaacatgtttttttaaaatattttcacttttctacttttaaaaacagaaaactgannnnaaaagtgttaccaaacgtcatctatgctaatcacaagagctattgagctaaacttgactaattaattagtaatctttatgtattaataaaataaataaataacgattagctagaaataataatgagagataatccaaaatagaaagtagaacacatcattttgagccatgaactttccccttttaaatttaattaaagctcgggcattatcattaaaattatttcatttttagcaatacataaatgaaataggagatatagctaaaacattttctttaatcatctaaaacctccaacatcattatttctttaatttatctatggaggacttaaaagagtactttttccaagtgaaattgactaatggtgactatttgtctaatctatttgtgttaatcacctttttacattttggcaaaacttatccagttaaaaaactgttcttgtcattttataaatcaatattttcgaaaactaatacaaagaatagtcatatctaatttggtaatatatgattacatatcatcatatcatatcactactttttgctgtgttaatcaaatagaattggttatacaaaaatccccattttgttggtaattggctaattgggtttcctaagcttattggattggcctattgtcatttcaacaagaaagccctagctcttggccaccaagtagttttaggtagggaaatttacatgacttttgtcatttttttacaaaaatactgtcagacagaattttttactttttta

SEQ ID NO: 110276 - DNA, 632 bp, Cannabis sativa
gaggggtgagacaaggggaccccttatcccctctcctctttattctttgtggggaaatcctatcgcgtatgttcattgctaaggaggagttgggcctgctgaagggctatcctgtgggttcgaatggtcttcaaatctcacacctaatgtatgcagatgatttggtggtgttcctcaacgctgatagcaattccctggcctctttccaaaccattatggattcttattgtgggtggtctgggcaacagattaatgttttaaagtccaaagttttcttttctaagaattgttctaccagctgccggcatgagttcttggagtccctgggctttgaggaaatggtaaggggggaaaaatttctgggacacccttttctgattaaaggaaggggaggatcggattttgattacatcacagagaagatcggaaagaggcttgagggctggagagcgaaactcctctctcaggttgcaagatctacgctcatcaagagtgtcctagcttcgattcctatttactctatgtcggtgtttcttctccctcgaaaggttacagataagattgattgtatgctgagaaagttctggtggaaggggaatcttcaggaggggcgctttctggctcttaaggct

SEQ ID NO: 110277 - DNA, 564 bp, Cannabis sativa
ttttttttactcaaaaaaatattttaaactataaaaattcaactttgtatgaattttcaacatatttttttagcatattgtattatgtagaaaataaagtgccccctcaactgaaattttgggtccaccactgaatagtaccttttaatatctctaacaatgcctagccaaatttagtttcgaaatagcaaagtttatacaatctcttctacaatttgtaaggtcctcaaaacgggaggttcttgctttgaaatttttattgtaacgccctaacccctaagaatgccacggtgtgcttttataaactagcttatgataataaaactagaggtttagataaaaaggtgagttaataaaaattttgctaactaatctaaattacaaaattatggcataaacacctatagtaacgttacaaaatgcataattaagtttagaacatttaaaaatgcaatgtctggtaacttagtatcacttaccggataagctgatatgtacattcactggagaagattcttgactcatggttattcaaatgtttctacctattacttgcaccacata

SEQ ID NO: 110278 - DNA, 592 bp, Cannabis sativa
  modified_base (44)..(58): a, c, t, g, unknown or other
aaatctgtttctttattgataaatgaatataaaagattacattnnnnnnnnnnnnnnnttagggcataaaacctaacaaacaatacattgtagatttctcttcaataggatgtaaaccagaagttgagaaaaataatttcaatccttgaagtaatagataaaccaatctaaactcccacaacaaaataataatacatcatttgcaaaagatagataatttagaccagtccccttatatctctcatgaaatttgaattttttattttcttcaacttttctcatgatcttcgaaaggtattccataccaagtacaaacaaaagtggcgacatgtctatttcttttgcaaatgccattatgcataatttgtctataagaatacatttaattaagtaaaataaataagttctgaaaaaattatcatctcaaaaccatataaagcgattatgttaacaaataattttataattatcagttaattaccctagcttaactactataaaattattttgactttgatttatgtaaagaccgtttagttttaatttagaaattagtagataattagggatttattatgaaaattatttatta

SEQ ID NO: 110279 - DNA, 707 bp, Cannabis sativa
  modified_base (651)..(661): a, c, t, g, unknown or other
aagggcttaaaaaccgcttctaaagggggtttttgtagtagtgtgccactaaaaaaaattattgagtttatgctacttacaaactcaaaactttggcctttggatacttatgccgctatttatgatgtggtattgttttaaatgacttgtcttgtcatctgttattcaatatgtcagaaaacgataaggtacttacgaaacttttgaaaatataaccgaaagtatttttaccactaaaattttaatttaaatattaaactgcaactgatagataaacttatggggtaaattggtcattatcaaatagaaagtttcaatttaatgtgaaaatgtactaggattgaaaagttattatattaattttgtgggacaaggagtggaattgataaaactttatcaggtttctttctttcttttaatgcaaaattagtcagaacgactttgaagtcattgggaagttgccaggaacttaattggaggaattatccgtcttagacctgtcagaattcaaatatacaaatttattatataatatatggaattttcaattatatcatgcttccaacttttactgtccattacaaacgaaactgccccgaataggcccttatatatatactagcaaaaattacgtgcgaggcacgtatactnnnnnnnnnnntagtttttttctatgttatttgaaaatgatacaattaaaaattaaa

SEQ ID NO: 110280 - DNA, 1874 bp, Cannabis sativa
gaatgactcacaacgattgggaatgctgcaaagtatggaaataaatcagaatagcataacaattgacaagaccggagaggaaggcaaatccaatgttttatatggccctttatgctttcaattataattctaagcaaattaagtaattaaatatgtatattttttcaatacagcttatacaagatctaacaaactgatatagtcattactttagaagaggcaagagcattcagagtttagtaacaagaaaataacctagcaagacgagtgtaaaacaattgttttgaaagcagattgcacttttccacggttgcggggtcctggatgtactgcttgttctcctctaacaactgtttgtaatagacagatccatgtttggaaacaaactgtgatgcttgacaagccttagactgcaattgtcgcaactttgatgccattgactccaattgtctgaaatttaagaacataaactcaattaatcttaaatgcagtaaaaaaatccatacataataatattccagttagtaaagcaatcccattttcctcaaacccattatttggttgaaaatggaaaaagagaagcaagaatgtaatcttttctgagttataggtgataattttatagatggagtacaatttttctgctagattgctaaacaaggatttaacactaataattttttaaacatcaaaaagctgatttcaaagcctacattccaaacttcttcttcaagcatcattttagcgtccaaagagcaacaaagacctaaactatcagacgatgaaaaaagtagactttgtgagcaagtacaacaaatgtcacttaaaaaatcattatgaacattggatttcttgttcttacttttaattaaaacctatgaagaatttgagaattgcaatgcaacattataaacagttgattggtcatacccataaagcacccaaaggactaatgttttctttgtaattagaccacatttccaaactttatcagaagcttttagaagaaatagagcagctaaaaataaattatcaatgctacacttcctcgttaattaaaattagcatcaaaatcataaacccatatagaatttcggccaagaaaaaaaccaagtaaccgactctcaccctacatcttcaaaacactccgattaacaaagaacttaaaaaactcgaatacatatctgtatgtataacttaaattcagatatatcccgaacacccatgattctgatggctggtctcaaaagtcaaaagcaatcgcaaaccaatattcaatcacataaacacaacaaaataaattaaaaaggtaaccaaacacacagcaatcaggaaaagacgaatattcattttcaaaattaagaacatggaacaatcacatacacaaacatatcgtgtttaaaagaccagatctaaaacaaaacaaaattactaacgaaaaagattgatgagctgtaaatcgaaacagatcgaattgcaaaatcgaaaggaattacctttgtgttgattggattcgaatgcaaaccaatagatacgaagagtgagactttgctactctacgccgctaggagctgagttgtgggcgatgagaaagtattgggggattagagctttagaacgaaagtggttttacttcagagatgggccattttgtaaatatcaacatttttaagccccttcgttaatttcatgtcttcttacttacctttccctgaactgaaaagttaaaaaacgggccctttaagtggtctgtacaactgctcattgggctttaagcaagcccactccatctgatttgtagagatttcaacaggaaattacactctataccctttttatattttatattgtcttcttttatttttatccttttt

SEQ ID NO: 110281 - DNA, 517 bp, Cannabis sativa
tttttttttttttatagaaaaccccctctatactccaatcagtccaataagaagaaagaggagttagaagaagaagagagatcaaggaatctagacttgctataattggaaatgtccacaaagcaattttttgacctcaaccattggcgccatctctggaaacttctttgaccttgatcggagataagtcctactaaatcattcatgtaatcatatgagatcactgagtgaaattctaagatttgaatagaaaacatcattctcctaaaactgactaataatagagctcagatgcaaaaagcaatggctgcgaaattctcagatttgaaaaatagaaagcatcttgctaccaaaactaactaattagggacgcggagagcttagctcagatgcaaaaagtaatggctgatacaacatccagaagacacgtccaactaatttgaatgtgatcgtggctaaggacagatgatgcaaacgtgtaatcctgtaacaacctaactaacataggcgtattacg

SEQ ID NO: 110282 - DNA, 720 bp, Cannabis sativa
agtttaaaatatttgtataggtatatctatgtactgatgatgtgatatttattgcaggtaaatgtaggtagaacatgcgtgtgtagaggaatgttgtgagaattgagatgtgtgaccatagattttctcaattgtaaatcgggagctgatgtttgttatgaaatgtatgtatgtatatcttcttacaatttgattggcatagtgctgattgtctaagtcggcaatgctatgttatgtatcgcatttctgcatttactctttttcaatccaaatccacagaaattaataataagaataataaaaataatgattagaatagtcaaaaatgtctgtataagaattatgtagagacctattgtcctattctgtgtagtaaatatgatactttccaattattaaacaaatttttatttccgtactgtctgatctgtccttaacaaatgcattcgtgctcttgaaaaggtagatgtttatactttgttgatgacccattcgattttatttcattttttgtaaaatacgtggaaattttcttatacacgctttttacttggtgcaagccagattttattgtagaaagtattgctaaatcagattttagattttacgtcctcttctatacggaggtttttattacaatttttttaaaggaaagatttaatcactttggttatcggaataattacataaggcactatcttttgtaaaatatttatattt

SEQ ID NO: 110283 - DNA, 512 bp, Cannabis sativa
  modified_base (26)..(34): a, c, t, g, unknown or other
ctctttctctcttcatcttcttcttnnnnnnnnncatctactttatattattttatagcaactattatattaaaattgtttattgtattaagtagcttgggtgtgatgttgtgatattacaaatataaggcattttgctccataggatgatattgattttttaaagcactagctattttgctacatcgatgtttatcttcaaacaatttttttttttaaccatgaagaaaaatatttaatcacaaacacaatagaacaaaccactttgctaaagcctaaagcagaccaaacgcaaccaactcttacattctattcaccaggtctattacctctattttccgatcttgttgagagctgtagtacgtagtacaaaacaatactctatatttaatggtgcttttgatcatagcatcaattagtttgatacgttgtattagatcgtattatattgtattaaattaaattatatatcatatttttatataatgttatattaaattttaatttatact

SEQ ID NO: 110284 - DNA, 696 bp, Cannabis sativa
  modified_base (34)..(34): a, c, t, g, unknown or other
  modified_base (84)..(93): a, c, t, g, unknown or other
attaaaaaattaaaaagtaaaaacagttttatanaacatgtttttgaaaaatatttttgcttttctaattttaaaaataaaaannnnnnnnnnaaagtgttaccaaacgacaccttcatttaaccctaaagtcaacttagccaagttgtgaacaaacgtattagttagctgttcttcgaatatgcctaaggatgatattgatatcgaggaattaaatgagatcaccaaagacacactcatccactagaggattgaactgttgtgatttcaaatcacctccattcaagaacaacacaacaaaaactccaaaacacaagaacaaagttgaattaaactaatcaacaaagcataactcgattaatacacaatgagaataaacaagaattgaatcactagagacaccacacacaaaagaagatgaaaatgaatatagttctattggtcatcaaatgaattgagctactgtaccaaaccaaaaatagaaagtaaaaaataaaattaaggagcgtttacatttggttcacttgagaatttggcgaatcccttaacatccctccaaacactctatgttttcttagttggggtgaatgagaaatgagtcacccctatatatacactacaaaaaactgttacttttagtgataatcttttagtcacaatataaattttttgcaactaaatgtgacttttagtcac

SEQ ID NO: 110285 - DNA, 1565 bp, Cannabis sativa
ataaaataattaaaattgatattgtgtcaaaaatttaattaatatttatctttaatttttatataaaaaaagacctatttttaaattttgccccaagcctcttctcacctagagacggccctgcaccagacatgtacaaaaagtttgtaggtttatgatcatcatcattacttcccaagctttcaatagaggtgtccatgatcaattgaagaagaaagctcaacatactaatcttcacaggttcctctctctcatatgattgggtaaaggcaagtgcactaaataacccaacacttatcacatcatgtatattcctttccgaaaaacaacaagagtactttgaatattgtatcctaaacttaggataattgttcaagaaagtaaccacagaacaaatacataacaaggaaaatttcacaatggctttaacataaaacatcttctcacatttacacttgtcacccagtttcttaattaacccaggtatggccttaaaagaaagccccaaaaacagagcagtgagataaaaatgacaccttttaagttgtcagcatctttgaattgaatcttagaaaaagatgatgcataaagaagactaaagccaccaagtgctgaagacatttccaagattagataccaagtccccatttctaggccaatcaattcaacaagaccaattatcagagtatcaatattatggcgcaagagttgtaacacaatatatgagtagataatagccccaaacatataccacagacttgatggaattaattatattgaagtttcaatagtcaaacttattagaacactaaacaaaccaagttgtatctttttctcactatgtgatgataaaagtaaggccaaaagagcaaatgttccaactgaatacagattgtattgacttccatcttcttgatgatcaacaatatttgtacaaattgactttatatacttattgttgtttggatcatgaacatcaaaaccaggatattttctcaagaagaccaacaccaaaacaatcccttggcttaaaaagttaattatgaatttaagaaacgagtttaaattgtttaccttgtccatgagccattcccatattggagccacatgagcaagagggaggaccccaatggaaatagaaccaaaaaccaatatccttattaaatgtgtagtgtcatctttgaattgagaagtgaagaaagagcttttgtatagaaagcttaaaccacaaatggtggacaatactcctccacaaattcttgttctttcatccatggaagaaagcataggattacaaaataaaagaaattaagaaaacaaatgaaggaagtaagcaagtgtttgctattatttttcttttatatatgctagtaacattattttattaattttaaattctatttgcgatttaatcactttggtcatagaaacaaagtgatgtatgtgtaatacctacagcaggagaagaaaaaagtatgaaaataaatgacatctttttttaaatttgggaaaaaaacaaaaaaatacaaaaaaggaaaaaaaaattacaaaaatactttgggccg

SEQ ID NO: 110286 - DNA, 781 bp, Cannabis sativa
tataaacattgggtacttatgccgttaaaaataaatattgagtttatgccgcttacaaacataaaacttaaagtacttataccgttatttatcctatttaatataacaaaatgggaatccaataaaatggttcttttattatttgagttattttttatgaagttatttgagtaaattaatggagaagagttaatataattaatatatgggagaggtgaatcttgagtttcaccacgcccgtatctgtgggtaataattatgtaatccaaaagtggggaggcgtgcgagtgatctgacggtgtaagacaatctcacggttttggtctctaaacctcaaccgtacggtagctgggagcctgggagacataacggcgttctctactatctaccaaattaacatcattgcttcattgacttcttaactcaagccgtactccttttaacgtttaccgtcaaagtcttctctaaagttttttcacccaaacccctttctgtctttttaactaacttttaatcttttgactgtggtaataaaaaaaaaaatagaaattgactggatggaatctatgaaatgaacctcgtttaaaaaaattataattataacggtaagtagcatctaggtctccatttccaattccaactcacacctatccaaaatatttcggttgaatttagaatcttaatggcacgtttactataccgtaatcagaatcggaataaattaatggagaaatgtaacggaataaatgaaaaataatcggaatcaatatttgtaatatgt

SEQ ID NO: 110287 - DNA, 950 bp, Cannabis sativa
tagtttttttaggttttaaattttggtttagggaaattttttttttattttctaagtatagaaaatcaaatttccctttttaatgtaatgaatttacttggtttggtggttgttgttaccacttaccagcagtttagcaccagtgaaggaattattacaagattttaattgacttatcttatgttattactcaacggtttatgtgcttttctcacctattttgcctaaacattaaacacaatacttcttgttacatgttagaaaaaaggtaaagactatttttaatgataagtgggacccattaataagacgcctaagtatatttgtgttctaatagaagaggtattgtatattcatggtgacattaatggttcagtttgttgatattttattagaattagaatccagtgcatgtgcgatttgattggagtcattttccaaatcgcacgagctatgacctcaagacaaaccacaaaatatgcagtgcaagtgatatacttttacacttttaaaactcgtaattaaaaagacttttagtaatttctcgttcaaactttttttattgacaaattggttactaaatatattaattttgataagttggtccctaaattttaatttttgacaaatcaattcccgaactttgagataatttggaagatttttttagtccatacttttaaataatatagtagttttgttggcttttaattattaattagttaatacattttttaatttatagtagattttcaaaggagcttggccaaagaaattccccccagccactgcttaacattctatagaactctccaagagtaagaatagggaaatttacatggtatactaacttttgtcattttcttacaaaaatactgttaggcggaatttttaacttttttactgtgttttttcataagtttcatactgcagtatactgtattaagttt

SEQ ID NO: 110288 - DNA, 653 bp, Cannabis sativa
tataattagagtacaattgtcaaaaagaaaagatctgggcccaaataccataaaattattgagttgctcatatattacatgaaaccaatccaagagtataagcgatcgagggaagctttttaattaattaagacaatagataaatccttgattaaatttgataaagtataatgtgtgatcataatggatgagcaacaaaaactattattaaaatttctgactagattattgtacatgttgttgtctttccacaattgtcaggatatgcacgaaactttaattattttcatatgcataacctattcctataatctagatcacaaaaactttgcttaaaagaaaaaatagatatggtttgtgtatattaatatattaatgagggttttgatttttgtaaaagcttataaaattaatatttggtggtccaatatatcctaattaagtctattgcaagtgtcattctggctaagtattgagctctataaaagccccagccttgtggaaagtgggaaagtggataccatctttctctacaggacacatacagagcacatagatatataattagaggaaattacacttagtatgtgattttaaaagttcttatgataaatatggcacatttaagtttggccaatttatatggtattttt

SEQ ID NO: 110289 - DNA, 673 bp, Cannabis sativa
gtaaaataatttccaacattaagtacatacttcatttgagataaaaaaataccttgtctactccaattgacttcaatttccaagaaatacttaagtagccccaaatcctttgtctaaaattgggtatgaaggaatggtttaacggatgagatagttctagcatcatctctagcaataataattgtatgcaaagggaggcaggctgtttgtcccaaagtggtggcttttagaaagagctactcaaagaaacccacgtcccttagtgggctagtcattcaagagtggccagaatgatggaattgttgtcttgatcatacttttggccaaatatggaacaagacatatagattttggtcaagacttgtctggtgttctagcaagataagattgagtagaagcaagaagcaaggctgttgcaacccctacctatacttgagaagtcatggcagtcaataagtatggattttattgtgggatttccaaaatttaaagggtttagatccattttagtagtggtggatagatgttgcccaacatatgtggttgtggagctgattatgaaattttttggaagtatttttataatatccagattaaaatagtatttttttttctctctccttggaatattaattgtgtgaagataattatcttatatatttgtgttgttagt

SEQ ID NO: 110290 - DNA, 871 bp, Cannabis sativa
agtagatctaagatactggtaaaacaaattccaacagttcgtaccttaacgacatctgtgaggtttatccgatgccaagtgtcttctaatcacacgagcaaggggcttacggatgtcgacattaacctggactttcataaatgcccccatacaaagccattcggactgcacaacacgtccaaaacctccccagccgacttcccaaactcaaaaccccaagccttcgtcatacaacacactggtaccttatgaatctgaatccaaaaaggagcaaaatcaaagaccatctccgtcggagccaatacgcgttcagttccttgcgcaccaagagacagtgctcaaagacccatggcccaccctccatgacccttttacgattcttaatcaaatcaaaacgtcacacaaacgtattcatacctcgagcctccaccgtaaaggaccgctaaattttccaaaagccattcacgacgtaaatcagatcattacgatcgacggagcgtggcgagatgaccctgcccacgatcattttagtcaccaccagtgcaccttcatcaagtagcgactggtcgaccacattgatatcattatcggcctcatcatcgtcgagagccattgatttgtagaacatcgcaagatcatcgtagttcatggtacccatcccgtcacaacttgaaaacttgcaaagcacgtcaccggagaagagggagaccaacgacaccgaagatagaaacgagactcaaccaccgaaaccctaacaaccgtgatagagaatcgtggggtcagtcgtaataaataattaatgtccctttgttattaagcatgttttaatgatcttttctttatttttttattttgaatttttttttttttt

SEQ ID NO: 110291 - DNA, 605 bp, Cannabis sativa
aaaatagagaagctgatatatgatataatataaaagtttgaggtaaaataaataaagtagaattttaatgatgtttttaaaaaatagagtagagaagctgttgggagtagtattatgtaattatccctaaattgaatcatgaaattagatgaattgtcaaacatttttgtgggtttttggtattttaccaaaagttttacatccttcattattaggttacttatttacaatataatctttttttgaagaatatttatattataattactttttgaaatttgaatttttcttggaaatttcaaaataattactttttgaaacttgaatttttcttgaaaatttcaaatatggattgagcatgtgatctttcgagaataacaaagagcatatccttgttaaataatttgtggaaggattgattttaaaatacaatttggagtcaaattgtctgtcccgttttggtgttaatattttcattaggtgtgggcatccaattcaattctacattttttcttcttatccgatccaatccaattagtaattggatttggaaaatcatcatccgatctaatccaattagacctcaaaatccaatcaaattcaat

SEQ ID NO: 110292 - DNA, 536 bp, Cannabis sativa
attttataattactatttagtcactaagagtgtataactatatttctctactctgttttataattgctttgtggattacatcaagttgaccacaaagaaactaatctataaagtaaagactttttttttttgtattaactagcttcaagaaatagattagactttttttcttgtatttgcaataacataagaacactttggactacttatttttcttaactaaatgtaggtatatactaaaggcacttgatttgaagtggagagagctacatgccaatttcaacaacttcagctatactatgtatcattacaggtatactacaaattttcaaacataaatatctttaattattttcaaacatggaataaggagctaaactattttttttttgctaatgcttatttgatcttgagaatgaattttacttgactttaatttatttatatatataaatatttgtataggttttggcatttagttgaagacttatatttcacttctacattatggtaatgtttgatgagaaagagttgga

SEQ ID NO: 110293 - DNA, 585 bp, Cannabis sativa
tagtaagagtgattataatataagtataaatattttttaatgataaataagcccccacaaagtaaaaatcctgggtccgtcactgtatttacccattaattaatttattaactctaattggttaagctactattgtctagctttcatgatgataatttagtatttaaatcaattattataaatttttaagtagcaactagctaatatagacatatttttgtcaaagaaaatgtttttagctacgttataatttatttcatactaataaaaattagtatgtagttactactctatatatatgtatacttattcatactctttgtttattaatttattaaaggtatatttctgaagaagatattgtatgtggagaagaggctcacataggcttggctccacccggtaaagttggatcatggcaacttgaatctaaagtgattatctttttcctttttgctcataattatttataaattaattatatatggatgttaaatttgattttctatacttacatatacttaatattttatttctaaactaatacatatcatcattgaaaatatatgaccactttatctaaaa

SEQ ID NO: 110294 - DNA, 627 bp, Cannabis sativa
tggtcccctgggcgtagagaaagccctcgccggcaacggtgctggaagtggtagcgatgacgcagccaaaattagggtgaggagaggtgaagccggcggacatgtcggcgagttcgacggcgcgttgaatgtaagcggcgtcgcgcgcgtgagaaaaggagagagaggcattatcgttagaagcggctctgcatagtaagggagaaacacggagccctcctattcctacaattcctatagacaaggccatatcacttgggaactagaaaaacatgtctactttaatattactactaatactactttgtttagttaaaactgtatgttatgtccctctgttttctctttctgtctttgttttttaagtagtcatggcctcgttaaaaaaattaaagggcaaaacttggtgtgcagaacgatacctttataaaaactcgtctactgtacagtatcctcagtagcgaacgaagaatttcaagctacaaaacgagttacccagttaacatctgtaaggcataacaaataaaagaaatcattacacacacaaattacaaaaaaattagagtaaagtatggtattgtttttgtgttttttgttttcaacaaattgtttttagaaatgagaaca

SEQ ID NO: 110295 - DNA, 524 bp, Cannabis sativa
  modified_base (73)..(74): a, c, t, g, unknown or other
atgagttaatctccctcttgtattctgaatgctaatcatttcaatgaagttgatatttcattttttaaaaaannataataataataataattaatactaacaaattaagcataaataatgaaagaaataattaatatatgaattatttggtttataaaatcttcttcgtacgagttcatgaaaacatgcatgcaatgacaatgatctaataggattagaacaagaaaagaggttattatgacaaaaaaggaaacaaagtgtacaaagtgaaaggcttacaatattttaatattttgttcctttttcttatagtatgtaatatgtatgtataataagttttggttttgaatctcttttatgatctatttgtcttcatcttataaatattatcttattcttctataaaagatgtttcaactaggggtgttcattagatcacatccaatatttttaggcctatccaggtccaatccaatcatatattggatgttagattttatcatccgatccgattcaattaattt

SEQ ID NO: 110296 - DNA, 585 bp, Cannabis sativa
  modified_base (536)..(538): a, c, t, g, unknown or other
gatctgatccaagatccaataactatccgaatgtttcggatcagtaatgatccgtcggatcggatcactgatccgatccgaatgaatggatctttttgccatgcctaactggattgggcccttttgggctttggggttttatttttatcacattagttgtggacgcataacttattacaaaaatatgataaaaccattttgtgttctaagaagttgtgtttctaacaattcatgtcgttttctagttgagtatcagcgaaccagttaaaacaactatatcaaaaatggaaaatccaagatatttgtacgacaaataagggcaatgtgcccaaagcaaagacaaacttgacatagagacatgttggattgatttggtcctcgtgaactaccacgacccatgttcttgaatccttgagacggacgagaaccagtgtttcttgaattcccaaatgtgagattggcttgcatcttcatggtaaatcagacatggagctatgtgttgggaatgttttactgggatctagatttactaacannnatgttgattaacatcctaaatacgaattctctaaaacaatgaaaata

SEQ ID NO: 110297 - DNA, 507 bp, Cannabis sativa
  modified_base (62)..(68): a, c, t, g, unknown or other
taataaattatataaatagctataaataatttcataattaatcatgattaactgctaatttnnnnnnnaactaagcgggctttacagtatttaatcaataaattttcaaaaacttaaagatcaataacttgtctaaatttgctcctattttatttgtatcaacaaaaagggaatcacatgatgcaaatcatcttcccactccttttcgatatttttgacaatctcggggactatgtgttagccttgtacgtaccttagccaaccttaatcgagtcatcgatcccatccaaagaatgtcaccaccttagcaagctttagcctttaagggccaagtaaatccatttcaagagaggttgtatatgtaagtttggaactcttaactcaagcaagaaataatttcagtaaaaacaatctttaccactacaccacacaatacataagggaaatttgattttctatacttaaaaaactaaaatattttattcttaaaccaatacattttaaact

SEQ ID NO: 110298 - DNA, 1751 bp, Cannabis sativa
ttaatttttgaggcttacgcctcacatacgcctcgaggcttacgcctcgccttacaaaaaaaaaatgcctcaaggctcatttgcgtttttttaaacattggtaagtggcaacgcacaagtagaaccatttaacgatatgacacagcaaaatatttatatgaacagtcgattccaacatacctaacctcgccggtgaaagcaccacccttcttaacccagcaattttgtgctgctacatgaaaatctggcctcaataaactcttcactgtcggaagaaacacatacggagggctaaccacaacctctgcaggtgaacaaaaataccattagtttaaaaggccaaaaacatcacttttgtctcaataaagcataggcaacaatgcagactggtagatctgctatacaaaaagaaattaaaaaatcagtataaagttgctcaagctgaaaaccatacctcagttattcaaacattgcaaatatattatcataaaagcatgtaaatttctttaaatatttacatctgcacatctggctttctctactaacaaaatcacaactttccataccttcatgacaaagctcctaaattatttttctatgctatatttacaaaacaaacacttataacatcacaatagcagaaaataaactcacccacaacatcttgggaaggcacttgagcttcattgagtgtgttgataatcttcttcacctcctcggtggttccattctacaaggtttacgacaattttagcaacaatattcgatacaattgtgcacatacgatcgcaaattaagatcgaataatcaatttagcggtttcagaaaccacattatatcacaaaaaaatacagatctgagtacagatcgggtaattattcagaatcacatagctttagtaggataatcatcgatggatatcttctcgtatataaaatcgcaaattaagatcaagaaatgttttttcttctcatattaaataggatccaaacagaagaaaaaccttaaactgaatcagcggatttagatttcattttctaattttctcggcaatcaatcaggattcagaacaataatttaaaagataatcgaatgagaagcttacgcatttccagttaccgccaacaaagaacttcctacccatctttctcgagagtaacgaatatcgcaaagtgttgtatgagagtgttgtgaatgatgtttggtttttggctttgtttattttggatgacagtagtcagtgcctctcttatataatactttattttcagccacccaattccttttacatttatttaaaaaaataagtattttcatttttatatttgtggatgaatcttgatgccgtccgatatttgaatgaatttactattttagcctcgaatttggaatattcttgaagcatcaaataagctgataggtcaaatgaagggctagtttcgtcaaattaaaattaaataccagatggagagactgtgggcccacaggttatacatgcatgctttgggccttaggcccacggattcttagctgctaaaatgcgtcacacaaaccgtgggtgatgctttttttgttttcaaattgaaaaaaataaagatacccacatacatttttttactagtttttattaggttgttttaagtaatatatatatactagcaaaaagctacgtgcgaggcaagtatactaaattttatgctagtttttttttatgttagttgaaagtgttataattaaaaattaaagaaaaa

SEQ ID NO: 110299 - DNA, 574 bp, Cannabis sativa
gttacccataaatttctcataaattcaattaaaatttaaaagtaatattaatttatttaaaaattaatattaaaatacatcttaataaaaaaaattattatttttgaatagaaaatgattttaaaaaaaaattaccatgaatttttcatgaatagatattataaacatattacggtaaattttgaattaagatgataagtacaaatacaatatagagactaaggaagttgagtgcagattgcgaaagaaaaacgacagcaaatgcagacgcatacatgtacaaacgacaatatatattgcggtgctgttctgtttgtactactggcattatcatgatccacgtcccaaaacaaaaatcaaagggctatgattataatctttctagaatcattaatggagagatctttaatttcaattatatataattaatatttctatctacacgaccaaaaaatgaaaattataatatcgatgttattcactattaggttattttttttttgaaatttttacactaattaaaaatctaaaatgataaatttattacattaatacctatacacggctaaaccaa

SEQ ID NO: 110300 - DNA, 1003 bp, Cannabis sativa
tcctgaccactagaccatggaaccccttgttgatatgttatttgctttaaaatttttatatgaatatgaacaaacgaaaattaatttaatattttcaaaataattcttttctattatgtttcactctagttttgtttttttaaggtattctttggaccttgcattaaaaacggacccaaaaaaatatcaaaatttgataagatttaattatatataaatgtttggcattcattagtctggttgagtaggaagatgaaagcgcagggtaggcagacatgagtattcgtttcaaataggtaagtctcataggtcgtgaggcatacattgaaatagtcttttctttttaagagctagtcgaagaaggcctatagactagatcaaatcattcatgaaccctaagtgacgaccctacactcgtaactcctccgacacgtgccctaatcgttgcgctgaagttcatttctcgatttttcttgcacttatgattgtttccatccacctttgaccttaataaatcgaatatgaaggagtcaatcagtaagcgatacgaattcttggtcaatttctcgcgatcgaaagtttcctttttttaatcgaattagtttggtgtgaagctacattgtttgtctttgatttgtggaccgataaaatttctgatattgatcaaccaactcaatgaagtttggcaagtattcctttcaattgagcactttctttgtcttggtctaaattcagcttcacccgctatagcattttaaataagtagttattgagtttactaatcgtgttaatttttcttaatcagaagtacaacacaagaccttaaggaattaacatagaatttcaaaaagtaacccttttccttttttaagacaaaaatggcctttggttaggctcttcatttgaaaagggaaatttgaaaaaatatgcatgaaataccttaaaattttttccctaatctaatacattttaaaatttaaaaaatatgaccactttacaataa

SEQ ID NO: 110301 - DNA, 2297 bp, Cannabis sativa
  modified_base (2262)..(2272): a, c, t, g, unknown or other
tgaactgcaagaaccacaatatagctgaagaatgaactcaaaagcaattattgttgtcattctttttttcttagtacagttcttgttataatttctaaatcatcattacagaccttcttccaattacaaactgcacaatgatgcccttttcatctgctagtttcttcaaagctgatcctacaaaatatgtgtctccaagttaatagaaaacaaaagaaaatttagaaaagtaacagtaataaattcatcagttgtagattacttattaacaaattaacaaaagttgccaaacaatttcaccaaagttgttatattatttaatcaaaaaccatggcaccccaatttctattatttacattacatcctactatcaaagtgatgaaaacaaataaatgaaactcaaaacagttaccagttggcatccatgccttacgaatcgcatctctatttttcctgcgcccaaacgtcgtaatgattcctattacagctaaaagattttttgtaggatgagattcttcattttttgaaatgttctttagaatgaaaccctcctttctagctgcagtcagctctgtttcaagagctgataacttcttctgttgttcgctagataaccaaagtgtcactgttggtggccttctcaaagtttatagatggtttcacaaaatagaaggaaaaagaaacattgattacctgcaggctatagttttgagagtatcatcatctactgatatgatagattgaccctgagagaggacaatttcctcatcaatataaaaattgcattcagctcaatcaaagatttcaaattttacataatggtaaactttgattccagtctccaaattttgaactatacacttaggaaaagaaaaatgcagaattaagctaaaactttaggccaggatttcatgacttaatgaatgaaaaccataaaatgtaatgtctttgaccaatctatgaatatgttatcatgtacatctcactcaataattactactcaaggttaagtgtgcccaatgtggatgggagtacaattatttgggactgttagtagatggtgtttataagttgttcaaagatcccattaaccgaatcaaccagttactttacatagcattagaaagcagaaattccattaatggaaacaccaccaccacaatcccttgaatacagtatacagggaaggggagaatccacaaaactctgaaatgcctcaatgttaaaggagatgcttatgaggcaatgaattcaacaatgcgccataattatcgaaaaagatgattgattgacatttcattatccatcatcttaaaaagttggcacctctactgtctccacaaagagtctttcaaacaatgttgagagaagggcatgtaagggaagtaaggctatctttctagatgtcctcaaagaaatgtcaactcatgcaaatcaacttaatctagctttagacaaatgtaacttgcatattattaaagtaacaatacattcaaaatttaaattcctctacattagcaaaaggaacaaaacacacaacattttaattctttttctcttatgaacaatttaattgatacaaagtatcggttcacactcttcgagtcagtataactcctaattttctttcattttattcattatccatatgtgaaatgaaatatcatatccctataccacttttatgtaacattaatcccataataattaaataaacaaataaaatacctgactagctctttgatcaagttcttgaaccaaataagctctaatctctgcatcctgccacagactatcaaaaattcaaattcatcaaacataaatcacgaacaatggatcaattataataataaaaaaaatgaaaatgaagctcaccggccggcaacataaacagtagccatggttgccaacatagtgagaaaaagaggggaaactcgggagcgagaagcggaaccagataagcgattgttgtgagaactccgggtatgcattttgaatgaaagatacggtgattcagtgagttgaaggtgtgatttcagatctggaggaacacaaagctatgtaagccctagccaagattgagatttgtaaccgaacaatagcttagctcagtcccaacttctcaattcatcagtgtcgtcttggcggttttgtagttttaactgtttttcccttttgacctttccttgaggcgtttggttgggaggaatgaaaatataggaataagaataagaatcggaatgggaataggaataggaatgnnnnnnnnnnnaatttaaaatacataaaaaaattga

SEQ ID NO: 110302 - DNA, 2449 bp, Cannabis sativa
agacttccaatattaaagagtaacatgcgtacgtgaattccattaaaaccgacacatctcgtacagtaataaaatgagaacgtttggatcagagttgataacaccggaacaaaaacatataaaaaaacagttgatcatgtaaacaaggaactcaatgtcagttcttctactaaattaacatgataccatccataacagctttacaaaataaatttcagcacataatttttttcaaaagtactttttttatttaagtttataaaccatacagtattgataaatacagtgcacaaattttctttttcatccttaatattaggttgtcaccataacaagaaccttaactactcaaaaacttagttataacttaatacattaacaaaaaaaggcatagaactatagcatgtaccttagtttacattctaatattcttggtttcaaacttcttattgtcagaaattccatgtgctcattttgaattctcctttcacatggaatccaacatttaaggtataagtgttagagaatgtaggtgatgtaaaaacaagcaataagtcaagaaagctacttatcaagcggggacagagagagagactccaagcataaaataaattaggttgaaaataaacaataatctcagtaggaaatctcaatataagatagcatcaccactagatatttaaaaccaagcataaaattctcactcccactagtaattcaaaaaaaaagttaagaaattaatacatgagtaaaatattctaccaagcattaaaatttgcaacataatattcatggggggaatttcatagcaaacaaaacttcaaatcaaattgtttccccctaatctctttattctatgctagccatattctctatgagcaaaaaaattatagcacagagacaaacatataaaccatttagttaccttaccagtattttcgattacttgcttcaccatcggacgatgttcatcgccaccaacagatttctcactacgtccttccttagtttttctttccctgtccttctccttctctctatctctctccgtcccaccatccttaccctccttccgactagaatctctatccctatgccttccctcacccttcccaccactactacccttcttcaactcctcaatctcttcatacattcccatattttcatcttttctcttactcttcgtatcccctgatgctttcgacgacttcttggagccctcaccactgcctctgtgatcatcatcaccaccattccacctatcagttgctctttcatcagccctatccttgcgcctctttgacgaactgtactcatccgaatagtccccgtttcctgaagcactatacaagtcctttccatccttcgattcaagcttccgtttttcactcgatattaaatctttcgaaaccctaactccaccactctcttctttccccttccgatccttgaagctcaaatccttctccgaatccgaatactccttcaactccttcgaactatgcttacttgacttatgcttcgaactcctcggcatcactaaggaagaagaaaaactcaaaagacgctaatatcgagccccaaacagtaacgagtatccccaaaactcaaatacaaataaaaatactcactttattcaaaacctaatttgaaatctttttcaaacaagaagtaaagccgccatatccaatacaacaaaccctaatttcaacacccgggcgatacttagccagacgaatctagataacggcaaaaccctaattcaaacgcaatggtagtactcaccgcaatacttgtttaaaccataaccgaagagcaggaagaactaaccggagggagacagtcgccggcggccggaacaggagaaatggatcgaaaatggtgatgcagaaatgagatttgggggtatggtagggacaaaaatggaataacaaaaaatgttgagagagagagagcgtgagagtgtgtgtgggagcagagaaagaacactttttagactatgatatttagatttgggacatttggtgagataagtaattgaaatttagtttgacgaaattgcccctccctaagcagttttaaggcaaattaagaaagaaaactaaattcacgtcgccaagagcaataactatgtgacacttcagcctaaagcgtcaaaacgacggtggattgggattgaagaggagctgccttgattcggaccaaacccatcagattcgtcccacctttgtggtggggtccacctggagtaagcgcacgttttaaatatctatctattgggcttgcctctaacttgaattgggccacggccctagcccgatcccttcatcgtggcccaatcgttcgaactatatttccataagtagaatttacgtggagtatgggttttttaaaccttttatgataaatatggcataattaactatggacactttatatggctttt

SEQ ID NO: 110303 - DNA, 620 bp, Cannabis sativa
  modified_base (126)..(131): a, c, t, g, unknown or other
gagagaagaagagagtggggaggcggtaatgtaaatgggggtattttagggatattctaaaatgtgtcatatcccacaaatattaaatgttatgtgttttaaaaaaaaatattaagtatatgtaannnnnnaaaatcaaatttcccttatattaattaggtttcataaaaataaaagtaaacgacgctcttggcatggatataatcatataaagtatgctataattatacttttaaatatggtgattaggataggaagaaagggaaaaaaatcaataaaaataaatgtatcaatgattttaattttttaaatctagtgcactcaagtaaagcaattgctaatacgtcgtgtatgtatataaaatataaaattaacgaaatgacaattccccttctagaagttcagtaacgtcaccaattattggagttacaagctgatgtaattgtatgtcatattttaataataataagaggttttgatatcgtccccatccccaagtgtagtttgggtcttacttaaattaagtgttatatataaaatattagaaaattctacaatgcacccctttaaaagggatgtattgatgcactcctatttattttagcatccgaaataatttt

SEQ ID NO: 110304 - DNA, 674 bp, Cannabis sativa
  modified_base (28)..(31): a, c, t, g, unknown or other
  modified_base (61)..(64): a, c, t, g, unknown or other
  modified_base (91)..(94): a, c, t, g, unknown or other
  modified_base (123)..(126): a, c, t, g, unknown or other
tttagaagttcatatttagagtgttaannnnagttcatatttagagtgttaataaacatannnntatttagagtgttaataaacatacttnnnntttagagtgttaataaacatacttgtgannnnatctaagatcctggtaaaagaatttccaacagttggctagagtgatgattgatgacggagcatcattgaacaatctcttcaaactaaccctagagcaaatgggtttgtctctagaggacctagagccattcgattagctcatgtatttattcaatggggatagaattactccctatggttttatcaaattaccactaattgtcagcattgccttgaggtagaatgttattaagtaactttcatagtggtcgagaccaagttttcgtacaactcaaggatccgaagttcaaccctatagaacctccaagaaattctcgtccatctaccttctagctgtcgaattctcgatcatctaaccaaagagcaacctacgaatgctacaacacctcattggaactcacaaagaagacctcctcatgttgtttcaatagttgtgggaacaacccaaacctctattgggttttgtgccctaaataaaactcatttataatcaaatttacttaataataaagatcagaaataatatttttatgttgcatggttcaaat

SEQ ID NO: 110305 - DNA, 779 bp, Cannabis sativa
aaagagtgaaaactaaccgaaaatatgacccgaaacttagactaattttagcctaacactagggctgaccctagtggagagcaagcaagtaactgctaggttgatgggatggatgtcaaacacaatctctgaaccgtgcttgggtcgactcccactataatttaatggactatgttaaacttccatcacatgcagtctaatactacacatttatttatggtttatttattgtctttttaattatattattttctttatcaaataaatatattatactgtaatcccaaaacctggaccatacacgtggcacctggagatactgccaggtggttagaagagtttaattacgcgaactacctagcttattatcagtaacaaagagaccctagctcccggagcactttgcgaatcctgagaataattctcctcaacaagcaaaattacccaactgtccagaaaggaaggtccgggaggggcttaacctcccgtatacttaccctttacgaatggtccccatctgtcagcgcgtaagaaggaaatggtactgtagcttgccccttctataccaaagacaatgcaaacttcccataaagtaaatcatcgtggggatttccccattacctcttcttccatgcccctttcccttacgtctctaggcggctcatgacctcgcctatcacataaactgtggacatgtcttgtgttgtgaaaaattgtatacgcaagtgtacgcaatcgtaacaagtaataaagtgataaatcgagtatcgtctccacag

SEQ ID NO: 110306 - DNA, 1082 bp, Cannabis sativa
  modified_base (1028)..(1034): a, c, t, g, unknown or other
caaagaatggagaaaatgatggcttgtctccggactaatcttggcgacctggacgaagactctaatgaaaatgctttggaggaacccaatgacaaagagaacatagtgaatcccacaaatgttggaaccccaactcctacaaaggacaaaagaaagcagaaggtgggcgagcttcagaccaaaaatgccctaataccccttaagaaaagtgtgaacgcgaccaatcagcccttacgaacacagaaggccaccaacacctccgggcttggacgcccctctgctccacaaggcaaagttgtgccaaacaaaaggtctggtgcaaaagtaccaaagcctaagagaagaagaaactgccttagtgataccattaatcaatatgatagggtagaggaatttttctatgaagacaattagtcaaccgtagacctttggaggcgtcatgatgccaaatacgagaaagccaaaggagaaaatacaagacctcgagggaatgatctgaggaaccatctaaatgacaaggttcgtgaacacgaccttccaaatagtgacactaaaagactggaagatcaaattgctgcccttaccaagttagtccaaaagcaatgtggggccctcccaaattaggaagaaaaaaatttgaagttatgcgttagacaaatcattaaagtcccactacatgaaaacttcaaaatgcaacaaaagttgtgatgggcaaacggattctaggacccacatgtccaaatacaactagatggtgcaagtggtaagagtaagtgatgacactaaatgcctttgtatttcactaacactaaccaagtatgcggaatactggtgaaagaagttgttttttgtatcaattcacaattggaaggacttacaatctaccttccacaaacaatttatcgctgttaaacactatgatatggaagtcgggtccctcacctacctcaaataacagccaggtgaaaggctaaagaacttcatccagaatgatggaaaaagaaataattgggtaaatactattttgnnnnnnntgttttgcaaaagttactgattggaccctgtgttttgttaaatgacaa

SEQ ID NO: 110307 - DNA, 560 bp, Cannabis sativa
  modified_base (497)..(513): a, c, t, g, unknown or other
acataaataatctaacatcctaaaatataaatttcataaaacgacatataacacgtataaagtttaagattccttacactgaaggcagtgaaaataagtgactccatccattcaattactctaatcctagattctctttttgttgcagggtattgccaattaatgaacctgaattacttttctttagtcaaatagtgacaatttacacagtctttcacaaaaatatgagtatgaccttaaatagagtaggctagtacttaatgcactatagggttgatttatagagagtgaattcgaattgaatagagaggaacgcttttttttattcacttaggactagggttttagtgtctcgccaaaaacttgtaaatcaaatatttatcatattctatatataagctctctctaaaatagggtttagattagatgggtttagaaaaagataatggactctaaacaaaaaatctaggccgaaatgaggaaattacactctatannnnnnnnnnnnnnnnntcttttatttttaccctcttttctaaagtctatcatttttacctctt

SEQ ID NO: 110308 - DNA, 580 bp, Cannabis sativa
ataaaaaaaaaatatgatttttttttttgttgggttttttgttcttttcatattatttggctagctatatatattattattatgacaagaggttgctatatattaaattgtgtgatttagttaatacagtgtgttcgtagatctttcagtagttgtaccgaatgctagctgcgaaccataaaatattgattactattctttattaatgctaaaacaattaattatgaaaggcaatataataaatatatatggaagagttatcgaaatacacctacgtacaacaacatgacaacatctgagaacttttcacaaaattttggtaagtaaatctagtatgtcatcgacgacatcatctgtaaaacacactaacacgattacttaatttattagaagagtaattagaccaagacttacaatagtagactactaatcactcacttatgattttactactaattaacacttttacaacacactattataataaatagggtaaatagtggcataagtacccaaagttttagatttgtaagcggcataaacccaatgatttttattagtggcataagtacccaatgtt

SEQ ID NO: 110309 - DNA, 513 bp, Cannabis sativa
aactttgaatctacaataagcatctcaaaatgaatgaatttgataaattagaaaatgagaaaacactattattcattcgtgacttgaaaatctaaaaaaacaaaaaaagaaaagaagatttgataggtacagttaacacttattaaatagatatgtggtgaatagatgatagatgtgggatccattttatgtctttcggcatgtgtgtttttagtataatcttctactaaagattgttctaattattggacctataataatgtcctaatcaaagaatctatagacaaactgtgtacttagcatgcttacatttgtagccaagaacaaatcaaattaggaaaaagcatgcttaaataacatgacccacattcgcacgcgcatgtacatatattatatatacgtcgtaccttgataatatatattacaatattcatggaaaattttcagtaatatactataggaaaattctataatacacccccttaaaatgggtatattgatacacccctatct

SEQ ID NO: 110310 - DNA, 872 bp, Cannabis sativa
  modified_base (26)..(34): a, c, t, g, unknown or other
  modified_base (794)..(840): a, c, t, g, unknown or other
ttaaataacatacttgttagtaaatnnnnnnnnntggtaaaatatttccaacattatgatctttgccattcctgatgattttgatactatttacccaaactagcttaggtttgttcctttgtggatgcatttcatcccttttggcactaagtctctcaagcttgcccaatttgttgttgatgttgttggggatcttgttgagactcatatcgcctttctatgaccttatcactctgttcatgaggatcagagttttgtttgatatctctaagcctttgcacagaggcatgaatgttcattttaggaagttgtctatcatcaaatggctccaacttctctatgaaggcatcaaaaactatttctaccactgtggcaagttagaccacacttttaataagtgtgacaaatttcttaagcattttgatgatcatgcttaccctctttccttaagctacaaggatgctctcaaagccccagtcgaatctgtttataagaaaagtatatttgagctctataactctatttctcttgaggagtaccccaaccatgtcattacctctagccaaagtcctcaagacgttgttgatagattcttagttctaagtattgcctatactaccctgcttaatgtctcctctcctagttcctgtgaagagatgagtgttggccctactcagacctctttgggctgtagtttccccatgtctatagagcatgttatacattttctcttctcacattaaccctagcccaatcatggtttctgatgctgttactgttggaattattttacnnnnnnnnnnnnnnnnnnnnnnnnnnnnnnnnnnnnnnnnnnnnnnntgaacttctaaaacgattataagtaaacacat

SEQ ID NO: 110311 - DNA, 538 bp, Cannabis sativa
ttaatcgtgtaaggctaaataaaaaaaaaatcgttaaaccaagaattgtcgttagataaacacttttaatatataaagatataaaatatacattattattatataaatatcttaggaaaatatcttgattcatgtatggaattgggactttattagggtattattactcatggctcatgctaagcacactcccaataataattattattaataaataaaaggggtaggggaccactttgatgtcgttttatgcgtttggttgtcgtttgcgctcaacagaagaaaccgttgaatattccattaactgtcccacccacacatccacaaacacgagaatcaccatcacaatcacaatcacaattaggtaagtctataataggacacttttattagtaaattttcaaataattttaaatagtttttaggttaaaatgaaagtttcattagtttattggacgcttaattattcttttaatcaaataaatcaaatataaatatatatatatacactaggtgattgttacgtgccaagccacgt

SEQ ID NO: 110312 - DNA, 708 bp, Cannabis sativa
ggcataaaacccaacacctttatcgagagacgataggtggtgaagcgtacaataggcacatctcggagctaagaaaagggatacaatcttacttgccccgcaagtggatgtatatactcccttcgggtgagatcactattctagtaggggtgcctatatacccattccaggagcttacctttgttgagattgctataaccaccgcacagttgcttagcatgttacctgccatggcccgcaccaaaaagagcaatcaggtaggtcttccagcgttcctcatgcgaaggaggttattaccaagaggagggtatcaaatgacctgaaaatgggtcatccgacgatgaggccatggaagaaataattgaggcatttgagaagtgggtagagaatgaagctaaaaatacttttcacgaggtcgccaccaaggaggaaccaactgagggatctaagcaagtcaccctcaaagtaaggtaatttaccccaaaagtgcttaaagaagtccgtactcgcccttgccaaactgcttagtctccttttgttgcctcccctagtagtcttagtgaggcacagttcaagcatgtggagaaaataaccgtgaatggcaaggactaccaactgatactctgttgagttttgtgccctaataaaacccatttcaatataaacagatttacttattaataaagatcagaaataaagatcggaaga

SEQ ID NO: 110313 - DNA, 522 bp, Cannabis sativa
  modified_base (66)..(67): a, c, t, g, unknown or other
  modified_base (459)..(482): a, c, t, g, unknown or other
tgcaacataaaatgcagtttctgatctttattaattagtagatttgattatattgaaatgagtttnntttagggcacaaaactcaacagttttccataatcatcaatagaagaggcaattatgttctcttcctatctcttcttcagacaagcatgaaagtaggttgagttttcatgtccaaatttcaaccaagaaatttttgatttctgctttaagaaacttgcataattcctggcatgaacctgaagtatttcttttgcaatcttttcttcttgtaaaagctgaagagaagaagtattaagttgtaaatcaagttcaatttgatgaattttggaaagggcaatttcatgttgttgtgtcacatctcccacttgatcattattaaacttctttagaactttctttaatctgttaagtttgaaaacaacttgagaaagctcatgttggaaattattttannnnnnnnnnnnnnnnnnnnnnnngtatgttgattaacaccctaaatgtgaactttctaaaacg

SEQ ID NO: 110314 - DNA, 661 bp, Cannabis sativa
agatcaatattctatacaaagtaaaccaataaaacaacatgggttggcagaagcattgttcttaagaaaattttagtgcattgcttaaggttaagcttgtgttgtgcacctagtaatgtatataaatgtttaaaaaaagtgcgtattttgagaagagactagaaaagtggaggaagaccggggctcatgggataaattcatatttgtttgttgggtgaggatgccaactatgtagccttgggtcattctgtgggttgcattgtgaacttgagttggtttttgtacctgctcaagtccttcagaggcttagtatgaagggattaatattcagaattaataaaattagaaaataagaactaatatacacaaataagagtattaatgattctgcataaaatattgcacttgcttcaactcattacataatacatatgttgaattttttctaaaaaatatagtactgttattattattttcactttttctaatctgagtgcaaacaagtaaatacatcaaagaaaaatgcataacgtaaatattatgctaagagatcggaagagcgtcgtgtagggaaagagtgtagatctcggtggtcgccgtatcattaaaaaaaaacaaaattttcagtgcaaaaacaactgcggccaattctaaatcatga

SEQ ID NO: 110315 - DNA, 527 bp, Cannabis sativa
aacggccaaaaaagttcaaggcatgatttggtatatgtcaaagttcggggaaaaaattgctaattagcctatttttaaattaaaaatattttttgttatgaaacatatttttatttttttgttttaaatattaaaaaattaatgtatttaataaacacattttgatgttatgatttcacttttgtaatcttaaaaatttaaaaataagaagtgttatctctctaaacatttaattcgacacttacttaatttattatttcattttttatctcaattttttgaatgcttttaaaataataaaaaacgtggagttttatattagttataaaattaaatatgtgagatcaccaaatattaaattatgtgttgagacctctccataaaaaatgtggcttttgccgaggttttttcaaagcttacgacgaataaacatttagggggtgtttggaatgggttaatgctaacaagggaaaggtaatgtgaaatattaccttgtttgttttgagtctttagccttggaatgttat

SEQ ID NO: 110316 - DNA, 539 bp, Cannabis sativa
  modified_base (27)..(39): a, c, t, g, unknown or other
tttaacatagtattatataaaaatatnnnnnnnnnnnnnatttaatataatacaatacaatatgacttaacaggacgttctaaaggagccctaaatgatttaaattatattaaaagcatttaaattgtctttttcattgtttcactttccattaacttagagaatctgctgaaacgatctagtggggactcttttaccacatggcttacatatgatgaaggtggactcctctgtttttttattttgttgttaaaatttcaaaatgatagtaacttgatattaataaattatttatatattttatcaactacaaccactttttaacattttcttttattgttttgccgggcggtaaagaaacatctaaaatagtataccacattggagcattatcttagtatttatgtcttattcaatttatttatgagttcagttaggttatcttacacccaactcaaatcctagctaatacttgtaaaaaatcatataaaaagtatcacagaaaaaaaaaaaaaaattaccatatatactatattttt

SEQ ID NO: 110317 - DNA, 579 bp, Cannabis sativa
gtaaaataatttccaacaattacgaccatatttctaggctcatcccatcaaggtgtacaccaaccaaccacttcgacaggttttataaaaactagatgcatctggtcagctattaaaatgggcaattaagctagggcaatatatgatcacatatcaaccaggatagcaataaaaagacaagctctagcaaattttatggctgaatgaacgaacaatcaagatcttaagattgaagatattgctaagccatagaagaaacaagagtaagagcagaagcaaaaactagagaaaaaggaagagcaagggctgatctagaaactacacgtagatgggttatccaccgagcaactttatggtgcaggaattgctttaataacccgataagggaaaaggcttcatggggttaaatttagattccatgctttgaataatgaagcaaagtatgaaacattaattgctggactcaagttagctaagggggtacacactgatatagtgagatttctctcacctagaaactcgagaccagactcctgtttggaggacacgtgtattcagttttccaagaaaagctgagat

SEQ ID NO: 110318 - DNA, 713 bp, Cannabis sativa
ttttttttttttttattttacaaaccatgaaaccatgctatgtctacttctccaactttcttaggacaaatcataacaattgtttgaatcatactttctttaatatcccttataagctagataggatccttcagctctcctctccaaattttagcatttcaggctcttcaaatgttgtaaactaggctagccaaagcggctactaagacttatttcttgaatttattagccttagacctgcctatccatcgaataagattaggcaaagaagtagaacttgctctccactaaagccaattctttatctcctacagacaattgatagaaaattggcaatcacagaataggttctgtgatgtttctttttgtttattacataaaggaaaacattcttccacttgaaaacaaaatctgagaagtctatctctagtttttaatctgagctgcatagtcatccacaggacaaagctgtgtttgggggtgttgaatctctcccacacctcctagctccactggtttctactttgtgggggacagaacaatttatatcctgcagccactgtgtatgacaacaatggatgatcagactcatctgacaaggacttgaactgatcttttacagaaatcagtcttttctaataccagctgccatgtggtggagctttgtgttgggttttgtgccctaaataaaacccatttcatataatcagatt

SEQ ID NO: 110319 - DNA, 2612 bp, Cannabis sativa
aatgataatggaaaactcagaaatgcctagaaaatatcatattcgtaaagaagaaacatagatgttaacagggttaggagaaaagataggtaggtgtgctacagtaccagctccggacatctccaaatgctcagggatcaatgcttccttcttgcttggttcccctgcatcaaagaatatgctgtcacttcaaaatatcagagctccttcccggttatttttttagatgtatgtattcctgggacatatttactccgcacattctgaccaactttaattgctataattcctctgagtttcccgccaccctccccctaaataaatagccagtacatttaaagaatctaataatttattttccctagaaatgctaacttggtatgcaagctcaagaaatctatttatgttacagcgataagctaaagcaggtacctagagttaatgttcacattcaaactggttaaacttaaacagtgaaggttttattaatattgtcaaattacttaccttcagaatctgacatagatcttcttgggagttttgactcactttcatctgaactactttgatatctgctactttcattgggaacctttcgttctgatgaatttgacctggaccgtcttctccggtgactcttggatttcccctctctactttcctttattttgtcatttgagtaatgcttttcatcagcagagctagacctggagcgccttctgtgtttagctttattatcatcaaaacctctcaaggatgacccacttcccttgtgatgcttagcctcaacagatcttgacctggatcgtctcctaccccgatgctttggttttttccccttactatcgtctaatttttccttcattttatgcttgctgtcaacagatcttgacctggaacgcctccttccacgatgttttgatctttcctctctggtttctctcactttgtcatcagagttaatcttatcttccaaagagtctgacattgattgccttctatcatcttctttatcttcagtttttgcttggtttactttctcatctgagatatgcttaccttccaaagattttgaccttgagcgccttctgtcacgatgctttgatttttcacttttgttaccatccactttctcagtggaacggtgcttatcttccacagattttgacctggaccaccttctatgtttggatctaatctcatctggactttgtggagatgaccttctgtgatgcttaccttctgcagatattgatctggacctccttctatcactatgctttgatctttcatggcgagtttcatctcttctgccatttgagtgatacttgccatttggagactttgacctagagcgttttctctgcttaagcttgtgatcttcatcaattcttggagacaatctatttcctctggtgtgatttggtgatcttgaaccagcacgagttgctctacgtggagaaccttcccgatgacgtttaggtgacacagagtcaactcgatatgattttcttgttcctgggctaacactcctactcctatgctttctagaactagatgaatagtaatcgcgtgatctaattgaatctcttcgtctatatctgtcattgatatccctaaagtctctatacggacgtctctcattgtcatagccatgacgagacctaaaaggtgatctagatcttcgatctcttgggtggcgagatggaggagagtaggaaggtgactttcgccgtctttgataattgattggcgatcttgacttggatcttgactttgctcgagcaggtgaaggtgacctgcaaataaagtaattaaaggaaaaaaagttagatatttattaatataatgtacaaaagataaacttagagcatgcactaatataacagaacacctggcttgactccaaaatatgcgagatggtgagagactgtaaattaaaattatagagcttcttgaaattagaaagatgacataccgagattttggcttctcttccttctcttcagtcacaagtccatcagcttttaatttcttacttatttcagcagctcttgctgctgccaattctgtcgcagatttcattgttgcagctcggttagctgcttgttgtgcagtcatggtttgctgcatcactaaagcttgctggaattgtctctgttgcatgagaacagcttgttgcatcatcataggcaaggaagaagacgctaactgagaatttaaggcagaggatctcggaggtagtgattttgccatttcaacattcatggggcgacccccaacatccatattattcaataataatgcagctgttgcttcttcaggttttaagtattctatgtaggcgaaatgctttgagtcggtgatggtacagtcaacaacagtaccacaaaaactaaaaagttgtttcagttgctcttcagtgagaagtgggctaagattgctaacttgaagtgttttctttagtgcatcagccctcccagctttgtcaggtgaacctgatcagaacagcattattccattataaaaagcaaagaataattgaacagttaaattgacataatcaaagaaaatcattgttttacatgaatagaaataaaaaaaaaaaaaaa

SEQ ID NO: 110320 - DNA, 510 bp, Cannabis sativa
gtgggtcttgaagagcagctttaagtgttttaggttcaatgctaatgtgagatgtagcagtaagagctttcggtttatgaatcccatctttggcccttgtgatcattggatgaatattcacaggttgggacatgatagagggctgagtttgtatgtgatcaacagggtgtagagggggttcgggttcatgatcagtggctggtgcgaaaatatggctggtagtttgtaaggtgggttcagtggggatgattccagggtgtattgaggtattttggggagtctgaatgggagatatagggggagttataagctgggaaggtataacaggtggttggggaagtataataggaaaagattgttgctggtgtgatggtgaaatgggagaaacagtggactgtttgggaaaaagagtatggtagggaaaatttctctcattgaacttgaccgttcttgctatgtaaatgcgacccgagggatgcatacacttgtaccctttatggctgggactgt

SEQ ID NO: 110321 - DNA, 839 bp, Cannabis sativa
cattcctattcctatattttgattcctcccaaccaaacgcctcagaaccctatagaaagcaacttttcttctcaaacaagtgcaatcatgggtattaaaactagctgcccaaaaatgcagaataatataatgtatcaaaaattatcaaaccatgttgagaaatattgtaacaactaagagatgtgtttgtgtataaatttatattaataagagtaatgattaactaaaagtaaatacacaatatcatagtgtgtgtacatagatattgttactcaattaataatattatacaaccttatagagcatacctgacaaatggtttctgcaataacaaattcattcacactgtactttaaatgggcccttaagaaatcctgtatgagaaagaaaccaatttcttaacaccatacctaaccaaataaggaacgacaccacaataaggagaatttctgaacaagctagatccataaacattatacctcattaaaattaatagaatatggatgtcgcctataaaccaaaatgtatatacacatttcaggatgcagagactgaaatatcccactagtttaatagagatacatatatacttatttggggaaataacgccagcaataaaaaatcaaagcatctcaccacttcggaatcttcatttattcattcttttttacttgaaaccaaatctaaaacagatctgcaaaagcaaaaaatattaaaaaacatattgttaagggaatcagttagatcagtttattcagtttgtccaactgtaatatttctgttataaaggttgttacagtttgttattattctggtcttactgttattcttttcagttg

SEQ ID NO: 110322 - DNA, 702 bp, Cannabis sativa
  modified_base (634)..(634): a, c, t, g, unknown or other
aaaaaaaaaaaaaaggaaaaaattgaatatgaagaaatatatatcatattagagcccttcctttatctttaattactttttgcttccaaaaaataagagccattctttatatatagacacatgaaccatatgcatcatttataaatgataaaggtgattaatatgttagcttcaaaggtagccgatggtgatatgttcactttattttctcattatgaatgcaaaatgtgtttagttttacaacttttgtagcagtgtactacattttctttcaatagtggaaaatctactatatgcactatatgtacataatacataagctttttcaaaagggtgcttctgaaatataactatatgcatgcagtgacattatttttaactacacattgagttatccaataatttatatataacattgtaaaatgtaataattacatataaactcttaatttatattattacataaatacatatatcaaaatgtaactagctgtataataagctatatatacatataaacttatttaagagtttgtaatgatattaatagaaaaattgtatcttaatgttgaagattgaacctatttgaaaaatcgtgtttatgtaaatgtcaattatatatacgaaaatatanaactgtatacgtctgcagaagcagaaagtaattttgttactgcagaaaccagttttgcagtaacaaaa

SEQ ID NO: 110323 - DNA, 678 bp, Cannabis sativa
aatgagattggcaccacttttggttgtgccattattggacgtgcctatgtggtattattgttgtagtgtttgtagagtagtgagtagagtgtagactaataaaattatagcagttgatccttgatagcattgtaacagtaataattgtggagtatggataacagtacgagtaaagttctgtaacgactacgtaataattgatataattgatgactcattattacctaacattctttaagaatcattattcacatatattaatacttcgcctatgttctggcaaccaaaaccagcttttgtttaatcacaaaaatgaaaatggaaaatcaacctttgctttttcttcaactcttaaatataatgaagtaatttgctaataataacttctattctctctctatttttcttttttgagagagaggaaatagaaaccatcacatcttcaattggtcaaaaatatgttttcaaatgttgtctttttccttaatacattatgtcaccacatacatgtacatatttttcatctctagatagctcaaaagtcaaacatcatatatatataagaaaattcaagaagaaaataagaagctagctagcggtactgaatctaatacatagaaaggtaacaaaacaagaagagtcgtttgttaggcttttatttgggcttacattaaattt

SEQ ID NO: 110324 - DNA, 510 bp, Cannabis sativa
gtgactatagtggtggaggtggtggtggtgggggcggaggaggaggcttctgaatcctgatctagtagtggttatattataacgtgcatattaatgtaatgtccatataaaaataattataataattgtatgtgccttgttgtaaccatttatctattcatttcgtaaggttgagtgagtatgtacgtggattcatttggacttcagttgtattgacaagatatttatccttatttggaaatgtatattaattacttgtataacacttgaatgaagtttaattctacctgcaatatatatataattaaggagcataattaataatgtagataatatttagtgactttacaaaaatctatatatttatattgggtactcagcattacttttgtctttataaataaaggcatttttataacatttggtgtggtttggtaacacttttcttttttaattttataatcacaaaatgaaagtaaaattttcgtttttaaaaattttatttttgaa

SEQ ID NO: 110325 - DNA, 663 bp, Cannabis sativa
ttgcggaagagaacgacgcctcctttaccggaaaattctatggggaacctaatttgggggattccggtggaaatagaaggcgagattgagtttcaggaaattgtgaacaaaataagatatgaaacgacgtcgttttataacgaaacggtgcgtagaataaaaggagacgaggaaggaacgacgttaattttcgagtcaatgaataagcaaggagagattattaaaacgacaggggatttggacttttattacagctcgagttggtgtcgttttccgttttacgacatcgatttcgggtggggaaaacccgtttgggtgagtagtggaataatgtctcctgagaatttgatagtgattgaagatagtaagtgtgggaatggaatacaagcttgggttactttggatcctaaagttatggaaatttatcaacttgatgaggagttgttgtcgtttgcttccttcaattctaatattcttgcttagctagttatgttcatgtaaaagtttgacatgtcatttgcttaattaaaatattacataggttaataatttaaaatgtataatatttattatctttttgaaagaattattgtaataataacctgtgacagtcagtagtcccgtgatccgtaagaggaaataccgggtaagctgtgcaatccc

SEQ ID NO: 110326 - DNA, 659 bp, Cannabis sativa
aatttttaatgattattcaaaaaaaaaaaaaaaatgagtttcaatgtgcatttaaatcttgtgcaaacccagcagtaaatgtcaattgttctctctcaaatgatctttaatcattcactatattagaactgaagttctactagggatggcttggctgtagcccccattaattgttgatttgagccataaattcaagttgggagaactcaaaacaccaaaaactttctcatatgctcaatcaattcaagaactgattcaaacaacttatgtgttgtaaatgtaaaaatgagaaattaacattgttaaccataagagtcagtaattggatctatttattacttactgtaaatatgaaacagttgtcatcatcgttcatactcatcgtaagtgtcaaagaaaatttcatctacaggtccaaggagatctatcccagccttcaactccacttgagggtcatcagtctctgcctctgtcaaaacaaaagcaatgtatagggagctatattgtgtgaataagagcagcaaaacatgtacctgaaagtgttatattatttgttataatataatatagattaaaatattcaaatgtgacatattatatattaatatgaaattaatatatattatgtgttagaagttatattatatcatatatactat

SEQ ID NO: 110327 - DNA, 500 bp, Cannabis sativa
atgaatggggttccatctcaaaattaattggctatgggaggagtagcccattcctcttatatattctattatcattccacacattagtaatatgtgactctctaacacgtgccccacttatgtcactactaatcaaggttaacatttaaaaactatcaaaaattacatctaaagccaattctagattattcctaggctaatctcgattgaagaaagactccaaagcggtgaagtcctctccttgattttcgaatgaacaagagaaacaagtccattaccttgagacatcactactaacatgttgtcataacaagccactcgtccacctatttgggttcggccacacgtccacctttttgggttcggttactattagtaatactactgctaccactagtctcactatttaattaaacaatacggctgtaaagaccgcttagtttaatttagaaattagcagttaatcacgtttaattatgaaattatttattgctatttaa

SEQ ID NO: 110328 - DNA, 602 bp, Cannabis sativa
  modified_base (50)..(58): a, c, t, g, unknown or other
tatatagaacatgtttttgaaaaatattttcactttttcaattttaaaannnnnnnnntgattaaaaaagtgttaccaaataacacctaagtaaacaaatagaaaatatttattggttatcaaacatatgcataaatggacttgattcttgcgaaggttgatcatgatttgcgggttggttttggttttacagctatgggttgcttttcgtggggattgcgttgcgaatttgggaaagggtttatcgatgtgttcaggtggcctctgatggctaatgaccgaggttgggtgaggcttggggtggagtgttgtggtggtgggagcttccggttaggggatttgttttgggaatcgcttctttacgatgtttttggttacattctaccttgttattttgtttttcatttttaataattgtgtagatacatcactttgctatggttatgctagtagatctttgtttattctccgcaagggataatagtcttgttttgggacgttcatataatttctattggctcaaaatatgtttctgtttgtagcatgattattcttgtccttgttcagatcagggagtgtaacgtccccgcttcaagcctcca

SEQ ID NO: 110329 - DNA, 1070 bp, Cannabis sativa
ttagacaaaaatctttaaatttaacaatctcaatagttcaggaagaatgtttaacggccaaaaaaattcaaggagcatgatttgatacataatttgcttgaagcttcactgttatgctcatgttacgatcgaaacagatagcttaaaagctccttaatcccaattacctcagtcacttctggcgccaccttcccctcaaaataactcaactaacatgccaccatgaaaccgttgatgtatcgaaccacaaacccagtctcgaatcttccatcctcaacaaaaaatattgcatcgacgtttaccttaatgccaatttttgctttagtccatggctcattgtcatcccctttgcacaaaggacgcaatagaggaataatattacctattccttaagcttttactcattaatcaagcaaagacgtcacaaaagcaacaatatttatctcagatttcctacgttacttccataccaacccattccaagctttctacaaaacctaacataacatatatatttgactaagacgacctaagtcaactcatctcatgatttcttccagctagccatgctcgaatcaagctaaaatctctccctaccgattcaaatccagtcaaacaccaacacttccaagcaaaggaacaagagacaaaacaatgaaagtctgtctcgaccaacacatcacaaactagccaatttaatgacacatccacatgttttcttctaaggctcatacgtgatgtgagacaatttgacattgcccgccacataaggtccttaattttggtggagctttgagttgcgaaagcttcttccaaaagccaaaaattgcatcaacaaggttgtaacgtcctacctaattaagacctctacggtgatttcctaattgtcatgcatgcctttgctaataaaagagttttcttgaaaatcatgccaaatttaaactttttaattacactttaaacttctataaatatataaccatactgttaggttatttttagcctaagtttcgggtcacattttatagttgtttttcttctttattattatttttgagatcggaagagcg

SEQ ID NO: 110330 - DNA, 859 bp, Cannabis sativa
  modified_base (820)..(832): a, c, t, g, unknown or other
ttaaggcataaaacccaacaggttccaggtgtgtgtagtgttgcacacccccttattctttttttttttgttgcatactcgtaaatgttttctgctaacttgctctttcacctttttcttcctagttctcaaaggaatccctattttgagcagcgaatctttaagtgcattgcaaaaaaaattcgatcttcttgaggatgcgagggcagccaagaatctcttaactccgcgatgccttaaagaggctggccttacaaacatttttcttcctgcggggctcttgtttcgattacggagctcctttctcaaggggatcatgcctattcccccattctccttcttgggtcctctactgactcgaggtgtgaagatgacaacattgaagagatcatgagcctcgtatcaatcgcagctgtttgacgcgagggggttatccccaagagtggcccttgcttgaagcctcctacttcgtgaaagaaaggtgtacccccttcttttactcctgacgaccccgctctagaagcaagccaatctctcctttctaagctcaagaaggacttggctaccaagcatatccttgacggctatatgtgtcatcgtaaagagactgcagctcgcctaggggagtcgaccacaccctccttcaatattccaaccaagaaatatgctcgtcgcatgtcccgtcatgcttccttagggggccatgatgagggagagggagatgttgcagagccagaacttgcttaccctgtcgatccgttaggagatgttaaaatgcatgagctcggcaggtatcctcctgttgggaatattttaccannnnnnnnnnnnnctaacaagtatgttaattaacatccta

SEQ ID NO: 110331 - DNA, 563 bp, Cannabis sativa
aaaaatcatcttcatacggtaagtatagctatagactggtttaggaaagttgttcaatacgtaaaaaaaaaattcatacttgtttttcattttagtctcttatttgtaataagataataagtcacttcctctttgcgagaagatacgtgcaatcattaagttatacctataatcacaaaacaagtttatttattgatgatatattgtattatgcatgccatattatttgtaatataaatgttttacttaattatgttatatataattaattattgattacatattcatgacttactaactgcttgaagtagaccattaagctccataaaagctttactctagtgtatgtgtggtttttcaaagatttggtaataattgtggaccaatatacagctagatcattaattaacatgaattgtttcactaaccatatgacatgatgaaattttgttgggaaattatagtaaatggccaaaatcataggagtatgttagtttatgttctcatttcaaaaaaatatagcaaatggccctaaatcataagactatgttagtaaatgttct

SEQ ID NO: 110332 - DNA, 517 bp, Cannabis sativa
aataactatcaataattccaattagtattgaaaaaaaaaaactacatttattacagtatctttatatataaaatgtggctatctaacgtcaattgttggtttaacggtattttattttttattctgttaaacttaacagatgttaactcttacattaagttccaaataaataaataaatccctaaaatataaattaaacgttaaactctaacagattaaacactaagtgatcaattctataaaataaacactaaaaataataaattccttccaccgattacattatttcttattgatattttactttttttattgatatttttctagatggactaattaagctaaaaacatcgagaattaagaacaaataaactagatcaaaagataatttaatacattcaaaacatggatgagggcggactgttaggttttatgccctaaataaaattccatttcaatgtaatctattttatttaacatcaataaagaaacggaagtatttttcattcatttgtgt

SEQ ID NO: 110333 - DNA, 1310 bp, Cannabis sativa
atataattcctaattatattatatgtaataatatatataacatatcacaattttaatctcaaatattatattatataataaataatataacattctattagtggtgtaaacactacattagaaggcatgccactagtagaacgtgtcaaacctgcttgagctaagaaggtgagactagtctctgtgatgtgcatgtgtttcctctctgcacatccattttgttcatgggaatgtgggtagggatgctaaaatgtaatgccttgatcctgcaaaaattttccaaagatttatattctcctccccagttagattggacatattttattggtcctgaattttttttttcaataagacttttgaactgtttaaaaacatcataagcttgagatctaagagtaagtggaaaaatcttaaataaatctgctaaaatcatcaataaagtgaagataatatctaaaaccatgtatgaatggtgtgtgaaaaggtccccacacattagtgtgaaggaattcaagaggttgtgtagccctactggagaacaagggaaagagaaacttgtggcttttttccttttgacaagcatcacagaaatttagatttttaagttaactaaacaaggacatttgagataaaatttgtcttagagtattaggtgaagggtgaccaagttttctaagccctaaattaacatcattagcagcagaggataaaaaaacttgagattgaaattaaaaaaaaaatgtgaatgtttattaataaaattttgagtaaaattgtcatgacatattggattcactacagtagaattacaattattattaaagaaagaaaactccttgctggagagacttgatgaaggcgcatcagacttggatattgtagcaagttggcactggaaagtagattaggagaaattggaagaaatctcaccaagagcatatagttcacttttaagtttctctttgaccaagacatttccggtgtccgtgtccttaacaaaataataatttttgtgacattcaagataaacactattatcattagtgagcttagacacactaaccaaattttttataatagtaggaacacttagaatggaatagaattgtagaggggaagaagaattagagggaataaattctttgcctatatgagagattataagtttctaaccatctccaactataagggtctctgaaccatggtagggaatggcactgtccaggttttccataccaagagcaacatggtttgtggccccaaagtcaacataccatcttatattgtaacgtccccgcttcaagcctcca

SEQ ID NO: 110334 - DNA, 701 bp, Cannabis sativa
ttcgatatggagtctgttccattcgacttgctaccctctttggtagcggattttaatggttaataaaattgcattttaccatgcaaaaaaaaaataaagtcataaagttctcagcaacaaatgaaattgctaaaactttaaaatcaccaaaaaatatagtaataaataaaattaaaatgaggtcaaactcattacttattactattgtaaaaaagatactgaaattgaaagtaattaaatgtattaatatgaggaaaaaaatgtaaataaaaattaaaattttcacaattaatggccgacaaaaaaccgtacaacgatcttcatgacagtaatggagattaatggttgcaatcggagcgtcgttgtcgacgtaaaaaaaactctactgtactctgtatcaaatggaaatgtctaaattgatcaaattttactgttagagaaattgaggccacaaaaccagacccaaatccttcttcaaggacaaatatcactcgtcgaccactagtcatcgagaatcattaaatggtagaaaatcaacaatattcagccacaacatcagtaatcattgatttcaaatatggaaacgaattcctgcacaaaagtagaagagatatgtttggaagaaaaaaaatctctgtatatatatatatattataaatattaataattatgtggatgtccaaatcttttatttattacca

SEQ ID NO: 110335 - DNA, 677 bp, Cannabis sativa
aattaatcataaccatttaataatgatccaatgactaaaaaaattgtaaccatgatggttacaataaaaatgtaaccattagaacctctattgataatactatgtgttttttcaccttttccgtatttgaagtttaatcctttcataaataaaattattctttttcaaaagaataattttttttaccatttattaattaataaccaaatcatttgtatcaaattatataatttatatttgagatttatattttgttatacacttgacatttgtttaaccatattaaaaataaagaaaaaactgagaattatgtgaattgtgagaaaaatgtgttgttaagtagaagtaaaattgaacactcatgaaatggttccaaaaccaaagtgcaattagtacttgaaacggaacatatatatattaaaaagaattaattaaatcaatatgttatgtaaaatgttttttagatcattcagtataaatttagaatttgtggtgcgtatttatatagcatatacttgtttgatttggaatatttaatccaaatttaaattgttatatatattaaaataaatcttcacattttatctcaatatataattatactagtatattgttacgtgcgatatgcacgtatgttatgttttatattaagtattatattatgagttcggaaggaa

SEQ ID NO: 110336 - DNA, 615 bp, Cannabis sativa
tatcttctctttttgtacaattctaatttttattatagcttttattatagttatttaagtgaagaactttattatattaattgtatcattaatttcatattattttttaataaagatgataacgaccttttgagctcgaataatttttttgaaaattctagaaattgaaaaaagttgtatttaaaattacttaagaaatatagaattgaaacattgttcaaatatatatatttaaagaattgaaagataaaaagtaataatatttagtggggcaattatggcacaatccaaattggaggtcgtttccataccctatgaaatatggttgagtctaaattgaagtgaaatttacaagtttgagttgaaacattgtatactcccaaatcacatcttaagttggttttatttggaagcgaagtgatatctcatcatgagtaaaatatatgctatttggttgacatcccttgaaattagaagctactacacatatacatgaatcatcaccaatgaacaaactattttcaccaagacatttaggaggcgtttggttgggaggaatgaaaatataggaatgagaatgggaatgcgaataagaataggaatggaataaaattt

SEQ ID NO: 110337 - DNA, 590 bp, Cannabis sativa
  modified_base (49)..(50): a, c, t, g, unknown or other
gaggattactcactaaaacaataattatgtaaaaccaacaatggagatnnaatgtctcttgattaaaactcattgttatgtttatttgccacatatgatagaataatgatcattttacaacactatgaatagttcagagactattttaaatggactgaaaaattctagttcataataaaagttgggaagaaccaatccattgggtggttagagtatgacatggaaaactataacgaacccaggtaatgaagttacgaaggtgtggctagtgcacatattgtgttttctgacttgtactttttaacagctatatagtcatagttcggaggaacaaaagttctaaataatctatttatttctatcttatgtcaatcttgaaacaaattgtttgattgttgtgcaagcttcacggagttttgttagaatgatctctttttttaagtggctaatgattgtaagtttttgttatttgattgtagaaatatttctatttttatattaaacgatcaactaatatggtggctcataattttattagagcctctatattatatcttaattgtcacttcaattacgaagatgttccaact

SEQ ID NO: 110338 - DNA, 512 bp, Cannabis sativa
  modified_base (56)..(72): a, c, t, g, unknown or other
  modified_base (474)..(487): a, c, t, g, unknown or other
tgaaataaatcatgtgaactatgcgacatagaatgatttatgatcttttattaatnnnnnnnnnnnnnnnnnttgaaatgagttttatttagggaacaaaacccaacagtattacacaccacccaggccctggctggccaatactataactccctccctcggagtattcgagagcatgttgttccaaggcctagggatcaccttattcttaacaggctgggtcctaagatacctaacaacacacagaacaacaataacttgagaagggagaattggcttgactttgttccagcacagaataataatttcaagtaggtggatcagccaaacttaagaaattggtatgatcaacctcctattaaccagcagactggcctggctagccaggagaatttggccaggttggtcgtgttggaaatattttaccaagatctagatttactaacaactatgttgaattaacatcctaaatannnnnnnnnnnnnnacaataaaattaaacacataagagt

SEQ ID NO: 110339 - DNA, 548 bp, Cannabis sativa
tcccaacacagcgaaaaacgcacataaattagatccaaaacataggctaaaaatagcctaacaataactaacacataatttatcaaacagcacaaaaataagaacaacaaaattaaaaaaaatcatgcttttccaaaataaatgaaatagaaagaacttacccattgcaagaatgagagatagaggggaagtcctttgagtactggtttaggctagagtgtaatggctgtaatggggcttgagatgtaatggggcttgagatttaaagagaatgacgtaaaaaagagagataagaggggaagtgaagcaagagtttggaggacaagtttgggaatcaagaacgcttaggttctttatctttgatccacacttgcaccttcttttcttagatatatcaagatgaaccactctattaatggttttcttcattttttcaaaaaaaaaaaataataataaagccctcctccttgttgggttttatgccctaaataaaattcaatttcaatgtaatccatattattcaatatcaataaagaaacataagtatt

SEQ ID NO: 110340 - DNA, 571 bp, Cannabis sativa
agttggattgttttttttttttttgtttaatatctaaattactaaagaccccattatttggtgaggaaaatccttgatacaattatttgttaacttcattgtgcctaatttggttgcttttgcttgtcatattaaaattatattatgagaataatcaataactgatttaataacatgaatgaatacccattgggataatttaatattattaattaagaaaagtaggaaagggcgaagaatatggtttagtttagatgggtaagtaaagctgcgcatggaccgaaaccacgaacgaccgcgcagcggacagcaacgcccacgcgtgggttggcaaattcgctgattgcaggcaccaaagggacatacacctacgacagccaacgtggcatatattctgttatgcttcttcttctgctctttgtgactccttctttattatattattttatttgttaaaaaaaaaaataatttgcggcaaaactcactcaactatcaatttacttgcaaaaaaccatctaacctcatattttggtagaaaaaccctccatattctgtttacatttttaaggtg

SEQ ID NO: 110341 - DNA, 707 bp, Cannabis sativa
acagtatttttgaaaaaatttccgtgtcacagtatttttgtaaaacttaaccaaaattccagtatttttgtaagtttcccattattctatctcctacattccttattctcttcaatgattacactccatctcttctagtaatatttagggattgaagtgcaatccttttttcattcattcattttttttgggcaagagcaaacccttttgaagactaccttaaaaaaaagatagctagtggggtgtgaggaagaacaaaaagaatcctagaaatttcactagctatatatatgtgtgtggtcccaaaagcatgcaatgaaacattaaaagtaaacaacaagacaatttgagcacatgtattttagtactttctttttggctataaagattaaagatagtatctaatgttagattgagataaaaatgtgatatggcccttataataatctcacccacctcacaatttgtacattaaaatcctaatgatttaatagtaatgggcttttgattaatcattttgggtttggattatgggccctttcaaaaccttcaaaagtactacaaattgacatgaaaatacaccaaaaatgttttgtccacgtataggctaattagcaattttctttcccaaattttgacatatatcaaattgtgctccctaaacttttttggccgtaaaaattccccatgaattattgagattgtta

SEQ ID NO: 110342 - DNA, 575 bp, Cannabis sativa
aataaaaaacatacaccaagatgaagcacgtgaggaaagaattctgatacaatgtagtatgaggaatgcaagagggaaagagagaaaacaatgtgaagaagatgatatgaagtatgaagtgtgtttatttagcaaaaggaaatgagtgggttttaatggtgttttagaattagatgatcaaaagggattccctttgtttattttcgtaccacttttggtgaggtgttgaaaatggcaataagactgtgagtaatccagtcaatattttcctgagaaggaaataaagctgaaggggtgatttccctgttttgtcaaattgagagctgtacgtttcctattaattggttaccactgcccgcccactacggtgcctcttcagtacctacctacctacagtgccttttcattaccaacttcatttcttctagtccaagaaaaaaaaatcttaatttctattcacccaatttatttcgtaattaaatctaaaacattaagttcagtatttattttttgacttttttatttttacattttaaaataatttttttttagtatttttacggaattttacatag

SEQ ID NO: 110343 - DNA, 1279 bp, Cannabis sativa
atttaatagtaatccaatggcttacaaaaattgtaaccattgaaacctcttcctaaactattaaaatatcaatgtttcttttatttggaaataaattgtagagtttgagtacccatgtaagcaagacaaataccagacaacgtttgtttattatatacggaaacccataaaaattcataatcaaaattatgattacacactcagttatataatctccattagaattacacagaccgttgcctaggtctaatatgttctaatatgatcactgcataataaaatacggagtagactgacaatttaggtcacaacacgaaacataaacacaatgtatgtattgggttacgattgagatttctcgacactaaccatacatgaattaggtttgcgttgactaattaaacttatcaacctacattatataaacacggatataacacgaatatgagatgatggataacacaaattgtcactctgaggtgtccaagcccaatactaaaattctaaacctaacacatataatcataaaacatgctgaaattcacatacaactatctcataattcataaacctatcacaattagattaaggttactaatcacttaaataagtcttagcacaaattttacatgtctcaccactaaaatttaggaacaacgttattggtaaataattgactttttcaaaattagagtttccctcttatatagtggacgacattagtctaagctttggtgtcaatgcatagctgacgctattagtatcataagcatcggtctaaaatcaacgctattgtaaagatagacattactataacaacgtgctaggaaatgtgagagttgcctatgatggcaaaaagactatctacactgatggttcttagtccatttaggaaagccattaagaatttagaattttcactgtgaaattataaactaccttatgattatgctcgaaccatcccatgatagaaaatgtcctacttttgttagatgattcaactttaataaaacaaggtaaatcaatattttgtgtgctaattgtcgtatattcaataaatcctagttcttgtaagtaatttacttaatcatgagatttgagttcgaagtattattatccaatcaataaacatatatttcttactaggataaattagctcaaaccaaatcatgaaatttctataaaattttgtactcgttagagacatacagtccatgtttggcatcataactaaaaaatagttttttgtttttaaaaacagaaaattgttttttgaaaa

SEQ ID NO: 110344 - DNA, 1451 bp, Cannabis sativa
aaaaaaaaaaaaaaaaagaggagctcatatgacttgttatttttaattatttcaagcctgtaggtgtaaaatctatagtgttcttgctattatatgacatgttaattggaagtaagctaagtttggaggtaagcaagataaaacaaatgttgaataaagagtttgaaataaagaatcttggaccaactaaaaaaattctaggcatggggataatcaaggatagaaaattcaagaggaagataagttttcaaagtgaatatatttctaaagtagtcaaaagatttggtttagacaatgctaaaccggttgtgacaccaattggttaacatttcaatcaaactatgaacaactcatgccttgaagacaaggaattgattacaccaatattgtaggaagtataatgtcatgcattatgatctacattaggccacttttatgcatggtatgagtatgatgagtaggtacatgagtgatcctggcgtagaacattgaaaaatagttaagtggatgctggtgtatcttaatgacacatccaacttaggtatgacatacaactcaagcagcaaggaaccagaaattgtggtggggtatgtggattcaaactatatatgttgaagatttgaatatcaggagatggttttgtttttgaaatcaatgactactcaaattagttgtggaaggctaagatgcaattaacagtggctgtgtcttgtctagccaaatgtatagcctgcagtgaagccataaaacaagtcttatcttagggttgaaaaacttattcaaagaattaagtatctagatagtgaccctcagagtgcccctcatctcaataagaattaagtatttcacaaaaagaccaatcacatttcacatttatattaattaggctccatttcattagagatatcattacaaaacttgagaaagtatttataggtgaaaacctttttgacatgctcactagctaagactctactgtcaaccgagttcaatcactccatcaagctacgtagtgaattgacgtcgataattattaatattggtacgtgaggcttagcttagctactgtcaataagaataattttatttgtatttctaatttaatttagaacctccataaattcaaaaatactatacacgagttcttctatgtacctatatgaggtctaatttactaattgagtattcattattgcatttattattaataattaaacatgatgaaacttctatatatttagaacaaaatgacgtataccataagacgtcactctaaaaaataaataaattatgtaccaatccattccataaacccaatttacagtcttctttttatacaataaaatgttagagatattattacaatggaagataaaccaagatatatacaactcaattgtaaaaataatacaaggacaataaaagagatttgattaaatatatgttacaat

SEQ ID NO: 110345 - DNA, 625 bp, Cannabis sativa
ctacacatttagcccatgacacttaaatacccaatgacccacaattacgaaaatgatcactttattttgggtcaaacttcaaatagcaatacactaatatacatatgagcccatattgggaattttaatccaacaatatgtactggttttaaaattaagaaattattgtgtactttatgataataaattaaatttttgtagatgaattttttggtggcactattaatcaaaattgatacttttatatactaggagagagaggcgaactgagaaataagataaagaaaatttaccttgatatgtgaatctattgaccaaccttgtcaccaccacctgcaacccaaagcagagagtgagagtgagagcgtgaatgagatataatgggaggaaagagagacatgtaagagaaataggacatcccaagcaagaagaaatttaccagtcacttgtgctacatcgtccatctcgtcggtgctgcaagagaagggatttggtcgccagagctagcactgatcagtggttagagaaaagagaaaggagagaggtagcgactgatcggtatggtgcaacgccttggatttcagtccgattggagagagagagagagagtgagagagagagtgag

SEQ ID NO: 110346 - DNA, 3530 bp, Cannabis sativa
agcagcagcagcagcaacagcagcagcagcagcagcagcaacagcagagaagagatgggactcagcatttaaatggcactgccaatgcacttgttggcaatgattcacttatgaggcaaaaccctgcgactgcaaatgctctggctacaaaaatgtatgaggatagattaaagatttcacaagaaaagggttcttttgatgacgcgaccatgaaggtaataaagtttgtataaagtctgagatgtttcttttcatggtataactttcagttagttacaacatattaattgtgcagcaaagaataggtgaaaatgcgagtcagattttggacccaagtcatgtgtcaatgctgaatgctactactgtcgctgggcagcctcctgggtaatgtcttgaagtgtatattttgcatgcttatgttgttttttgtatgtaaacttgtctttatgtggtagtactgctttatttgcaggcaaatgctgcatggtacacctggaggcatccctggaaatcttcagcaagtccaaaatcgcaaccagctacccactgttcctgggccaattcaggttaataatatcttctttattctggttgtctaccatgtgaatctgtttccaattttttttttaccatagtatgtctcccactatgaagcaggatgtaaaaggtgatataatgaactctaaacctgctggtccagaaggttccttgattggcattcatggcagcattcacggtatataatttttgtttcatccatcactcagtttaattttttctagtccttcacttttggaattatgagacttataatatgcttcttgtacatgtttattatttattttcatttctggatacttgtaaatgcaaattataaaacaagctttaccattgtgatatagacttgttatcatacttttatcggtatggtgtgcatgtgtttaatgtattgtattgtttggtgcttcaaaattatgtctagttttaggtaatctcttttaacagttttgcttgttcatacaggaccaaatcaaggcagtaataatttgactctgaaaggatggcctttgacggtatgatgtagaacacaacatttacagtgctcacaattttctactacatgcatttgacatgtgcttcatttcataacaaggaattgaattttgttaggcagggtagaaattgattctgaggatgattccaatttgtgctgttaagggaaatgttgatgcttaataagcttctaaatcacatatatcctccatatgaatgattactagaataggaggacatgaaatatttgttttccccttaattagtgatgtggctagtatgtttatgagctggaaagaggttcatgttttaagctattagttgtgaggtttttactttgttttttatattcttctctttaggcactagaacgtatgcgttctggacttcctccccaagcaaaccctctgatgcagtcatctcaatcttacaatcaaattcaacagcatcttctgcgccaggcacaacaaagcttagcatctccatcaaccaatgaattggaatccagaaggcttagaatgcttctcaatagtcgtagtatgagttttgggaaggatggccaattaggttctgttggtgatgtctctaatgttggatcacctgttcaagtgggttgccctgtaatacctcgtgcagattcagatatgttaatcaaggtatgtttttgttttaacatgttagacttggtgattatatataaaagcttcatagaagtatttgcgtatgcttatatatggcttatgtcttagctacagcagcagcaactgcagaaaggcaatcaacaaaggcaacaatattcacagcatccactttcaagccaatctcctcagagttcaaaccatcaaatgcggcaagataaaattattggtactagcagtatcacagcagatggtggcatgtctaattcctttcaaggaaatgaccaggtttgacttcctccatcattagattagattatatatgataagtgataaggtgcagatttgttttatttgttcgtttatattatgtacttggagcaatgaataacatctattactttgttttcctcatgatttacatccctaattgtttacttaggatctcttttcttgtgcttccagggtcagttggatttcagtgtattttttaattgtttatacttgggctttagttttttctttgcctttactgcggtcgtggtttctaatttagtatccttgttcaaggctttgaagagtcacacaggaggacggaagagaaagcaaccggtttcatcttcaggtcccgctaatagctctgggactgcaaatacggcgggaccgtctcctagttcaccctcatcaccttctgctcacacacctggtgatgctatgtccatgccaactttgccccatactagtggttcctcaacatctctgcttatgtttggagctgataatttggggacacttactacatcatcaaatcaactggtatgatagaattgttttattaacttatttgtgttagtgtttctttttcaggaaaagacaggttttgggttaaacattaggcatccttgatgtataatgttcatggtaatattgacccatttttgattttttgttagtttggtatttccaactaaaatatttctttacaagagattttatgttaatataagaacacggtgcaaacagacgtgccctgtgttaggtttgctttcaaacaagcatatacgttttacatatgatctgtattagaagatcaagcataataaagtcctaaagtacaacataatatattaaatataacagattatttcatacattattatattatccaccacaattcacttactcttaataattataacaaactacataaaatatcatcactaatgacaaatgtaattttcatttgtaatttatattgattcatgtttttttttctgagaggaaaaaaataatatttcctggagcagtattatatttcagcatttaattggtgtggtgatatatcatttattggaacaaaaatttgcaggctgatatagaccgctttgtggaggatggttctctggatgataatgttgagtcattcttatcccacgatgacaatgaccctagagatagagttagtcgatgtgcagatgtcagcaaaggtatgatgaataccgacctttcttttattctatcacacaagctcttactggtttataagattcctaaaattttgtttcacattataggcttctctttttcggaaacacggcttattcgtgctagtacaaataaaattgaatgttgtcacttttcacctgatggaaagttgctggctactggtgggcatgatcgaaaagtaagcttttctgacagaacattataaactcttgaaatgttcaggctgtaaatttttgtttcattttaacacttggagttagctcatgtatagtaccctggttctttctttctttcttcttcttcttcaagctcttttttttttttttttaaatt

SEQ ID NO: 110347 - DNA, 1222 bp, Cannabis sativa
  modified_base (27)..(31): a, c, t, g, unknown or other
aaaatagattacattgaaatggagttnnnnntagggcataaaacctaacaagacatacaatggttccattcaattaccagtatcaagctgcttaatttgtaacattggaatgagaatggttgcatatgctcaggaggtccaacaggaggagcttgctacctaagtcactacaactcctctacctgtctttgaagcatggcttgtatttatgcaaaccactgttcccaatctggcaaagcctgtggtagattagtagtgctgccgccacaaccccatccacaacctctacctcaattgcgagcaagaaggggaatttcacctcccaaacaagatgacttcggtacttggagttgagaccacattaaagtcaaagcacatcttctacttaggagttatttcactaatttttatagaatggtgggcatggctccatttcaaatcatcgtgcaagtgtacaaactgcttactagatggtatgttttttggtgggaccagtctgtagaggtcccgtctctcgacaaagtcttatattttacaagctagagtcaaatttagtgaggaaggacaagaccaagatcgacttttattcactaaagaagcaatccaaagtgatatgcctaaccagcacatgcaagtaaactcacgacttcaaggagtattgatttttcatgtctagattccctctaaagcatcatccaactctctcactagacttttgcattgtaggtaagtactaaatgttttttgattatctttctttaaatatccttccaaatttagcaaaatataatctagacatctttttttagtctttcagatgatatccctcgacctcaactcccaagagtcccttgggtcttgcttccccttttctctgtaggagcctctcctctctcggtttgttttctctcttttggctctctccctctcggccttctcctgctccaccttttctctttcagccttttggtttgcagctaactcctagatggcatctaccttgttttcttccctagcccattgacatttatagatgtcattttttagcgaaaagttgggtctggtacctccccaatcaatgaaacctggttcaagtgtgtcactaggattgctggagaggcagaaactaccaaggcaaccgtagcatccacaaggttattgggagaagcaaccttcttgacttgtggcttggggctagaagggtttcccttccccttctttt

SEQ ID NO: 110348 - DNA, 683 bp, Cannabis sativa
tgaagaaattagtcatacttgtttaattgtaaaaaattctaccaacgtcacttttaatggaattcaaatcctaagtaaaaattattttggaggaaaaatagagtgaacccttggtttttttaaaaaaagtagaaattcttttattattcgcattaactctcaaatccatcatctttgcataaaaaataaaccaccaagtgaaccaaatacaaaagtaaaaggaaaataaaacactaaaattaattaaatctccaaactttctttgttattacaaaatacttttcttaaatttcatctagtagtatcaattatttccatattggataaattatgatgtatttttcattttatttaataatgtatgtaatatattcattgcaaatattaccaaataccaagtactatgtcacatagttttttattgaaataagtaagccagaatattaaaatattatccaatatacatatatgttagaataaaagtgctaaaacataccacatcgtaataggttgcactgcagattactgtgtattgtccaaaaaataggctctgcttggtgagtttgataggatatcatcataaactggagtttcttactgagtttgttgactcacagtgttactttcatgtgtaggtaagggcaaggctaaggctaagcaaccgtgaggacgagcagatgaag

SEQ ID NO: 110349 - DNA, 501 bp, Cannabis sativa
  modified_base (454)..(475): a, c, t, g, unknown or other
aaaaaaaaaaaaaaacccttttgttttctgaagtctacagattaattgaatgcagctgttatcaagtatggaatgatttttttttcaagaaggaaaaagtaagaaatgactctctaaaaacttacagttaggtggtctagaagggacatcctatcttctcttattaacggtttattcaaaatgagaagcaaaagaaagtgacataataagtaacattaattgatagggtgaaaaattaatgtcacatttattttttttcaacttgctttactgtttttcctataatatttatggttgacactgtagttaaagatagtatgaaaaattatgaatgatattttttgcttctactgctcaaaattttgatcttataccacatcattgtgatgtatgataagaccatatataaatggttctctgaacttataaagaacattattattattattattannnnnnnnnnnnnnnnnnnnnntattattattatagatcggaagagcg

SEQ ID NO: 110350 - DNA, 628 bp, Cannabis sativa
  modified_base (516)..(540): a, c, t, g, unknown or other
  modified_base (595)..(603): a, c, t, g, unknown or other
ctctaatattcataatatgagagccaccttcgctcttagcctgctttttgccaaaacatggacctcgacctctagaaggtgagcttggggcacacattcatgacccatattgaccattttgaataggattaatttcttcgtcttgaaaatcatttagtggacaggccaatactttgtggtcaataataccatagtcataacaaaactctgagagaaactcatattgaaagacaagagagaccttcgtcaattcgtcccattgtcatcaacaacaacctttaaccctcacttgtgcagtttggtgatgttaatttgaactcaaactttcatcacaccattcatcaacggaacatcctccaccttcccaatccaatccccacattcacgagcaaaaacttccgtcgtacatggtagaaataaattattgatagtaatgcagaaaaagatatgttcaaacggatgtgagtaaaatatcgtgattaactcaagggtaatagtgttgggttttgtgccctnnnnnnnnnnnnnnnnnnnnnnnnnagatttactaattaataaaagatgaaaaatttcattttatgttgcatggttcacnnnnnnnnnttcatgattatgtttaatgtataaa

SEQ ID NO: 110351 - DNA, 555 bp, Cannabis sativa
  modified_base (63)..(72): a, c, t, g, unknown or other
  modified_base (467)..(487): a, c, t, g, unknown or other
gctcttccgatctttgttttagaattcatattaggatgttaataaaacatacttgttagtaannnnnnnnnntggtaaaatatatccaacagttacaagatgcggatatttcccacgtttcatatctttttctaacaagatggaatatgaatcactttctatattttgaatatataaatgaactgttgccttgaccctgtcaaagtatgttgtaatcaagcaaaactatgttcaatttttctttttgaagagcttattaaaagaagcatagatcgagtcaagtttctttttaagtaaccttgattatcacatcaacattgaaaatttttgacttaggcaagacatattatttattcttcccgacaagaagatatttttagcagtgagtcattctcttaatcttctacaaagatatttcattattcgaaataagaaatagtttttcgattcctttctgtagcagagcnnnnnnnnnnnnnnnnnnnnnatctctttctctgaatctttgatgctaaaacctccttcttgctaaaagtctttcttcacaatcttcct

SEQ ID NO: 110352 - DNA, 690 bp, Cannabis sativa
gtctaatttccctgctaaaatgttaaaaaaaattctagtaacattttgccaacgcaaatatgtgcctataaaagttttcccttaaaattctcccccatttttttagaccttttgtcaatgcataatcgcgccggcaaaggttaacgaaccattagaatggttcgcgccttaaggaagttaattcgaagacttttgctagagtaattaatgaattacacctctaaaagtttttgttgaaaaattttgacctttggttgagctatttaatgtggcgcatttggccaaatacactggcaaaagtgtcttttatttatagttatcccttatttagttgggtcagaatttcccttctatattgttacttttagggatggtgtggtctaaattactagtttagttagggtggagttgccttctaaggaattaatgaaattgtgttagctatggttaatagtaagattgtgtatactgttatgtattgttaaatactattatatattgttgggaaagttaaattctattgtgtattgttaagacatggttattgcctgctatatcattattaggggatgcaaattttctccatggggatagtgcctcgcggggacccgctcctaatggggcggggattctccgtctaaatgaggaacgaggcggggacgtggatcaaattttgtccccgaatgttaa

SEQ ID NO: 110353 - DNA, 1037 bp, Cannabis sativa
ttatcagaaaatcaattatttatttatttccttaaatagaaatttatttctttaaatagaaatatatttccttaaataaaaaatattcttataccaaagaccgtgaatgcaagaaagcgtaagaaatggtggcaatgaaccctgttcttctcacaattaaccaaataatttagccatcaaagtccaaaggctaagctttgaatcccacccaatgaaacacaagttcaaccacccttcgagataagtggcattcgaaaaaattgtgaccatgactttcattaaagagaccacaaacaggacaaagagttgaatccaattgaatacaaaatcttgtaaaaggatcccttgtgagaagctgagtgttaactgcttgtcacaataagaacttatgttttgaaagactaaacttgctccaaaccgctctgtcataaagaacttgttattgggtaatggtactgttataaagaatagaagctttaaatttacttttagcgccagcaacttcaatttgattttggttaaacatcaactgaagcctacataatttctttcaataccaactcaaatcaggtttcaatatgttaacaacatatttttgaacatagcataaattgtgtaaaaattaatgaacctaataggtaaataattagacacaattataataagtatttttgttgggttgtctttcgtgagtgtcatatttcttatgtagcaaattatgtgatgtatcatctattgacccgttagatgtatctagaatttttgggtttatatctttaatttttcggttagtatttgaagttaaaaatatcttttctagctattatgagttgacattttagttttgagtcggtttttcaaagttagcataatatattcttgattctaataaatgttattaacaaatcacatcagttttttgtttttttctacatttgattaaataaaatattaaaatacaataaactatttttatcaaatacatataaatttatagtatgaaaaaaaaaatatatatatatatagaaaataaaaat

SEQ ID NO: 110354 - DNA, 906 bp, Cannabis sativa
atatggtttgatccttgggttcctgcttcaaaccgaactcctgtgcctttgaaggatgtgtcccatggagtggcgtgggtaaaacagtttctgactagcaccaacaggtggaaagttgatatggtgcgagagtggttccgggaggaagatgttaaagctatcctaaacatcgatcttcccgatgtcacgacggaggactcttgggtttggatgggggagcaacatggaagtttctccctcaagtcagcgtgcagatttatcaagggggagccctccccacatactgctgacggggtatggaaactaatatggaattccccactccacacttgattaaaatttctttagtggcaattatatcgtgatatcttacctaccaaaggcaaattggccgttcacttgactgtgatcccttactactgcccaatgtgccaaaaggggacggaaacatccttccatcttttctgggcctgcaactttgtcaaagccatctggtttagcagtggttggggcatcaggactgaaaatgttgatgtgtcaaattggaaacagtggttggaatggtttcataaagatccaaatcgccctcctaatgtatcgttctatgactttataactactttcctctgcattgttgaagtagtttagggagaaagaaacagacgagtacatggaggaaaagagatggacttgatgcaaattcttgtaatgctacggcataagattaatgatcacctactggtctcctcagaatcggtaaatgaagttctggtgtggaacccgccacctgtgtaacgccctaaataattaggcacgctacccaaaatacttataaagccctaatcccctaaccgggattactaattaaaatagcgcagaatttaaacttttatattaaacagactg

SEQ ID NO: 110355 - DNA, 815 bp, Cannabis sativa
aaaattaatataccaccagtatagggaaaaatatatatatatatatatatatatatatccctaatttatagatgtgttaaacttgcccatcactaaagctcacacaaacctctcacatatcattcattttctctatgatcctgcaaaaagaaaaaaaaaaaatagtccagaatatataagcaaaaaagaaatcccatgagtaaaaaaaatactagcgtttgtgaaaaaaagaaaaaatccctcaaaatagtagcatctaatttaagaacagaccgcatacagagaccaatataaattattaagctccactaaaaaattcttaatgcagacaacaatatcaaagactctttttcatccgtggaaccacattatcttccaaatataatttcaattaagtcaagttaaatttagccaaatttgaataatgtcactttagtctagttgtcgcactttgtactcactgaatcatgagtttcctcaaattcaaattaactaaagtatagagcttgtccaaaactaaaattatgaaataaaattaatatatagtaaatacaagaaaatcgatgattcaaatgggtctccaaatcaaacataatctgcctttaccatatgtaatttatgagttagatttgtgacactgggacaaatttttttataaaaagaaaagatccctatttcaagtgcttcacaccactgtcggggttcttcaacaacttataatcttttttttttttttgaatttattgtattataatttataataatctgtacataaaagaaaatacaaagtgagaaatcttgtctagtttagtggt

SEQ ID NO: 110356 - DNA, 756 bp, Cannabis sativa
  modified_base (62)..(74): a, c, t, g, unknown or other
tttagaaaatacagggtcaattttgtcatttaacaaaatagagggtccaattgataactttnnnnnnnnnnnnngtccaaaatagtatttaccctagtttataatactgaaataaaagttgaagcaattacttaccactcatataataaaaactaattgtttattataattttcagaaactaaattaataaaaaaattaagttaactaattcctgtttctcaacgagtgacacatggcataaaaaaaaaagaagagctaatatttagtctccctatttaaaattcccgattacaatactatcatgaagaagctttacaaaaccggaaacaagtcaacactaagagatgagtggaagtctacgtacctcgcctcatcctagctttttggacacagaagacactttctcactcaaggacctggaggggtccaaacctagaatttgcccatcagatacccggatggatactcgaatgacaaatcacgggcactgatcgcccaaaagtgtcacggatatctacctcggatgcaacccggagctcccaacgacgactataatttttttaacataggatcaaatcttgtccactatgtctagacatggtagtgcgcgtacctcatccatctattttctagacgattattccatacctctacttttaatggttgaagcttttggtaacacgtatccactagggttgtacatcggtctgtttgggcagtttatcctatatattttctaacccaatctaaagttc

SEQ ID NO: 110357 - DNA, 700 bp, Cannabis sativa
  modified_base (86)..(86): a, c, t, g, unknown or other
gttttactggtgttttataaaaacaaagtatttttgaaaaaatttccgtgtgacagtatttttataaaagttaacccaaattccantatttttgtaaatttcccttatttgacgtctattactataagaaaatacacttttgctaaccgaaaaaaatgcattttagtctgcaaaatgacttttgtttgcacatatacttaattgcgctgataaaaattgtattaatcggaaaatgttagaatttttgtattcgtacattttgttttggacattctagacacatcactccgcacctctgtcgtcactccattcgtaaatctagtatttgctcgattctctcccatttcctctttattcttctgctactacatgcaccttcatgttgtgtaaccctttcaacattgccttctcattgtgaacgtgtgaatatctcgcggcagaataaatatggtttccagaaaagtgcaataaagctatatttgtataataatttcatttgaagtaaaataataaaattaatataattccatatttgtctcacatcacgctattacattaatataactgagaaaaataatttaagtctactctttttttaaacaatcaatattactcttttttttttgagataaaatggtgacattttattagcaaattgaatcaaccattacaatgtttaaaagatcatccggagcagtac

SEQ ID NO: 110358 - DNA, 898 bp, Cannabis sativa
tggcgtcaaattcccttctaaaaattttcaaccctatggcgtcggttattaattattatgctgaaaaaagcgactctaaaggcttgttttgtagtagtgaaactttgagttttatggttgccattccttccattctcttttcttggagtcaaaaaagtgcactctgattattatagtaaacatattaaagagaagatccaaattaagtaattatactagtttatgaattcaaacaaagatcatgataggtaaatccttattccccattgtgtcatgcaatgatggaacttattgtggccttagataactttttcattttattatattttttttttataagaggggagttggggtgtggctcttctctttgggtgtaaccaatagagctccaaccccactcacgaatattcgccaagactctttgaggcgggttgcccttactaaaatactaggtgcatgaatgcccctgagatggatatcaagggtggctagactggcaaatgttgtcctcgaatttaagattcctaaaggagttacctagatgacctctagcgcgggaaaacacttggaagtgagcactttgccactagcctttgatatcttagagatacttgaatatggtgttggcattgacaccttattaggtgtatttgaattgaaatttgctttgaaactttaggagtattattggaatttagtaagggccttgatactctggcactagtaccaataacctataccaattaaaaccacaaaaaaagtaagataatggattcaactaaaatgggaattttggtagggtaagttgaaaatactacttttattaatcaattgatcaaatttacttttaattttatatttaattaaaacataccttttttttatatgtattgtaccc

SEQ ID NO: 110359 - DNA, 1078 bp, Cannabis sativa
ttttaaaaatcactaaccaaacgtgacttgtgttttaaaaatttcaaaaaactattttttgttctcatttctaaaaacaattttttaaaacaaaaaaacagacaataataccaaacatgctctaatctttctatcctcgctcataatttgttttatggggtttcgacatataaatgagtttcaaatatactgtacatgaaattagaaaaaaggaaaatgaagaagaatttgtgtgcaagccgcgctattatctagtcattttataattgaatttgtgtacatcaaaataaattgaattatgtccttttattgttgattaattattatttatttcgttgaacattattaatcttatttcttaatatgacaataaattcatcacaccatacaacaaagcaacccaaattaattctggtggtgacagatagataaaaagctagttttagatagaaaggggaagaataaaagtagtgcagatagaagaagaggcaacaacgacaaaatctaatttaccaaattaatatttttctgagaaacgacaaatatgggtccacttattgaagggttggggtgcaatgcaaatgcaaatccaaagcaggtcatcattcactttcaggatgaaaaagtacaagtgtgctcttcaattttacttttccttcttttagttgcctctgcattcatacaaagataaaacaatttaaataatatttacatattgtcaaagttgatgggtatgtataatataatgcgttggagactagagggtaaggtcggcttagggtatgaataaatagttgagctgtatgaatgtgtaggctagtaattgtaatttgtatagtggaactggacccttttcaatttcatgctctctgcattgtgttgccgcttatattcgcacgaattcaactattctttctttctttcttttttgataccataactattacttttcttacacaagaaaaacaacacgggaaatttcttatatatatatgggtggctattcaatagttacatttgacttataatagcaggttactaataggtaaacatgctttttttagaattaattaattat

SEQ ID NO: 110360 - DNA, 631 bp, Cannabis sativa
  modified_base (551)..(589): a, c, t, g, unknown or other
tgaaaataaaattagtcgatattgttttataattttgatgaattgagttgtaatatgaggatttttttcttcctgtaatattatatggaaaataaataattaaaattactgaaagaaagcgtttgttataatggtaattataggagaagatgaggtaggaaatagaggggtgatggagattgtgagtttgtggttgagatggggctatggaagcttttgggaaagttgtgtataattgtgtgttgattgagtttaggtgggttaagtgttggtagaatggggtgggcaggagtggaatggaattctattatggaaagtgttgagcaggggctttgtactgtgagtggctacaacagtttgatggcttagattggtgatagttgatttcccagttcaatgaagatagtataaaatgtggcccaaaaaaaaaaaagaagatttcagtttggtgtgggaacaagaatggcaggatattgttaaaagttggtggaatggagagactataaagatttcagggcactgcctctattattttaaatgacaatattatnnnnnnnnnnnnnnnnnnnnnnnnnnnnnnnnnnnnnnnatttaaatgattagaattgaaaaaatggcatttttggagaaa

SEQ ID NO: 110361 - DNA, 760 bp, Cannabis sativa
tcaaaattcgggggaaaaaaattattaattagcctttatttatttatttatttatatgaaagaacaataagctcattagactaaaaagataagaaatcgtaaggagaattccatttctttaacaaatacatggctagatattttagctctctttaatttgttagtccatccgtaacagaattcaaaacgtttaataaagatctagtacttatttaaaaaatgaaaataaaaagattgcattaaaaacctcaagatcgatggtagtatttattgtcctttaatctttcttaagggtacaattagaagaataggatgatttcttgttaccagacatttttgtcttcattattatttatgaaacaagtgacatctttgtatggacaaaattccagctaatgcttgcgtgtttgcattcacaaatgtgttaatagctttgcctaaaatttcctatttcttacgcaattaatgcattttacgaaatgatatccattaatcatatgcattgcattgtcattataaaagagaaaagaagaaagattgaaaagaagcacaataatagtcaaaggatttgagaagcttataaatcaatatttaacaaaatgaaatgtacttaatttaactcacgtcaaatacacgaattaaggtggcgtttggttggaggtaatgaaatggaatggaatgaaaatgaaataattttcattctatgtctttgtttggttgcattttaaagtattgcaatgacattccaatggaatgctct

SEQ ID NO: 110362 - DNA, 631 bp, Cannabis sativa
ataaataatgttttattattttattaaatataaataaaaagtcacccatgaatttttcataaaccaagaatttaattatataggcacactttatatagagtagatactttaaattctttaagaaactttcttaaattattcgttgcttccataaatgattgatttataatatattcttgattaaaataagaattgggtgatttatatcaatattacccaaaactattataatattaggaattacagtctaaggtgttagttttgttatcctaatttttgttgtaataattagttagttacatttagatatatattgttataatcttaataaaataaaaaataaggagaattttgattagctaacaaaaataaagcgttacataacttaccaaaaaaatctaatgtttagatacgctaatctttaaactattacttttgaaataatatataatatgtaaactcatttttataaattatttgatactaattaaattttcttaatatataaggcaagcaatgcacctatttgcaacaaaattgacatatcaaatgggacaatatacatttggtcacaaatttgactaatgctaagtaaattagtccttagtccttcaactaacatcacattttt

SEQ ID NO: 110363 - DNA, 533 bp, Cannabis sativa
  modified_base (507)..(507): a, c, t, g, unknown or other
acagtataaatgtaaattataccgcctaacagtataaaagtaaaaaaaaggaaaaagttagtggtgtgtgtaattttcccttttttttttagtggggaaccgggattgaaacttggactgctctttatgcggagaagtgttaaactatatttgtaaataagtttaaactaaatgaatcatttattaaaaagacaaagaatcatttaaaaaaaggacaaagaaaatataattgaaggcctactcgtcccgatatttgaacaatggattcatgatagaattgggtgcattttgaatgtatggttgtattttatatgaattaattattttaatttcaactcttaccaatggggatggctgtttgcccttttggggcgttgcacacggtgcaccacaccaatggggcagtttgtgctgttgcaaatatatattgtatcatttacacataattataatatatatgatgtagatgtacagtgtatatatgggcccgtttggcacagcttttgnaaaagctaaaagctgcttttcaaaaa

SEQ ID NO: 110364 - DNA, 517 bp, Cannabis sativa
tatatatatatatataaaaagtagtttcagataacactacaaatgagcaaagaactcaaagggatgaaagctaaaagactacattaatttatggcatcagtcaatatatgaagtttctgatacataaaagatttattaatacagtttcccctaacaaataccaatcttaccgacatacgatcactcaaatggctgtttaacaaacagtgggaaaaaaaaaagtataagaaaacgacttatgccctatttattattattctaattactctattaatgctcgaccaaaaccccccacacagtgacatagacacaaacagagaaaaaagtgtgatctatttaatggaaatgattctacaagtacacaaatatacattagctatgcctatatggtgtaatctaactagtatatataagtataacgacaaataatatatgaaaattctacaacgtaccccttaaaagtaatatactgatacatctatttctgttttagtattcgaaataattttttagtcaa

SEQ ID NO: 110365 - DNA, 558 bp, Cannabis sativa
catttgtgtaatctcgaacctgataaataacttatgcttttaatcaactatttacattctcatatatatttttattattttctttgaaaactcattaactgttctaattaaacactcacatatttagaggtgcaaaaatcaagcatttggtttcaaagtatgcaatgttttcatgtaattgttaaacaagttatatatgaaattagaagtagaatacatgttaagatgtcaaagcaaatacatgttttagatagagaatggattgctcatttgtaagcaaatatagaactttttcaagctaaatatacaataaatttgaaatcaatacatattcatctgattttgaaaaaaaaaaaaacactcacatatttatgcatttatagagtacatgtcaaacaaaacattattaacacggtcccatacatttgacaaattatataatattgactatatatatatatattgaaacggatactatttgctttgttttttcttttccaaattactataaaccagttctaagactcaataattaatctttttaacagtgtactatat

SEQ ID NO: 110366 - DNA, 597 bp, Cannabis sativa
  modified_base (505)..(516): a, c, t, g, unknown or other
aaatttatagtaggaatccatcgaactcaaagataatcttgttatctaaaaataggccaaaataaacttgactattagagcaatgttttacttttttccttctccaaaaccaataccaccacgaagctttttaggtaaaaaaacttattcctaagaagtaaggtgaaatttactataattacgtttggaactccaaagaaaatctctcgaagcttatcaatggctgcattaactttttgaagcataataaaaatacttatttagtaatctctaatctccaagagaacagattgaatgagttgaactcaactagcaaaagagattggatcttatttatgatacttccacattcagaagttctccattttgtaagaggcaagttcaccttgaaatactttaaaaggaaaaagccttcctctatttgaacaatgttcagaagctagcttttacaatcctcttttatccttccaaaatagacttgagacttagagcatgtttggtattnnnnnnnnnnnnttgttttcaaaaaattatttttagaaatgagaataaaaaatagtttttgaagtttttaaaaacaagtcatgtttggttagt

SEQ ID NO: 110367 - DNA, 832 bp, Cannabis sativa
ccaccacctccaccacctcccttaccgaagcctccaccgcctccacctccctttccaaatcctccaccaccaccaccgccctttccgaagccacccccaccacccttgccaaagccgcccccaccaccctttccaaatcctcctccggcacctccaccaaatccaccaccacctcctacgccaccaccgaagcctcctccctttccatgacctaccaaagtcttctcctcctcctcctcatcattcttctcactactagctacattccttgcaaccacattcaccacgaaaacattaaaaaacaaaagacatagaaatgctattttccaagctccactagccatgttttactactgtttctgtatcttattttgatacttagatatgaaagagcgtgtagaacgagggtatttatagaagagtttaaaattatatttttctttggcattaaatgtggactcaaccactaacagttcgccacattcattatctaaatttagctcacaaatatcggacgcgtgttaagaatagtacaattatctatcaacattgacaaagggctcagcttgttccatgtaagagagggacaacttaataatacaatacatttaggtcaatactagtaagaaaatacgcgcaatgcacgatttggtaaggtgctccacgtaccacacagttattgtgtatattgagatgaatttataaagaagtgactacaccaaaaacattaacggtgcgtttggaagtaactgtctaattactaagcagtgtaattactagggtggtaattacacagtgtagtaattacactatattttaaaatgcaaggtgt

SEQ ID NO: 110368 - DNA, 595 bp, Cannabis sativa
ttaattagttttttatttatttactttttttggtgggcctacccctaaagacagagacagataggatagtgggggtaaaagggtcatcaaataaagttgttaagacttaactaattgaagagtgtgtcagatgttggctgcagccattactacaccacacagctttggacgtttcttaatttggttccccatttatttggtttcttattatcattgctgttgttatcatccaaaagaaaaccacatgtgtctaacttttatcaaatttttgactcagaaatctgtgttaattttgacacagagtctttttcagaaatcaatacagagggttggtttgtacttaaaagaatgtatcctaaagtgattgcaatccactcttttctaattatattttattctaactaatttgaatttaagtggattggtattttttttatttaatggtgtcaaaaagaggattagtggtgtcttaagctcctagactctatctaactctatgtttggtaggaaagaaagagagtacaattgataagtaagcagtatggagaatctaaaaaggagtaagtgttagacaatttatatgtataaactgaaa

SEQ ID NO: 110369 - DNA, 533 bp, Cannabis sativa
atatgatatataatccaatttaatataatacaatataatacaatacgacctaatacgacgttccaaatgcgcccttaaagtttgagattaattaaatgtaaatattgcatgcaatttaggtgtgttattaaaaacgacaaggtcaatgagaaaaacgacctgtcgtttcgaagcagcaaacgtgtaatcatgtctttaatgttatacagttggacttggaagtaaaggatagtagctcagttgtttattattgtatatccacgtggcatcttcttagtggtcaaaagccaccttacatctttactttatttccctttctctttattaattttctttttctggatcagacattttctttcgattttctcacactttctcactggattttctcaccccttctccttgactgactccatcttcaatcatcaccagcagacgctcccacccacccacaatcctcacaatgtcgggcccaccgagactccgatcgaccaacatcgccgacaccgagtctcgaccggtcctcgtaccgg

SEQ ID NO: 110370 - DNA, 520 bp, Cannabis sativa
tctagtattttaaaactcaatttttaaaaaattgtttttaaaaaattttgccaaacgacccctattagtttttaaaaactattttcaattttataaaataggaaacagtttttaaactgtaagccaaacaacctctttgtctccaggattgattagaccacagctccaatagtttctcatatcatatagtccaaccaatcatatcagtgaaataaatccatcatcaagacaaacctaccaagcctagttaccttatcggctcaccctatcaaataacaaacatttattcacagtcttgggtggtactaaattgccatctcttcgatcattcctctaccatcaagcttctctttgaatatctcaggtcaccttgcctaacgcttcaccgatcaataattaaaagataaataatattaattttattctgacaagtagatttttaattgaaaatttagattctacgcaaaattctaccaaaaattggcttttgtttcaaggaaaaacgatttttgaatcaaaa

SEQ ID NO: 110371 - DNA, 501 bp, Cannabis sativa
  modified_base (63)..(73): a, c, t, g, unknown or other
aatcaaaaaaatcataaaaatatttaaaattccgtaaaactgtatttttgttgtttttttgtnnnnnnnnnnnatttgtgaaattaaccctaaataatataacatagaattcttctgtgtcgtatagaagttgttagcaatatagacaaagagtggtttgaagaaatttgtaaagtggactaacgtcttgatacttgatgtaatttttgttcaaaataaaacaaactttctaacttaccaaaaaaaaaagacaataacaaactttattctcctaaaaataaatgaaatatcaaaaaaacgtacataatgaaatttcctcctataataaataaaggttcatgagcttattaattttctcctttgcattaggattattctctaacacttaattaattaactagatgagaattacgtggcgagccacgtaaatattagttttatataagttctagtagtttttgtttaagaattcagtaactaagcaacgacaacaacaatggt

SEQ ID NO: 110372 - DNA, 542 bp, Cannabis sativa
agggtttaaatttttggtttaataataaaaatttttaattttttaagtatataaatttcttttttttttttttgggtgacactaaaaacaattattgtctaatttattctatataaaatatattttttcaaaaaattattaggaaactggatgtgagaacacaccattaagataaaaggtatctaatttatttattacttttggaaacacattttgccattttgggcatcttaaattctaaaaatattattttgttagattgaagagagaatttttttttttagaagcttctagattacattttttatatgacccccacacattttattattttggtcacttgagctcaatatcaaatggttaaaaataagtaagagtaacttgatcgtccaaattttcttatagatagttctttagatttcgtttttcatttcagagttcatcttatatctattctatacaaaatgtggctatataataaaattcttagtttatgagaaattaagagttagttaaacttaaatataattaatccacctaaa

SEQ ID NO: 110373 - DNA, 764 bp, Cannabis sativa
  modified_base (43)..(66): a, c, t, g, unknown or other
aaaagaggtaaaaatgatagattttaaaaaagaaggtaaaaannnnnnnnnnnnnnnnnnnnnnnntatagagtgtaatttcctctctaatatcgaaacatattttcattttcttgtaaatagcccaaattcaaatgagctcgggcccatctccaactccaactggcccttcttatgcaagaaggtttgggcctggtattacgcggacaagtcacaaaattggaagatttcacgttcctcatctagaaacatgaataacacttcccaaaagaagttacagcctcacattattatcttcccattcatcttcagcctctaaccccaatcgactagtcaccagcaaccattaatttaatcctaaaaagaacgaaggttcaattattgttacagcccttctatatttgcaaacatgcagggttccttacaccattattttattgcttttcttaaatatcgatttatattttttattgctttaataatatttatttggacttatactctatcaaattgattttttatcctaaaaaagtagcttttaataagaataaagtacacaatctagttattttgaatgtatttttaaattttctaatatttttgtaaaaacaaatcgtaattagtttatatgaatattatctcaaaaatgaaaaaaattattatttgtacaaaatatttgaaactataaaaaagtttcatgtaaataacaatatattattttctttttataaacaactttgactagaaaaaaaaaaaaaaaaaaa

SEQ ID NO: 110374 - DNA, 558 bp, Cannabis sativa
aaaattcacacaaaacccaattcagaactagaaaaatttaggacttcgggtcaaattcgagaacccagaagaagaatcttaccaattctttgagttgacaaacttcacagctcatggcttgagttggggcagagatggtgaatcaacaagttctgcaatcaaactccggttcgcatgaaaacgcttgttattgattgaacccaatttctggtgagattttcgtcacaaacacactgattggtttcgtcacaagttgtataaagcaagcatggtgaacgagtttcgagtttgttgattaaccgtggggacgaagatggaggaggagaagtttgggctcgtttacagtttgggcctatgattatattagcgagcttgggccaaagttattttcggcccaaaatgtaactgagatcaaaatgtgtagatgtagatgctaatggaataaattgagaaatacgtattcattaatcaaaaatactttcatattatatttcattaaaaagtatccacttttgtgagtggatttcccaatagactcctactctctacttaagttta

SEQ ID NO: 110375 - DNA, 570 bp, Cannabis sativa
  modified_base (524)..(536): a, c, t, g, unknown or other
tatataggcgttagggacatgttttcaccatttttgcattttcaaacttttgagctttcatcttcaaactttgagcaacaaccttctttttaccaaagaagaaaaaatgtaaagaaaaatcccaaaaaacacaagttttactcttcggagaatgagcgagctctgtgatgctctcatccacctttttactgcaaatctgagggagggactttccagaagcactgccactgaccctggttgtgagccacccccagtcgcctgagaccgtcgacattcaagcaggttgtgaccaagttcttagttgggccctcaatttcaaggccaactaatcttgtccaacttcatcctcacattgtactaaaagtaagtttttccaaatctttgaccctcactttctttttactgtacattgggataggaatttagactcgagtattgatttgataaactacttattcgtacatgaatactaggatgatattgttgggttttgtaccctaaataaaacgcatttcaatataatnnnnnnnnnnnnntaataaagatcagaaatcacattttatgttgcat

SEQ ID NO: 110376 - DNA, 531 bp, Cannabis sativa
tgatgaatcatgggatattatcttctaatcttctattgataacaaatcagattataatgaattaagttttatttagggcataaaatcccatcatgaatgaccttcaaagaaaagattttcacttttgatggtaattttgatttctaaaaagatttctaccatgttgatgatgatagtgagctcgaagagaggtcttgttcttccaatgaacatgctaaatgatatcctatttgaactgaatattctcccaaggcattaaaaggccatatccaacaatcatttgtaacactttgagaaagaggaatattgaggatatgatcaacatctattgcaaaaaagtcacttcttaatttgtctacattccattcacaatctggtgtgatatagtcagataccatgtgactataaaaacgaaaataatatgttggtgtaaaaatggtgtttgcaggtgtccaagggtctaatccacacctgatttgtgtaccattacccactgtcattcgcaagcctttacaagtaagtcacgacccc

SEQ ID NO: 110377 - DNA, 849 bp, Cannabis sativa
aaaaattcagaggacatgatttggatatgtcaaagtttgggagagaaaattgctaattagcctacattaaatatgggatccgatagttaattagtccaatagcgatattaatacataggagagtgatagacactggtgccttttaacatatttttctatacgtatatattttgttggggggccggcaaattagtatagctgataaattaggcaagagaaaggtgagtacatttaagaggggagagtagtgattaagatgaaatgggttgggatacacgtgaatgtaagcaactaggcatgtgattatgtgaaattttctagctatgaatagagaagataactgaaaacatctttattgctggataggatactcattgtttctgtctgtgcatatcgagaaagtaatcaatttatgaaatatatactagctagggtcatataatttggttataccatgttggagttctgatatataatgatcaaagataatagaataatttagactgtatttattttgtagaaaattacttaagataggtttcgtcatatttattcttttcaatactaactaggcagctaccgtagtatatagcaatacttggaaaagcataagatagctacgtcaatatggaaaattactttttggttctactcacattatttgtttggaaggattggttgcaaaatcaatgccttattctaagccaagtaatttgttcttataattaacatgcaaaaaaatgagaaaattacactcaaacacgtaaaatacattttatttataaggatacccatattaatttaaattgataaaagtaacgaaaattatttacatatacatatatattc

SEQ ID NO: 110378 - DNA, 536 bp, Cannabis sativa
  modified_base (487)..(492): a, c, t, g, unknown or other
aagtggagttcaggtagtttagccaccaaaatttgagttttggtggttaactgtcacaaacccaaaagtttggggggtttagccgccaatatccctaattataattatttttttaagtcagatcctaaaaattaacaatatgcccacaagtgtagatacatttgtgtcaaattggggtatttatatttaaaaagcttgtaaaaatacaagtcttatcgtggtaggtcataaaaaaaatagattgtggccatgtcgtgtttaaccaagttttacctgaacttgcctataattttctaaacctattttttcaagtttttctaggttcgagtcggccaaattttccaagtataaatgttcagccctatttatagggttagataaaaggacctagcaacaaaactcaaattagactgaatttacccatcaatattagttaattagaaaaaggctaattagaatttttgtctcctgaactttgacatatacnnnnnnatgccccctgaacttttaaagtcgttaaaaataccccatgaact

SEQ ID NO: 110379 - DNA, 935 bp, Cannabis sativa
ctttatatgtgtttaatttatcgtattagaaagttcatatttagggtgttaaacaacatactagtgagtagatctaagatcctggtaaaataaatatccaacagatggagactttcagttggcactcgtgaatcttaaagagattcctggagcgtcctccatggacgcacctcctgcccaagttgaccccgaaaacccaacccaggaagaagggccctctgaatttgtatggaccaagcagcgacaaaaagataaatgcaaaggcaaggcctgggttgtatctccatctcttcttgtacttaacgattcgatttaggaaatagatcaacgaccaaatttgttgagaaattatggccttctataggcgtactctagtgatggaggcgttcggaatattcagggacttatgtggcatcagatgtctgtccttttggaattgccatcccagagtgtagaaggcttcagagtatggagtttggctcatatctcatgcgaagctcaccttccactcagaacatatttttcccaattctacgtcaaagtcagaatcgctcctttctagctcctactagttgcatacaaattgctctacaagtggtttatgttttgtagatcttggggtcagactgttccaaccccaaaagagatcctatacttctatgagctaaagtcacagcctatgtggggatatcccacaaaaattggattctactgcctccaaaagtataagcgtacacgtacccaataagtacctcctcccattgcccacaccatcccgagtactggtctttacaatgggctttcccatgaagtgggttccagccctttctctagacttcaaaattctaggtacaatctgttggaaatattttaccaggatctagacttactaccatgtatgtttcattaacatcataatatgaattctaaaacaa

SEQ ID NO: 110380 - DNA, 553 bp, Cannabis sativa
ataataataataataataaaatgcatcacatgcattctctttctcgcatcataaggcaaaaaacaaaaaaaaaaataaaacctgaatgaatgactttacatgtataaattcaaataataattactttaaagtaaatatatatataaagactttcaaaataatgccttactttgtgtattgtttcaaaaacagtaaaacttttttttataaaaaaaaactgatacaatgaatgaattaagtcatatcaatccaatctgattgaaacattgcatgaatatctcaaatcatcattttttataaataaaatagaacaaaaacttaatcgcatctaatctttcatcgcatatatattcatatatatgaacgattattccaaattatttcttcggataatacaaactgaataaaagtagatttactcctaaatagaaatatttttggaagatcattaatatcataaattcccaagaattaatttagggatgttgttgggttttatgccctaaataaaactacattccaatgtaatctttattatttaaatatcaataaa

SEQ ID NO: 110381 - DNA, 859 bp, Cannabis sativa
aaaaaaaaaaaaaaaaaggattcaaatgaatctaatgtatatataatttaataaaaaaaaatagttgtggcattaatgtatttaaaaatatagttgttataataaattatgtttatgtaagacttataaaaaagttttaaattattacatttaagactttcatgtacttccatactgaatttagtcttataaaaatgtaatatcttgtaataaatgaatttaattgtcaaactaaagctagacgcgttaaccgtttctggggtcgttctcaaacttttatcctagtcattgccgacacatatagttggttataggtgttgagaatcaacggctgagatgagttcaacactcccatcctcaccgctaaaacgattcattagatttttagagttaaggataaagaaggagcccactgccacagtgccacgtacaaggataattgaacacatttattcaaccaatagaaacgtggcacgtttagaaacgtttctgacaccacgttagattggactggatcacagtctttccccatcatgaccctacgttctccacacgaactcaactcaaactcagcaatccgggccaattatagcccatgggccttaatgggcctaagttttaattgtttactagctatcgagctccaaacctaaaggaaatttacttgaaactattatttttggcaaatattttacacaattacgatttttctttacgtgttcgtcaaaataataccaaaataataaaaaatcacataaaaaataataagaaaataacaccaaaacaatataaaaagataatatataaataacaaaaaattaacaacaaaataacaaaagtaccataaaaaatattaaaa

SEQ ID NO: 110382 - DNA, 564 bp, Cannabis sativa
ggtaggaatttttttcgtaaatctcggtagaaatatacatatatataaggtatttttattttattcggtaactgtaatattaatttgtgaatttggcatattagtaaaaattcccctaattttttctactctaagagaactcataaaattcgtgttcggtttgtgtggccatgtctaactctataccaaaaaattactaaatcacgtgtacattgaaattttttctagggaaaaagtgtacaaaattatgtgtggtcaccttttttttaatgtataaaaaaattacgtgtacaaaatgattactatcctcatttattttatttaattgtagtaattattgactttgaataattgaactcccaaagtttacgtagaaccgactccttgtaatcaaattcaaatttcaatatgtacactataataaatataatgataaatgtatttgctgtatataaataaattgtaattaatttttttatgatattgtattataaatttatgggttttttatttttacacttaaaatagtttttcttttatattttacagaattctacatagaaa

SEQ ID NO: 110383 - DNA, 560 bp, Cannabis sativa
cagtatataaactctaacaaatgatcgatggctgccaaggccacatactttcaagatatatgacaagccatttttgcataatcaaatgcatgttattgacttgaagttggtgtatggatcttaggatatgaactttattagagccttgtttaaaaatatggatgcataacttattttgagcattcccagtgaggactagggtattgaacataaaatcatgtggcactatagaaaaaatgtcgagtactcagtgacgagtggaaacaacactgttgtggcaatgagagaagagtcagtgcaatctaattccttaaaaatggaggtgtggcggacttctttgtggcaaaggaaagtttcgccaaaaataaaagatttcgtttgaaaaattgtcataatggcttccaaaaaattatgctttatcaaagaggaaggtgtctgtgaatcctatatgtgacaatgtattcaaggcaaaaaaagaagatacctaccatgtgtaacgtccccacttcaagcctcaattgggtccttacacccacagaatgaatgactcttatacacga

SEQ ID NO: 110384 - DNA, 697 bp, Cannabis sativa
aaatctgaatatattgaaatgagtattatttagggcataaaacccaacaggttgggcctgcacttaagatactaaaagaattatctccccctaaatgacacgacctacctgcttaactgtcttgatcggcgcactaccaacaccaattaggaacccattcattctccatctggattctctcttggtaatcctcccctgcgagcacaacaaaattgttttctaggtaaaacccaaatttaagtttgggacccgacaatggaacactacgtcaatcatcgaggatcatcgttatctttttagtatgaacacatctcctccgtatggccaaccaaaccacatttataatagaacagaaggagaaattcatatttgaagtagcttcaaacttttttaccgtccttatcgtcaagaccaatcctggcataataggtttaaaaaggcttaggctaacccaaaacctcatgaaatcactttggatatccccattgatacggacattattcgcgatgatgaactcaccaactctattagccaacttttcacatttacatcagaaaagtatctgtaggggacacctgacccaaattgtgacagtcagcagtcccgtgatccgtaagggaaaataccaggtaagttgttcaatcccacatcgcttggagaatgtcaagtgggacgattctgagactgtgtaggtatg

SEQ ID NO: 110385 - DNA, 549 bp, Cannabis sativa
aagtttcttcattatcaatatttaccttgttaacttttttttcctcgtgaatttacttatatttagggcgttttgtttattaattagaattgttggagaatatttcaactattggacatgttaaattgtttaatgactcttattttaactttgtgtatctttatcaagacaattagtttggttaggccttgttatgtgatgcaagtaacacgtatagatctttgaccccaattttacaaaaatatttatgaatacagccaaatgttttatcaaatttgaaactctttaactttttaaacttttttgtatctaattatattaaaaaatattttgaacaaaatcaactctaagaggggtataagtatgtataaccgaatgttaacctaaaacacagtgcaaaattactttttaaaaactcctctaacataaatgatccaaaaaagacataaagtctttgaaatgcaacttcataaaagaaatttcataattcgaaagaattttttttagggaaattaccccacatattatttttctaattttttttttaaa

SEQ ID NO: 110386 - DNA, 506 bp, Cannabis sativa
  modified_base (56)..(70): a, c, t, g, unknown or other
tgtttatttcatatcgttttaaaagttcatgtttaggatgttaataacatacttgnnnnnnnnnnnnnnncctggtaaaataattccaataagttcatggctgcattatgtgtctaattatttgattgtttaaggctagttcatgccttctctattttaagaccttaaaattgagtttatactcattttgtccttttgtaatttttttgcgtcaattattcaatgtgttattattacatgtctctttttcagcaagttaatctctttgatttggatctaaagtcataaacttgagtggtatttattttatgaaacatttgtactatttatttttctctcaaactttgtatttgagttctttttaaagcaattggttttgttatatattataactagtaaacaaagtcgcgcttcgcgcggttttaaagcataatttaaatatatatatttaatatcatatttatttaattaattataattttttaaaatatatatttatatataca

SEQ ID NO: 110387 - DNA, 685 bp, Cannabis sativa
ctatataattttaagttaataattattataaaatatcgctaactatttgcagagcattacattttatgttggttctgcttacatgaggaaaaggtaattcatgagcattgcattctttcagaggagggtgttcttggttgggctcttgactatgctttttgctatcaggaagccaacatttcgaagtcttgttgtgccgatcgggctgaatctctttctatgggcagtcttcaagctctaccaggttagacaacgcctgtctttggtcatttgaagcttaacattgatgatgacctagccgtaggagatagaatggctggttgtagtgttgtgataacgaaccattctggtcattgcttggcatcaacggtagcccttgttcaagcattggtcttgcctccgactgtcataatggtcttttcctttgcagaaggttggggttcaatcttattgaagttgagtctgattgtaacagagtgtgcattgctttgactactaaaaacactctcttagttgagtttgggtttgttttagttgatatcttatctatttgtaatagcttgactgtatttggtttcaaatattgtaatccatagcacatgattttgctaaattggcccttacgtttgataatgttatgtagtgctataaatatgggaatggtaattgtaatatgaatggtaat

SEQ ID NO: 110388 - DNA, 564 bp, Cannabis sativa
  modified_base (36)..(68): a, c, t, g, unknown or other
aacattaaatgttaattctgatctatattaataagnnnnnnnnnnnnnnnnnnnnnnnnnnnnnnnnngggcataaaacccaacatatatagaggtagcttgtcgtgccttcccaagataattaaactttatcttcgtaaaattaagtggcaattattttttatattatgctttcacacctaagttcaaatatatatccacataaggctttgtgcggctactatttatacttttatacacatttatttactcttttgcttcattggttgttattatcttattttattacacacaattcatttttttctttttttttactcatctacattagccctcttgtctatgtttttttttaaaaaaacgctcaatattttttttcacatagacaattttactgtgtcaaaattaattactcatgttttaattttttactacgtggaggtttggggttcattctccatgcctattgtgacagtcagcagtctcgtgatccgtaaggggaaataccaagtaagttatgcaatcccacaccgcctggggaaggtcaagtaggatgattctaag

SEQ ID NO: 110389 - DNA, 537 bp, Cannabis sativa
  modified_base (41)..(83): a, c, t, g, unknown or other
ctttatatgtgtttacttataattgttttagaagttcatannnnnnnnnnnnnnnnnnnnnnnnnnnnnnnnnnnnnnnnnnntggtaaaataattccaacattctaggctagcactcggtgaatcgtcctcccaagtgggaagttagttagcgggaagaagcatgaaaactctggggacaagatgtttaagtccttggatgaatccaaaatcaactacaagatgttaagactaacgtgaaggtttgaagtactgattcttggaatcgtgtactttgagatgcaaccaacccttaaaaagcctagcaaattagaaataaagctccaaaaagaaagagtaaaaggcctactactattacaactagcctctgcggcctgggcaaagataattgtctttgcaaatcaaaaagtatgacgatggggagaaatgttaaaaaaaaaacaacaaaaaccatgacaaaggaagtattgagattttatgccataaataaaacccattttaatcaatctgatttgttatcaacaaaagattagaagt

SEQ ID NO: 110390 - DNA, 561 bp, Cannabis sativa
tattttataatagagttgtaataagtcttcattttcttctattgttataaaatctctaacatatgatgcaaagctcaaactagcctgatgaataaggataacaacgattttttcctttgaatcctaaaacttatgatgacaattatgacaccgttcaataatttttcctttcattttcatatctatttttggaattgtgtatggcacacaaaatccgttaaagagacatgaaattatcatatgggccaggatgatgataaaactctctgcttagtcaggctattattgggctagaaaatattacatttagaggctcataatttttattaaaattattatatacctttatgtataaatattttactagctcgtattgcccccaaaactcaaggaaatcaatacaatttgttctcctttttgctaaatttcagtcgctgcctctatacaatatacaatatacacgtttaattatctacgtattttatgcatttgtttttctcataataagcaatatctattgtatataaagtgtgcctatataactgaaattcttggtttatg

SEQ ID NO: 110391 - DNA, 531 bp, Cannabis sativa
tttagtgacagtttaaaacaatcgaataaatacaaggtatactattcacgtcggtcaacgcaatgaacagttgcgttaaccgacgtgaatagtgttttttgtagtagtgtacaaatctagtctttgctcactaagatgggtgtccaaagtgataaccaaagttcagttatgcttgcagctaatcctattctacatgctaggaaaattacattgaaatagacttatactttgatcggaacaaggttctaaacaaaggaatcaatatttttcatgttcatgctactcatcaacttgtagattatttcactaagcttatctccaataggcatttcactttcttcaagacaaactaagtgtgttgagttctcaaacatttagtttaaagggggctgacaagggataaagttttagtttttagttgtaacaaattcttgttctgttaagattagttttgttggaaattattttaccagggtctagatttactaacaagtatgttggattaatagcctaatatgaattctaaaacaa

SEQ ID NO: 110392 - DNA, 669 bp, Cannabis sativa
ggctgattgtactttttctggggatgccttacctccgagtattgcttccttggtctcagatgatttgatttaataaaattcatcatttttcaaaaaaaaaactatgtgcttaaaatttatcaataacctaataagatgtagaatggttaataattactaaatgtattagaagcacataaaaacacctttatagatataattgactcatttaattataatccaccattagttgaaccatcattggcccaattaacccaacaattccacagggttagaagggttattatatattaagattcaagaggttttgagaggtgagaaattgattaaggggttgctccacaattgtctctctcttgcattttacacttagaatttgctcttgttagtgtgttggttttggctaaattgaaatagctcaatgtgatgggatgaacaatttaagaggtatgttttaatgtatttataccctaaataaaatacgaattttagatgacattatgagcattgattattgtatattatgaattgtctttaactcataatgtgatatgttttaacaactggtattaggtgttacgaaaattataaacactacgcaagtgcacgtaatcaagtagtatactcacgcaagtgaggtcgaaccacagagaattggattaattacta

SEQ ID NO: 110393 - DNA, 561 bp, Cannabis sativa
  modified_base (493)..(501): a, c, t, g, unknown or other
tatgaagatttcttttgaaaattttatttccaagccaatgtgcaattttagcctcacattacccaaaaacaacctgacgtgttagattcgatctcttaacatcaacgatcaccatcctaattcaaggtggtcatcctcaaactttttatcacaatcaaaggccttaatcaacccatacaatatattctaggaatattcctgattttgtatttttttattgtacctccattcctataaatggaaggaacctcttgctcatttttttacattttacattataattacattatgaaatctctccataaggtcatatcttccctctagaaaactcatgtgtttctctctagaaatttggaagctctccttactctaattttattgtacccaactggtgctcttgtgataaataaatgttcgaagtagtcgtatctccattacctttacgatatgaggagtgaactacttgttggtaatattttaccaggatctagannnnnnnnnaagtatgtttcattaacatcataatatgaatttctaaaacaatgaaataaatacatataa

SEQ ID NO: 110394 - DNA, 700 bp, Cannabis sativa
  modified_base (68)..(70): a, c, t, g, unknown or other
aaaaaaagtcccaacgacattgtaatgtcgttattgataattatatttttagtgaggactttatgtcnnnagtaataggggcgttggtaatgcctcttattatgtatataatatgcaattagtatgtttatgatcgacaactgtaaaaactcgatagattggtaaaatatcacagtagcataatttagtattttggaagtactaaaattttttaggataattagaaattataatattaatgttgattaatataaaaatgacctatttttcccataagttatttatttgtgagtttatagtaagggtaaattagtattttcacttattcttgtgaataagccttaaggattattgtagatcaagctttaaaattaaagaaaactaagagtaggtttatctctcccttggcttctctctcagctatagcacacaaaggaaaaccaaacctcaagttttcaatttttctttccaaattgaagaattaagctagttttggaggattggattatagaagttagtgttttgaagctttggaagcttagtgaagaatatatgtatttattagtattaacttttaatttttccatttatatgtatttggtttttaatgcactacaaaaaattgttacatttagtgataactttttagtcacaatataatttttttgtgattaaatgtgattttttagtcacaacaaaa

SEQ ID NO: 110395 - DNA, 524 bp, Cannabis sativa
aattatgattggatatccgattctattggatcggttgggattggatcggtcggttggaattggattggatgactttttgcacacccctatggacgctggcagcaaaattcttaagcttaattatttccatgaatagtacgttgaaaatgaaatcacagttaccgttttagagatagtaggtgacagtgcgacacgtgcgggctgatgaaatcagttatagtgatttttcataaatctttgcatgctttaactgaagaacgcggattataccgagagtgttcattcgatcacattcaataattatattagatgttggatttgttaattgattggtctaattagtttcaatcaaacaatctaattcaatagaatgttggatattctaatgtattttatgtacactatatctaatagattgatttagatttatttagagaaacttacaaaaatattgaaatttgagttaatttttataaaaatactgtcatacggaaatatttttaaaaatattgtgtttttataaa

SEQ ID NO: 110396 - DNA, 504 bp, Cannabis sativa
aggtaagatttcgaaaatgaatgcatagcaatcttaccataaaaaggaaaaattattttgttacctaacttgccaaaaaaagactttacacatgtcatgatgtcaagtggatcaagaagatccattatttgaaatttcgaagggaattctatgttgtagtcgctaatgctatgatgtattatatttagagtgccaggaatttagttttatggaaatttcaggtgtacaagatgtatcctgcaaaaataattgtaaaaatagaagcaaaagagatgttagtataagattttctcattttaaaaaggagaaacaagtaaggcagataaaaacggtttgagcagatgaactcaatgatgtagtagttgattttttacattgtttgtaaaatgttgctctttcactacaaaaaactgttacttttagtgacaattttttagttacaacataatttttttgtgactaaatgtgacttttagtgacaacaaaatactacttgtgactaaa

SEQ ID NO: 110397 - DNA, 601 bp, Cannabis sativa
  modified_base (561)..(565): a, c, t, g, unknown or other
tacctacacagtctcagtatcatcccacttgaccttccccaggcagtgtgggattgcacagcttaatcggtatttccccttacagattacgagactactgactgtcacaaaatgtgtgtttgaagcaacttttagttcagctagtgctataagcaaccagactaaactttgcattaaagctagaatctattattgtaatttgtctaagctttcttttagagaggaaaatgtaatagccatgttaaacaatctttgaattgtttggttgccgcttttgcaatatgtattgttcggtggttgttagaataaaaaaaattcttctaaaaaaatttactatttttttgttaagattttttgggcttgggtatgggccaaatgcgtgggcctctacctcctcacctttgagccgacctctaatacacactttatattttaaaagagaatataattattatgatgtataattagtaatgggtaaattgcggcataaatacctaatgttccgattttatacacttaaatacctaatgtttatttttggtggcaaaaatacctaatgtnnnnnttctcttacaccgttactaccagtacttccgttaac

SEQ ID NO: 110398 - DNA, 501 bp, Cannabis sativa
ctatatcatataaatataaatatgtagaagtagaactagaagaagatgatgttgtgcaacgttgtgtgtctctatcaaaaactcattactagtggtggtcactattccaccacaagggaaaccatttccaaattttgaacttattacttttgtcccaaccaacccacatgactcactcactagtactctactagctaattctaaattatttgtatatagtgtttgggtatgggtttaatttgaaaggtggtacttacatatagattaaaaccaaaccactgtttggttggttcggacagaaaagattctatagagtaaaagtggggcggttgtttgtttgtttggtgatgatgatgataacttttaactttgaactatatacataggaataataagaagcttcaagttgaatcacccacttgtctctttcttaagtgccatatatatataaatatatattttattgattaagatatatcctgttaaaaagtagtgtctcat

SEQ ID NO: 110399 - DNA, 559 bp, Cannabis sativa
taatactccaattgtcatagttgctcttggtgagcattgaaacttggaaggggatcattcctccacttgccatttttcttcacaaacttggctctgataccaagtcatggttgatttagttgttacacacaatcaaagttgttacttattaattagttcaacaagcaatctgggttgaaatagatttacgtattgtttccaagttttgaacctaataatatatatgcatgttttaggtgccgacgttaagtgtggtggctagagatttgataatgatgttgaaagcttatgtcaataaattggaagaggaaaatttggtgaaaatttcttgaaaattatgtgtattttgacttttatctaattaagttttgtgattagtttagtatgttcgtattttttgagtttcatactttgaaaatttttcaatctaaggtattcaattcaatcaagtgtgttgatgactaaactttgtgtatgtgaaattaattcattttgtggtgggaccgactcaatttatgtcctagtatagttggaattgattttctcttttttttttttt

SEQ ID NO: 110400 - DNA, 540 bp, Cannabis sativa
ttgtatcactttcaaataacatagaaaaaacctagcataaaatttagtatacgtgcctttgctagtatatatataaatatatattaaaattttcaacaacatattaacgcgtaccgaaaaattacacttagacattgcaaacatcaattcctcattaaaagatgtaattatgtcaaaaatctacacttcacattactatagccatgaattcataaagtcatataacagaaacaatgtctcatgtcattgtctctaggaaaagttacaccacataaacttttgccaatgtatttatattaatgagctattaaaatacttttcatggaagattttaaacgctctatttggatgaattagaaagcttcatgactaaaataaatgacatcctaccaacacttttgtataaagcctaaaatctatttctatatgtggaaattgattctctaaagcaatttatcagagtcttttcactgaagttttggtaatgtttctcagctggagtatggccagggatcatgttgatctctaggaccggaacca

SEQ ID NO: 110401 - DNA, 637 bp, Cannabis sativa
gtaatcatggtattcctccgccacgagtgaggttatctatatataacgggggaggggtcagtcttagacaaaggcctctttctctttttcacaaaaaaaaaagaaagaattataaataattgatagcgtgcttttgcagagaaatatgttgcctcttagttcatttagattggggttgctgtttgattacatgattaatgttttattgtaattgaattgtgtttttgataagttattttcttgataaatttatttattatttattgcttcagtaaaattaaagtaccaaaacatgacatttttggatactattgtggtaagataactggaataaatgcttgatttcatgatggcagtataaccttactgcaggttgtgatgcctacagtggaagcagatgttgcatttggccttggaaagttcaaccttaccagtgatgaagtcaaacttagggtgtcaaaagctttggatgctgttggcatgctaagctaccaacaggtaaattacgcaatttcacaaatcttaagtaactgtagcatgaaatttatttatttagttcattgcaaatctcagcggtcagttcaaactcttagcggtggtcagaagcaaagggttgctattgctggtgctttagctg

SEQ ID NO: 110402 - DNA, 546 bp, Cannabis sativa
aaaaaaaaaaaaaaactaaagagaaccacgtagctcgagatagcctttcaagatgtccaaaattcttggaatgtcaattctcatgagtaagatcgcgataaaatatgttaaaccttgtatttaatgtagcttcattttcattattggattttgtttggatgaaaagaaaatgaagaaaactaaggaacactccttgataattttttgttagagacttgctaatttttctatgtataataattagaataacaaaaaatatttttattcatacaattatattaaaatcatcattagaccaaatatatgattaatctacgaaaatactttaaatattttggcactagacttgttcttaattatgtaaaaatataaaattagataaataacaataattttatttatttacattattacttatttcatttagtttaaactcggccttgggccttggctactaataataagatgggatattttcaaaaatatgggaaaaatgagtcatcttatgataaatatggcaacaaaactaaatgccacaaaatatgg

SEQ ID NO: 110403 - DNA, 552 bp, Cannabis sativa
aaaaaaaaaaaaaaaacttaggtaaagtctacgcacatccttaagagctaaagtgtcataaaaaaaggcttatattttaccattggaaactctgaatttatccccaatatcataaatgtattaatggacgagtgttttaaatgttttaaaatttgaaactataaaaaatattgataatgagattttattttgtgctttgtttcttaaaagataatgacatgaaagaaagaaaaaaaaggaagagcataatataatatcccatgagaatatatcggaatggcagaacatatgcttatgcttatgctttataattaattaataaaattaaggaatgacattccctcctccccacactacaattagtcactttctcatcatgacatgttactaaaaactattatcatgattatttttttcagactaatatcttttatattaattataaatccacaatccggcccttttaatttttcgagatggtgagtataattttacattaattataagaaacttacaaaaatattggaatttgagttaatttttataaaaata

SEQ ID NO: 110404 - DNA, 616 bp, Cannabis sativa
gaaaggtggtatgctcttgaaccgcacccaaataggtgtttgatcaaaacccccctctgccggtgtgagccaagatggccacgacatgaggaccaacaaataaccacacacaatctagggccttctatgcataacattctccgcattgaaactcgtttgaaatgtgaactggagaagcctatcttctctttccttcccgctccaacccgtcagggagctccacgcattttttagagagccatagatcgctttacgtcccaatctggaataacaatatagtttcccaagtaggattcgatttggttcctctttgtggtcaacctcaccagggtgaagatcgcacgtaaggtcatttgtagtaacttgaaccgagtcctcaaacagtgcacttagatttgcatctgccataacgattcaaacaactataataacaaaccagaaacatattcacaatggtaagcgaagattctcaatcgaacgctttcatacacttccacaaagtggagttcaagcttcaagctttgatatatgcatgtgttatctttgactctttctccatgttaggctaaaattagtctaagtttcgggtcgtattttcggttagttttcactcttt

SEQ ID NO: 110405 - DNA, 517 bp, Cannabis sativa
  modified_base (34)..(54): a, c, t, g, unknown or other
  modified_base (449)..(471): a, c, t, g, unknown or other
aaattagagaaaagtccttaaatttaacaatctnnnnnnnnnnnnnnnnnnnnntaacggccaaaaaagttcaagaaaaaattactaattagccttatcatattatagcagttttagcaatttttctatgatgaggaaagaaaaagagtaatggcaagttgcttgtaattttgatttatgcccctatattttgtttaccacttttgtaataattaaattatcattttgatttattatattctaacaccaattaacattttcttttagcttaattaatatctctaattattttaataagattgcatcaatatttattatttgtttctatttttaaacaagaaatttttgcaaaatattttcaaggaaccttgttggggtttgagtatctttgtgaaacacttgcaattgagtggctacacaattctgcctgtgtcatggactttgagggnnnnnnnnnnnnnnnnnnnnnnntaattgaattctcctacaacaacagctaccaaagtacaatagggat

SEQ ID NO: 110406 - DNA, 502 bp, Cannabis sativa
  modified_base (421)..(446): a, c, t, g, unknown or other
ttgtgaaaaattaagcaattttcgttttcacagaactcaattccgatgaaaaacgaaggagatatgttgatttgaaaatcggggtccaaagagtgtcgagggtcgagcaccacacgcaccagtcactctgacaaggtgctcatgcgcacgcgtgcctcagacaaaccttgcctaatgctcgctgatgcctagcattcaaacacgacacaccctgtaatctgcccatgcctgaccctacaagttccgaagaatctcggccaaatcaccctgcaggcatcacattccgcgcgcggtgcagcctcttctaggcatccagggtgttttcacccaaaaatcaaatttttttggtatttttttcaccaaattttggatttttgaatttcaaatcacaaatatctaaataaaatattatttttaatannnnnnnnnnnnnnnnnnnnnnnnnnattaataatatttaattttaatagattattactaattttttgatattttgaggttt

SEQ ID NO: 110407 - DNA, 573 bp, Cannabis sativa
tttaacatagtattatataaaaatatgatatataatcaaattcaatataatacaatacaatacaatacgacctaatatgacgttccaaacgagctatagatatcagacacattccctctgatcaacaaatagcagatagttttaccaagttgttacctatcatttagtttaatctctaaaggtccaagttaacactcgttacgcctccatccaactcgagggagtgttagaacaagtgattttgttaattagttaagataattaaactcggttaagttgttagtctttctgttatttttttctgttataactaactcagttagttaattcttgtacaaagatttgttgagctcttttttcattgaatctcaaatttccctttctcatagttccttgcttttctctgagaaatccaagagtaaagcaagttataaacttttgaatcgaacacaacaaaacaatatgttacatgcagggacaggacagattcacttgtttttccccttttttttgtaactttctttacaaaattaaaatttttttgtttacacttcctctttttttttttttttt

SEQ ID NO: 110408 - DNA, 528 bp, Cannabis sativa
tttccaaaaggcctgagtcacattataggaaaatccttctttaagttcttcaacaaatcgatcaggcaaccagggtctgtcccacaaactcacattgcccccccaatcaagataccagcccccaaaagacaaatctcacgagctcccgggataccttgccatcccctcgaatccccaccatgtttctcaacacaccagatatcagagttctgatagtatttgttaagcaaagtgcgaacccacactttatcctcttccttgaacaaactccagcacagtttcgccaggagagccatattcatatcatgaaacctcctaaatcccaagcccccacagcgcttcagttgacagatttcactccaactcttcaaagcacagtatcttttactatcttttgtgccaacccaccaaaaatgagcaactattctgtcaagataagatagagaatttacttggtaaattttagaactacttattgggagcttgattatataggcccctggtccctacactagttgagataatatt

SEQ ID NO: 110409 - DNA, 521 bp, Cannabis sativa
gataatcgaatcgcatgagattgcgattccaaaagacgacagaagagaagatgttgggtcgattaatattctgctggtcttctctcgattaatgcgtgacctaaataggccttccttcaatattcctcgtacatgtccctttattataattagggacacgtgtacactcttgggagataaagatcaaattgaattgggccctaaaattaatttgggccgaaagtggagggatgttaatgataagtttgactctaacttggcctggtttagagaaaaaaagggagaggaggccattgatttattaccataatgggtcattcagtattttttggcccaaaacaggattggaataaggcctgagattaagacttcttttaatcccaagcttcagagatgggatacgtggggtagaaaagaaaaagaagaaatggccatatgtgttaagaaaaatccagagtagattataaatgatttttttgaaggaagattaatatcaattactgttgggttttgtgctctaa

SEQ ID NO: 110410 - DNA, 770 bp, Cannabis sativa
tgtgttgatggttgatgtgtactcaggagtgcagggtcgagttccattcacaaagctatctagtctttggccacagattatgattgacaccattgtattccgtggtgtataattattttggtccaacttaagagcaaagggttgatttagggtattgaatggtcgagtatagttgagagtgagatttgatgaattggtggcagcaccaatttcacctaagttttgagcagcagtgttttagcaggctgggcagcattgccatgatttgcaggtggtggtgtttgaggattggggggagtttgagaattttttgtcgacattggtaaaggtcgttgatggctctggtactcggataaatttagagacagttggaaattgttttctcaactcaattgatatggagagagattatttcattaaatagtcaagattgatacaacattagccaataaaacagtgtctgacattacagatttcaaggtaataacaagaaatcgtataaagaatattctaaatactaatcattgccccatcacgatgagcaagtaatttcgtgtagcagaggtgcagtgtaccttaagcctcattcttaacatacagaaatgctgccgttttagctttagccacttgcaaagctatttcatctttgatatatcttacttgtaacaagcaacccacgccacgtaccgagtcatagaaaaggacaaaaattgtaacgccctaatctataggaacgccacgtgtgtgattttataaactagtttaatact

SEQ ID NO: 110411 - DNA, 543 bp, Cannabis sativa
acaatctcaatagttcgagaggaatttttaacagccaaaaaagttcaaggagtacgatttagtacatgttaaagttcagagaaaaaaattactaactagcctttctttttttgaaatcaaatttaaataacataacaaataatagggaaagaaaaatgataaatttcaaaattttatgccaaaattatcaaattatcaaaatttatagtgaaaaatattacaagtttctttattagatagagatccctccattcccctaagtatcttcacattttatgagtattactttcagccaaacaagtattgtcgatttcttgtgactaattgtttatgatttaattaatgtagtaattagatataaattattattaatatagtttagccacaataaatttattgtaattaaaaatacattttgactaatgcttttatacataattttttagtgaaaatattgacttaatagtgaaaatatttttggagaatcattccttatactattttttttttttcaaatttacggtttgagtttctaaaatagtt

SEQ ID NO: 110412 - DNA, 515 bp, Cannabis sativa
  modified_base (475)..(477): a, c, t, g, unknown or other
cttgattgtgttctttaaattctgttattatattttctgcaactcattaattcatttctggtgtgttgattattgtttgtttgctggctgaggttgttgtctaacacaacaatattgcttggtgataaagatgagaaataatcgaagttggcttagcctaacgtccaattcatcaattgtttgaattccacttgcagatttctcgattagccctaatggatcgatcacctgaattgatgacatcagccagctcaattcacgttcatgtgaactaatgacatgattagcaaagttaaactctatcaattgatcatcgattctgaatttttgttgtggacttggacgcatatttatttccatatccaattgatgttatattattcatacaagatattcaatccaaaattgattttattggaggtaatgaaatggaattgaatggaaaagaaataatttttattccattcctttgttnnnttgcattttaaagtattggaatagcattccaatggaat

SEQ ID NO: 110413 - DNA, 535 bp, Cannabis sativa
cccaactcgagtatggggttttggtgtttttttgcgattttccaaatttatccacttatctttgcacaatccttcctttgagcatacccatttcttctgaaattttttgttctcactgtcctttctcatatcatgttttcactgaatccaatccacttagagtaatcataataaaaactttcccacattgtacaagtgggcaaagttttggtcatgaggtcttcagttttaaggtctaatatatttcttgatttggagcccatgcattaagaatggccacccattatcagtttgtttagcaaagttgagtctatggtattctccatttctatctgcagaccaatacttttttttattagattaattgtgcttctttcactttacaaattatgcttcagctttaaattattttgataatggtactaattgataaactagtcattgttataaaatactataaaataatataaagtagatgagaagaaagaagaagaagataaagagagaaagagaaagtgaatgagaatttctgagt

SEQ ID NO: 110414 - DNA, 562 bp, Cannabis sativa
agccaccatttggcctttggggaaccgatggtgtcaatgtagtggttgtagaaatctcaacgttgatcgcacctttcttccaaacccctttctaagaaaagacaaaggaaatattttgcgaattttgagggatcgtgtcagaatggtgacacatgaaaaacatgtaagaaccattatgggatcctagagttaacttgctccatgtgaaacattacgttcttgggcatcattaaatactattatgtgacctcgagttggtcttcattgcatgggatgagtcagtacccgagatagtaataagaaatcagccaccttattgttccaggctagttggggatactagactcgtggagtgcttgctgggatcagtgctctcaaagcgtacttttgtaaaatgactactgaatatttacataaaaataaattattcactcagaagtattgcactatcaaatttagatgacgagttattatcaattgacctctggaatgaccataacacgctagggctgtacaaaaaaaatttgtaaaccgcccaaaccgaataacccgcccaaaccga

SEQ ID NO: 110415 - DNA, 683 bp, Cannabis sativa
tcttccttatcccaccaatcatccaacttatcaacatcatcaaactattaactacatatccacctattctaaacaaaaccaatacaaatttattctcaaaccatcaaagcttaggcatgcgtagaccctccgtccaggcagtccaaccatctccgacctcccaatcctcataatctccaaaaccccgagtcctccttgagaagcttctttgttctctgtcgtctccggccgtctgatccattgtccaaaccccatcaagaacttctccggcatcaaagccctcgtgacgttctcggccaccatcgtcgatttcttcccatgttatcccggccggccaccattgtcgacaccaatgatgatcagtccatttctagtatgcaccttactcttatttttatttttactaactctatctcgatctccatatatataatgttatatctcacttggtctctcaatctctgtagagagggctttggtcggggttcacagattggccagggtgatgtttcatagaggtggagggtggcaacaacttaaatgtttctgtgacttttttttctttcttgagtttaaatgttcatacctgttgtaatttcagcggaaataaccttgaggattcaatcataaaatctgcaatgaactcacaactttgacagtaaaatgaacataaaccaattaat

SEQ ID NO: 110416 - DNA, 577 bp, Cannabis sativa
gcttgtaaatctcattacaataacaaataggtctataatcgcttacattaattgtccaaacacttagatcagaatcaatgtgatgtggtagattttatctatttaaaaagcttccctgtgtggagagaaaataatactacctcactcacctcaccaccaatcaaatttcaataatcttgaaaaaatgattattaaatccattaggactctgtgccttttgaccaagtatactgaatacagcctctttaacattttttgtggtgtattttcttatcaaaaaatcttgttgctcctttttcaccactgtctctactgaaataacactttgcaaaacaatttttctattgtctattttctcacccagtaaataagtataaaattgtaaaaaagcatcactaactttacttgaatcgttaacccaacacccaaccatatttttaattgaataaattctatttacattccttcataatcgtgttctaatgctgacatgatgattgtcgtgtagcataaccctccttaagccaacaaatctgtaacgtccccgcttcaagccttcattgggcccttacaccca

SEQ ID NO: 110417 - DNA, 519 bp, Cannabis sativa
tgcagccttatttgcgaaatggctccatacttcccatccaacaaattcgttgagcaccaaagtgctcataagcttgatggttacaacaacattttgaggatcatgagctctgtggagccacacgttcgagtgaccactgctaattcgatcatggccgaggcctgcgctaggaggaaagatctggtgtaaggctgctacggtattcttaactgccttagagatgaggtggccatgtacgaggctcaactctaccatatcaataaagatcgaatttcacagagtttataaagaacagaaaaatttacaggagaaaatgcacactttcctcagcagtactaattctagtactgatcctattactcatcttactccggattgtactcataaacagattattgatcttgagagttttgagtttgaagaaggaaacaatgctagtcattatcacctagtaagaaacgatacacattatggcatgtttactaaaggggaatgggaatcaattgtatgagattgatt

SEQ ID NO: 110418 - DNA, 646 bp, Cannabis sativa
tataattaattaattctaaaaatggaatttttacctattggtaacctgctattacaggtaaaaaaaaatgtaaccattgaatagtcacccatacataaatatatattttgttttgaatattgtttcaactgcccacctcataaaattttaaaactttaatttgaaagtcttaataagaattcatgtcacacgttctaaacataataaacttaccacttatttattaacttctctcatttagttattctctgaataattcatacttcttctctctcaagtcttcataacaaatttgatattatgttttcgttcttgataacttagcaaataattactacattattttgatatatctcaaagtttactcatgtaattgttaatattgtacttttttgtatataattctttaataatttatttgtttagtacttattctttcaaattgtttgccttgcatccatttttctttcatttgatattttactcatcgtcttttgttgaaatgatttttttctttcttatatgcattgaatttcgatttgttatattatttataataatacaatatatagattaaatatgtgtaataaactaataatatgtaacatatgactatattagttgtcatctttttgtaacatttggg

SEQ ID NO: 110419 - DNA, 595 bp, Cannabis sativa
tatatgagacccgatacttaattggaccaatagcgatattgacacataggttggtactaggcaccactggtgccctgtagcatttctcttaaaagaagtatgtagtgtaattttctggtttttgaatgataaggaacccatgatgagaggtcaattaaatgatcttcaagtccaaccttttcagtgcttgcagtgtaagacttgcgcagtgagtggcaagaacatacgcgtgctctttcactattcattctttaatttccttttagattactttggccatagtaggaataggataggcaagtggctttcaattgatttgatccaacaagatttttcccttctctcatttgtttttacaggagtctgtttcaaagagaaagagaacgtctttaacatgattcctttgaagaccacttcatctgtccaagatgaatctaattcattgattcatttttggttttcaatgtagttgtgttattattctaccacattttgtggaagggtttatagaagggaaatttcattttttgcccctaataaaacccccaatatcaaaatttagacccttcactaatttgtacaaattaattccatt

SEQ ID NO: 110420 - DNA, 500 bp, Cannabis sativa
agctgggggggtcgacttctgaagggattacagagggaactgagagtgaagctaagaaaaggaagaatggagggaaagatggtgagacagaagaggagagggatcgacgggcaattctcaagggtaaacaaattgtaagtgatcaggggtaagctcttactctgggggtgtaaatattaatcatggtgcgggagagaagttgggtaagtcgagtcttcctggacaacgaaaaaagctgtcgattaagaaccgggcacggaatcatggcaaaggcagggcagtggtctttaatgcgaatgatggtgtggtggcaagttctttggttggcatggattcgaatggaatggggcagcaatttgttttcggctccgaggatatcaatggaacaaagagtgaggtgactaacactgaggtgagtatttctcattgtactgatttatcatctcaattttcaaatgacgaagcggcgagtcttgctcagcaagaccgccgagagcaat

SEQ ID NO: 110421 - DNA, 577 bp, Cannabis sativa
aaatcatcgacaaaatgaatgtaataacgaaaaccttccttagataggacatgtgagggaccccatacatcggtatggagtagttccagtggagtagaagccctactattagacagagaatatggtaacttgtgacttttaccaattttgccagcatcacaaaattttaagctttttagagtgcctgtgtgattaacatgagacagaactctagcaagagttgcaggaccaggatgtcctaacttagagtgccaaacattaacatcttgagcaacatttatatgaaaggcttcattaacagacacagtagaaggaatggaattggtatttttattaatatttggagaagtacaagtagtagggactgttgagacagtcattttattacattcagagttacaaactgaaatagatgcagcataaggtaaaggggatgaatctttggtagctagatgacattcaagttggagaggggagttggacacagatggttgagttagcatgtacaagccattcttaactctccctttgagcaaaaccttcccggtgctcttgtccttcacaaaacaacaagtgg

SEQ ID NO: 110422 - DNA, 588 bp, Cannabis sativa
tggggagttatccactctgtccgcaaaagggggaaagagaatccactccagaatttcccgaggagaatcaaaatggaggagatcacttcgaatgccccaggagcttctaaaccaacaaaaccgggcgacggggcaatgaaaaaacaagtgctccagggagtcactctcattatcgcataagacacaagcagagatatttccaaacaagagctgaagacgctggccacaggggagaatgtctcgcccaattttccacagaaaaagcttgactctttcacaaagagaggacttccacaaggtcttaaaaagattatcatcaaccccccgcctagctttggaaatggagtgataggccatcttaaccgagaactttccatcctgcgagtccttccaaaacaggatgtcatcttgagaagggggaaggagaggcaaagagttcaattcagataaaaccgagggcctcagccaccaagacaaagactcaaaatttaactccccattctcccccatgaaacgagacatggatatcggctgcttgggacaaaccattggattgaaggcagctaagaaatcatcccaatccagcca

SEQ ID NO: 110423 - DNA, 8195 bp, Cannabis sativa
  modified_base (8150)..(8159): a, c, t, g, unknown or other
cggtctcggcattcctgctgaaccgctcttccgatcttctctctctctctctctctctacactagtcgtaccatgactctactctttcacacacaggtacgatgaccccaaaggcagccccaacaacgaccctaatggcaagagattatcacatcattaggaccccctcgcatggtgttgtcgcatgcagtcctgaccccaacgatagctccacggcgactcccctgagctccaatggcaggtaatttctttctctctcatgcgacatccctcaatttggggagtgttcttctggcattataatttggggaggagacgaacttgtctttgtgatcattttggtgaacatcgtggtacttaatttagttgtttatgtagcttgtaagttttgatttcctttacagtccaaatttatcttttgatatagttctatccaatttcattgacattgaagatttcttgttcttttctacataccaagttcttggaacttggcacactacgaaagtttacagcttgtctgatatgtgtatactatattttgacaagcaaataatgaatctatctcaccaggcatcatctccacaaagaaaagattttatcaacctgatgaaccatcctcaggaaaaagaagaaaatctcaaattttatcatgttctgaaactataacaggataatgggtctaatgtatattattttgtaaatctcagatctgataattttattcaattttttattatttatttgcttcagtttataatcaaagcaaaaaagtaattagcgttggtgcactactatttgcttctgttatgaatcgaagtaaaaactcttttttttttttttgcttcggttcataaccgaagcaaaaaaatatttggtgtcggttctaaactgaagtaaaaaatatgactatttgtgtctgtggttattatgtcgattaccctaactgacacaaatagtttatttgtcactttaaaaccgaagcaaaatgtcacttttgtagtagtgaaggcctttttgattgcttctggtttatctacccaagtaccggagctgtcatggatagcttacgccatatttctcatccttcttatttttatacttttatgaaaaagtttagaattactatcaccatccttggaccaattcatttttgctttttgagacaaaaagagtggtaagctttaaaggcctgcatgtaaacttttgtagcttcaatgtcagctttaatcaaatcaccattcacagggtccttatgtaataaagcccaactttgaatcatcttatatttagcttctttttccttggcatccgcctcactaaaaccagatttattaagatcttttaaaacctgtttaactcttttaagcttcttacaaaggcagaacataaaagtttcactaatcggttcattctagctttcgccaactctactttgaaactccttaaattcactccaaatatcaaagtatctaaatggtttcaaaccattactttgagcagggtatacaatgagtattaacagacaatgatcaaactaaccttccaagaataaggtgacttcaacattcaaaaaacatttaacccatatttggtttgccatcattctattgagcttagcataaaattttgtggactcattttgtttgttgctttaagtataaaagcaacctgtgaatttgatatccataagctcacaactcttaaatcaattcttcaaagcatggtaatctttggacatcttaccaagacttattctctcttcaagcatcattatcaagttgaaatccctcataataatccaaggggaattctgaacagctataataaccttcataattttccataaatcttctctagcaatcgtttcattatgagcatagatgaatgtggattcaaaactagcagtatgttttaaataaaccactgtatgaatatgctggctcgacatttctttaatctcaatgtcaaaactattcaaattccaagctagaacaattcctctacttggatgacaagaagaattagaagtaaaacaccaccctcgaaaaacttaaggtataaaactcctatattgtgagttttaacccttgtctcaaggaggcacacaattcctccatttttatcatgaaccagtcgatgctttggtgcgaagcgagtagcccaactctctaaagattggccatagtgacaaacccttccaccttcagcattgcgacgggcattctcatgtacaacttctccctctccaccaagaagatagaaggaccaagaggcccaatgttggctgcaagattgaaacctttctcattagcaaaaattttcgctatagaaaaaaagggtcggaagaaaagaaaggtagtaagacttacttcgaatggagaagtcaacggacaatgtcgaaaccctttttaaggggaagccagaggtaaagaactagtagtcctagaagtttggaacatgtttgatactgttggtggggcagaccatcttggagcacttctccagcttgtagaaccctattttggatttattctttcgcatgggttgtggcctcatgctataaaagtataatatctcctctattttaggagtctccattttttatccacacaaaggatgtaccatccggccagcagcttgtatgattacaggataagatggaaaggggtgatgccactgttgcacagaagtttgaaaaatagcatcacaacaatgagtgcgctcaataaatgatgtgcgcccaactctaggctcctaatccatccataaatttgacggccgactctccatggagtgcaagtctattccaacagagacctgggatgtggagaagcccttgttcctttgagtgcattttcaatacctcgtaattttgaaacttgttagggatatggtccatctcccacttggaggaattgtatattacttccaagatcgcctctttgggttcctccccatttggaaccgttttttgggcttcgttcttgactagctcctccatcagctccactacctcaagatagaatatgtccgacatgatggtataactgaaaagaaagcaaaacaatataacaaaccagttaaatacaaacattaaaggaatggcaagggtaagggagagtcctccccttaactacttggagaggtccccgtcgaacccgtcattcggtgtcctcgcgtgactttgctccaggacgatgagattaggaactcaagagtaaattgaagattcccaaagatttcatccaaaaaataagagctctaactagatagaagaaaataaagttgagattattcaaaggtgcctacaactcaatctgtgcagaaaataaattatgagcaaaattcatagatcctaatctcaactattggcgacattcataccaagaaaaacccacagctctagaacgacccttaagacacctaaatcgtgcacactatgtcttataacccacatgcaagtaatcacctaaacccttaagagagaatatatttatcctacctagaatatgaacacgcatttcatcgcaaaaaaaatcaacaattaaaaaggggaaagagtacttacttgaggaagaaggaggtcgtgggggtagcatgatttgtggtggcacgaccgtagcaggatctctgacatggcgacaaagtctagcctgaaatttgtatgcccaaccaagtagtttgtcgatctttacttgaatcttcaacgacctcaatggatctggacagtttatcgtcaagtctggtggtaatgctcctagtttttctcgtgctcgaattcgaagaagaagactaaggcagtcataaaaaatattggacattcaccaagggaaaagtttgggtttttctctctcgaaaaatttaaactcaaaatacaaaataagttaaagtggcaaattgtgtttcttcaccctaattataagtgaatgatggcgatctacatactattagggtttatgccctcaaaatcttgtaaatctatttctgattaagaataaaagttgaacattttgatgtatgcatgaatattaagttttttttttatcaagaaggaaaacttcgtttatcaacaatctgaacaaatctgtacaaaagcaagcaaggggcagccccccaatcaaaataaactctctacaaattttctctcatgcccctcaaacatttatttttaagcacttgcaatctatagtatatgattctttttacatcactaacaatggagttgacagtataagaatgtttattgaaaatacaattgtttctattgttccaaagatcgttgcagccatcacaacaacaagaattctgtgtctgaagttagtgatcctaacttgaagccagcttttccaaccgatagtagcagtcggccaagcccgatacccaagccaagcaaaaattccctgcaactgtttgaaagaacacagtcaaaaaataaatggctatgagtctcgatttccatctcacacacaggtcactccaaagaatctggaacaatattgaactggccaatttatctcacgttaaaagatgagaattaaccacttgccataagatgaacctgtgtttgggtaaatttagggagctccaaatagctttgttgtagggaaactgatgttggactaaccggctgttgtatagccaattagtcttaaacttcttaccacccccagctgtttggatatctcctcttgagaacttatctctcaaatggcaaagcttacgccaataccaacttgaatcatgtttaagatcatactcccaaaagttactattcttcaaatagatacaattgacccacttgacccaaagcaaatctcttttagaagtatagcccaaatatacttagctagaatagcatgattccaacttgtcccatctttaaaaccaagacctccataagcttttgggaggcaaactttctcccaagaagctaaatgaatcttacttctattgccattccacccccaaagaaatcctctacatatcttctctacttccttactgacactttgaggcaaaataaaaatgctcatccagtagtttcgaagcccaaggagcaccgaatgaatcaattgcacccttcttgcataagacaaatgtctactagcccaagtgtgtaatctttgcctcattttcttaatgataataccaaagtcctctgctttccatttagttggccttaaaggaactcctaagtatctaagaggatagcttccttccatcagcacaaaatctcttagaatattctgctttatatctgattccaccccaccgaagtaaatttgagactttgaagtattgatggataggccactcatagcactaaactcctctagagtatctttgagagctctgacagaatgttgagtgcctttactaaatagcattaagtcatcagcaaagcaaagattcacaattctaagctccttacacatagggtgatacctgtaatgggaacaactagcaactttttgaagacaacgggttagatattccataacaagcacaaataagagaggagacaaaggatcaccttgccttagacccttctctcctttgaagcttccttgaattctcccattcatgacaattgagtagctagttgctctaatacaagtcatgatccacattatgaacctggaaggtaagttgtaagcattaaggaaatcttcaagaaaatcccaactcaccgtatcataagctttactaatatccactataatggcacatctaggggaaacatttttctgcttataattcttcagcaggtcttgcacaatcatcacattgtgagctatagatcccccttgaacaaaggctccctaattttgattgattaaaccaggaaggacttgagcaaggcgagagcagacaagctttgaaacacacttgtatatcgttgtgcagcaagctattggtctgtaatctattgcctttgaagggttctcaatttttgggacaagagtgatcattgttgcatgaaattcaggaggcattctaccagtttggaagaagtcttttatggcattactgatatcattccccaaatcagcccataaagctttgaaaaacccagaactaaaccagcctggaccaggatatttagagttaggaatgctgaaaatagctttttttatctccttttttgtaaacggtttcagcagccccacttgatcttcaagactaagcttagccccatgatcaatgcaattagaatctattcgacttgtagtacgactgcatctacccatgatactcttgaagtgagataaaaagtgagtaacaagttcagggaacttgtccaccactaggaattgttctcatcccctttgcaaagccaagtaattttacttctttgtctcaagaagttgtggtacattttttcctgcaagttgaatctaggagcagcttccttttcctggttttgaattttcatgtccaacgggttagcttgagcttcccttctagcagttaagtaaccctctttagcttcatgataatttcttccaacatcacctatagtgcacttgttaaagactttgagcctatgtttaaccctcataagcttgaattagagagccttcaaacccgagcagtttataggcttacaccaattctccaaaaccacctctttaaaattcgggtgttcagtctagaaattaaaaaatttgaaaggcttaataccaatcctctcagacacaactactgaaataacacaagagcagtggtcagaggttaattcccagtcaaaatgtgcttttgaatctggaaagagatcgacccagtcttcaataacaaaagcatgatcaatcctcgaatatattctgcccttatcctcctgattgttggtccaagtataattggaacctatctttttaagtctctcaacattagcttgagccaaccaactattaggatctgctatgtcatttaaagtaatgttttttccccaatcctatcatctagttcaaatacagcattaaaatcccccaccacaagccacgacttcacaggaaatctcaagttcttcatctcctcccaaagatttttcctagcctcagcagtgttaaacccatacacaaatgttatacagaaatcaaaaacagcacttgtcatcttcacatagcagtgcaccagctgagaagattcagcaataacaataacccgaacaaagctttttctccaaactacaagtaacctgccctctgtattggcactcgaataatggttccaattgacaaacttattttccatcaactcatttaattttttccccctcactttagtttccaaaaaagcataaataccaattttcttgacattacaaaaatcaacaagagtatcctgttttttcctactatttacacctttaacattccaacacccaatattgcaagcttccatacataagcttgtgacttgtattgtacgaagaattaacatcacttagccatgaataaaacagtcagcaacataatatagttcaagaatctttaatcaatagtttctagtgaagtttactgatacctattattcggtggaagtaatcacgattcatattactgatatagcatgacatctaagtgaaggtgttgtatataatggagattacatatgacaaggaacgatatgtaattaagttgtctttatcaaacatgtcgtttactaaaagacctaattcatatcataaagatgatcaatatcggcctaaattctgagtaatcataaactaatgttcatgttattattttctttgattcactctttaaagtttctcagagaagataattcttaaagcttaaaccctaataaggacataaaggaccaaacccaaccagaatagcatcatcaaagtctagaatttagtttcaccattgttgagctaagtttgagctttaaaactcaaacctagctcaaactcaactaaagccataacaagcaaccactaacaactcaaacaactcaaaaaatactaaagataacaatccccaaacaacctaaactcgaacaagaacaaaacatataaaatgcatagtcaaacctaacttttcctttaaaaaactatgaagaaagaatgctagggcttaccttgatcttcctttcactaaccacttgaatctatgttgtaactgttggaaattattttnnnnnnnnnntagatctactcacaactatgttgattaacaccctaa

SEQ ID NO: 110424 - DNA, 2754 bp, Cannabis sativa
ttgttctgttttgtgttctagtgttgttttataaaaatactgtactttttgaaaaaattactctgtgacagtatttttgtaaaagttaactaaaatttcattactttgtaagtttcccaaaataatccctatgaaataccctaaaaaaaagcccaagaaggcccatgtggtggatttcaggcttcccgcgctgaactgttgagttggactggtctataggtttcgacgttgatcggcaagtggcaactgaatttcaaatctcaacggtcattttcttcgaaaccaatacacacaatttactcgccggacaaaccggcatgattcgagcttcgaaacctttattacgcctattaatccccggccaatattcaccgttccggcgactccacgcggggtctagacggcgtcgttattccaaaaacgacaacgacgacgatgataaaaacgacaagggaacccatttgcatttatataagagtaaaggtcagcatcttcttactaaccaaagaattttggataccattgtccgaaaatctgctattgaacccactgatacagtcctggagattggacccggaactgggaatcttactgtgaaacttttggaagctgcaagtaaggttttcgctattgaaatcgatagtcggatggtcgagattcttgataaaagggcattggaaagtgggttgcaagatcggttgactgtaagtgaattgctcactatgtgtttgattaaatgtcagaactagagtgaaatggcccgcaccacaccatgctaaattatgttgtttagagtcaaccatgaattttttctaaactaggagttttataattgcgatttaaactgcactgcatccacctttagaaaataatatttttctcaataaaaattctacttttatttgaatatttgatgtaattttattactgtttatatatttaccaaaattagtttgcgatttgtgattgtaacctgtaccgcaccagactgtacttttagttggcgattacttgaagtggttttgaggtctattgggtgcagtttaaaaaattacttaaactatatatgtggtgcggtctaaaattggcctaaaacagcattttcacccacaccaagaacaccccggctagttgttatagtgaccaaaataagtttttttttttcaaatggggtttttgcaggttatacgtaaggatgcactgaaggctgagtttccattattagatcttgttgttgctaacattccatataatatatcttcacctctggtggctaaattggtgtttggaccgatccaattcaggagcgccacacttctccttcagaaggaatttgcaaggaggttattagccaagcctggagattcagagttcaatcgcttggctgtaaatgtgactcttgttgctgatgttgaacatgttatggatgtaagcaagagggagtttgttccttgcccgaaagttgattcttctgttgtcattatccgtccgaaagctcaagttccggatgttaacatggaagaatggttggctttcacaagaacttgttttggtaaaaagaacaagacacttggagctacctttaagcaaaagaagaaggtggcagagctgttaaacttttctgatatggctgcctcaaatgcagagtataatgatggtggtgatgatgatgaaagtgctgacagtgatggtgaagaagattgctcttcttcttcgggctcctccgaaatgggggtgagccctttcaaggagaagatcatgaaggttttaaaatcaggttgctttgatggtaagaggccttctaagatgtcaaacgaggaactactgcgtttgctagcaatgtttaatgatgcaggtgtttatttccatgataaatcaaataccaagtgtgaagacattaattgtgaataagcataatcatcatttgatgcatcataatttcacaaatacattttcatgatttgattacattcatcatttttttcccacatatgtaagttgggtcacaacaatcagtggctgagaaagagaatttgaaggatagaaatgacagtattatcatactgtttttatattgtctttatagatctaaacaattttacttcttatttaatttgtatttgggggattatctatgttaatatgtttttcaggaagtaaaaaaacgtattgtattttatatagttcgtcaactgatttaattcaattaatatttagttgtaattgaaaatttagtttttagcaaatacattagtttgcattggtttaatttttaactcactcctaaaggtcggtatttgaacttttgtacttactgcaaattggtggattattatcaaaccagaatctttttcaacaattccataagtaatcacatttttaaattgtgttttggggacaaagagggtaatgaagaagaaaaacaatattgatggtaaaattcttagtagaaaacgagaagtgtgttgttaaatttaatcaataagtcagaatatttatatatatattttttatggaaataagtcatagaatattacattttaatatttttgaaaaaaaataatgttgtgcaaaaatttgtgataaatttgagatatgttaaaaatttaactaaatttagtacaagataaaacatagtattaataccaaattttatattgtattattgttaacagatatttaaatttttatgcatttttttttatatgtattacattttctttagggaaaaaaacaaaaaaatacaaaaaagga

SEQ ID NO: 110425 - DNA, 1610 bp, Cannabis sativa
ttaataataattttttttttttgttttttgggtttcaacgtcaaatttattattattattattataattaatataataataattattgttattattataataaccctttttggtgggcctttattcttcctacttttttgcatttgcatgtctttttattatttattaatttatgtttttattaaataattcttatttggttcgttttagtcatcatatgttttaatttttttttttttaaatgagtttaattttattttaagcaatatatctatggtactatcaattatttgttcttttatagggttaaataactaactatgtctataattttcttataattaattaatttgtatcattaaatgtatttttgtttccaatttttatatatgtcaaaaattactaaaaagtaagtcttttttttttttggttttaaaaaaaaaaggttatttgtttataatatatattgtgattgtgtggtgtgtgtgtgaacaaagaaacacataatttttatccatacatataatttgaaataataataagtggttaggtttgtgggtctttgtgttcacattattgaaatagaaacaagcaaacaaacaaaactttctttaactattcaccctttcactctttttctttaatggttggttatataaatatatataataattatagtagggtttatatttctttaatcgtgggtagtaaattttactaaaatcgatgttaagtttcaaaaaatcacttctaaaactcatttttttagtagtgattatttatatattttcgatatttaaaaaaattataacctttaccacctaggttcttgactttagttgtttggccgagatagaaccaacacttagtaagactcttcaagactttactctaacaagtaaacaagtaaactaccttgtttagtttagagctatatatgaagctttattatttagttatagtaggcattatactcattttgaaaaaaaaaattaattaatatatactattaaaataaaatttagaataatgaattgcacgagtataaaaaaaataataaattgaattctatttttgacactaaaatactctttaacttttgtaaaaatatacagaatttatactatataaaaaaatctaaatcacaaaattttctaaatacgaaacatattgaattccttcaaatagaaacaaaaataatatcctaactataaaatatttgtgctgcaactttcttcttctatttactaataaaataaatatatatatatctacaagaaaattaaataaacattatgactgttttcaaaaataaataaataaataaatatatgactagctaataatcaaatatattaagaattcacgtacacgttattatctacagttattgtcagatagagcaatttttgttaagaataatcagatcgatctaacgttcaatcttactataaaacgactctgttttatcgtgaagtaatatataacatcaattagtttcttactgtaattgagtactaagagcactcccaatagatgagctaaaatagctcaatctttaaattataaagaaaaaattacaaaattgagcttccaacaagtgaggtaaa

SEQ ID NO: 110426 - DNA, 7019 bp, Cannabis sativa
tttaggatgttaattcaacatacatgttagtaaatctagatcctggtaaaatattccctacacaggaggcagtctcgtcgggagttcatctggcatcacatctttgaattcatctaacacctgctcgatttcaggtggagtggaatcctccacttttgtatcgtacacggcggagcgatgacaaacgttggcctcttcttcttcagacccctcttcagttgcaaggccactagaagcttgaattttggagactgtctcactttagcgggaaccattgaaggattgttatccatgataagtagattccctattgctggaattggaatggcccccttctctactagaaactccatccctaataccacatcaaagtcatccatgcgaacaactacaaggtcaagttgcccctcccatctgtcgatcttgacattcactttcttggccactccaatcgtgaccatggcctttgaattgactgctttcatgcggcccatatctttctccagttttaggcccaccctcttggctttgatttttgaaatgaagttgtgtgttgtgctagtgtcgatcaatacggtcttggcctgctttccatttaaagtgacctccataaacatcaatcccttcctaagagctttccttcctcccgtgccatgcttcttgagagcattcaacaatcgaacgacgctcatgtgggcgcaatcttcatcttcatcatcttccccacatccttgctccttttgagcaatggttgcctttatggcactcaacttggactagtgccacctgtccaggtcttaaaattttctacacgtgtcacctagaaggatgccacatcgctctgtgcggaatttgggataacaagttgttcttagtcgagagagataaggaaagaaagcgagagtgatttatttttgttttagggttaatgtttatctaaaataaaaatagacgatgaaatttctcattttaatcccaattcagcaataaaccttaagtttttctctagaaaaccactaaaagacaaaatttaaggattaacttaaataataaaataacaaaactacctttacttgcttcctaagcagcttccaaaactagggataaaatagtcataaccaattacctcacaataccccagtaattccaaaattaagaacacacattctaataccgttgtgatatttctagcataccaatcgagtttccacaattggcggacctaaacatattttatttcacaaataaaatgcttataactcacatatcgtaagaaaattttcataattaataaattacgcttatttctcacatttataataaaatcctaattatcacataattaatctagtaagataataatgttactcatttattcccttaatatattttataaaatatgctttaattaatcacatttaaatttctcgaatattacatcaatactttggtaaatagaattattggaatggttttaccttccccgaacgtcaagcttcggtagctgagtacaatgcctttcttttggtcgaatctacttcatggatcgaatggatgatttagtcctagggttcaagtggtcgtatcttcccttaggagtgggtcggtcatattcctattgttttgtggagtgttgtgcaagggccttggcggataattcttcctctggggcttagccattttgaattttccctagtttttaactggattagagggtccagtcccaggatggttaggctttcccactggtgggttttcagcattgaggttcccttttactaccatgttttttagctgtatgagggtttctttaatctggtgcgtagcttcttcttgttttgttgttttcctttattgatctaagaccatttatcttagccacaccacttatgtgtcttcctcataatactcctcttcgtagtttttgtcataatcattgccatagtaatcctgttggtccacatcgtggccttcttgttcatctttgttgatgggagttttgtcaatgcctttctcatgttgatgacctttttgagaaggatgcctacccacccctgacatctctctgtcctctatgatgcccgcctgaacgttcgctagagggtgctggtttgactcttcatcagcggtagcatcttcatggtcttaacgagcattttgcttgatgattatgtttctagctgcaaccattattgtagattacagcagtggatactaccttcctcaactttcaatgaatataccaaaattttaccgagatttttcagtatcaaattaataaaagattaagctaagaaaagatgattttaaagtaaagaagaattttttttttacgtggttgggacgttaatgagccttagtccacgagtcaatattattgaagctctttggctattgggtattttacataagtgttcttgccaaattttaataggatttctagccaagattttgtaaccctttgtgagaagggataaagcccgattttataggctgaaactgaattttctgctaaactcagacctatgagggttttgtacatggaaataagtccactaatgggataaaatacattgttatattgacattgggtcgagtaggttgggcccaatttgagagataatcaccgtcccttcgaaatagtacaatttgatggtgacaggtgggcatgcgatggcgacagtgtaccgtaaatgtcagggtagtggatgttggagaaaaggtgtgtagctttttgtgttgtgcgcctttcccatgtctgacgtaggggacaaatccctgattttgtgggattcagtgtcagaaaggtgccatgtaggacagtacccagacacctcttcgactgcctattctggattaccccgtgagggcatccagatatgttctattaagtctttccttcattagacgagtttccctcccgggaccaaaaagggcccaaaagggcccgaccttatagagattagaggcggcctgtagttagatccaaagtcctgcttggactccatcgtgggctgacccgctggcttaattgggccattgaatgctcctgtcttggttgattttgggaccttaaaattacatctgccacctatccggaaacacaaataacaataactaacaaattttatggaaaaaataatacagtagtataaaaagataatcaagttatcaaaattaagtaaaaaataaataacttcgtaatattgcaaagaggctaaagtctttttatttttctgttgctttgtagctgactttttgttattttatagttattttcatgttgttgtttaagtgttctatagttatttttttatttattgaaacaaaatatttttaaaattttgaaaatagtatatttaaaaatttaatacagtaaaaatgtaaatatacatacataaaacataaaaccagtagaaatataaaaataacaaaaaaaatatagccatttttgtagaatctcctaaattatagtagtttgtgtttgtagttgaacagtaaccttttatatatttagataaaaccaacaactaacaaattatagtatactactgtactaatctaattttgaacacaggctattaacttaggttactgtacacaataaattacatggctttcaactttagtttagccgagtacacactattatctgctatacttccaatgcatgtctatatacacacccccatagaagaaaagagagtattagtttagccgagtacacattatatatgtgctctacttccactgccagcctatatacacaaccccatagaagaaaagagagtattggtgagaggggcttaatgcaaaataatttgtatatctatatggacaaagttttgtgtggcttattattattatagctagtgatgggaagtgggaaccatccatactattatacttaaggaccccacacagcagcaagtagacaattatagtgacttggctgctaaataataacagttcaaaacgatgtgatttgtgtacaaaattaagggagtgttgcatttaaattctaatttcatatagagcatctatagtcccaattacaaagtaaacaataatcaacattgtattattattattatttaaggctttgtcttgaagtataaagtgtttttctgtttgggtaagcactaagcagtattttatatattaattataagtagaacctgtcgttactccgtaccacaaatttcctagacctcgtcctagtgagacatggtaggaggcaacaggccaactcagcataatggaaaaagagaaaaagctgtgtttgaaaaacgatgtacgtacagcgaattaaggtgcagtgcaggaaggcaggctggcttatcgaacacgaccaccagttctggtcgttaaagaattgtcatcttaattaaaccacaattttgtgtttgtgtcgaaaatatcaggccaggcagggtcccccacctaaaaaaaatacaagttgcagggggccatattccatagttgggttgtccgggtacgcgtggccatacagatatatgtttgcttcatctccatctttatacatctcatataatttaattggaccagttttaaattgggagtactacattaagattaatctacgtagactatagcttacagcttgttctctcactgtgttttggtgtcgttttctgttttccttttctctctcagtgtcgacaacaatggaaagtcgacttcccatgcttaattgtctcttacagcacacactcagaaatctttgtgcatattctgattcttcaacttcttccaaatgggtctacgcagtcttttggaggacctcgcctcggaattatcctcctcccaagtaagctaattaattaaataataataaacattcttaattaggccatatataaatatacgttacttgctagttccatattaattaatgaatacaagttgggtgttaaacactcattgctgtttctttatttgtattaggtgggattatggaggtggtgctcttgagcgatcaaaagggaacaaaaggaactggtaaaagggattttcccctttccctttttattttaagccattataataatttttcacaataccttttaagcggattatgaggattaagaataatgtaaaaagtttgtgtaataataatattggggtgtgtaggattctcgtttgggaagatgggttctgtgacttttatgagtgtgagcaagctggcagtggatacgttaaagggaggtttggagctgatgttttcttcaaattgtcccatgaagtatataattatggagaagggtgagatatcagactttttttttttgttttttttgccactgaaagaatatatataataatatacagagaaggaatcagaatggttaatgatttcaggttagtgggaaaagtggcagcagacaatagtcacaaatggattttcagagatccatcaaatgaaggtgatcctagcttcatctcttcatggaatctatcagtagaaccggtaagccaatttcctttttgctgaccaaaaagtcctcaatcaagtatctgttcacctttgtttatctatagactttattttgttgtgttatctttatccacagcaaccaagagcatgggagtctcaattcaagtcaggcattcaggttagaacttattaagatctctgaaaacatacataattaatacaaagttacaagctctccagttaattggtttgtctattaattccaaatttatcagactatagcactcatttcagttagagaaggcataattcaactcgggtcatttgataaggtctctctcttgctctcactcttatctacaagttgtttatcaatgttcttgctgggctaatttacatcttgttgtacagattgtggaggatcttaatctagttatcaacatacagaggaaattcacctatctccaaagcataccaggggtattttccatgcaaaggccatacctatcaatccaacaccattactcactaaaaccaaatacacaaacaatcgaaacgcatcaagattcatcacctttatcaatccatgagaagcgccaatcaactgggctaaaaagattgtttaatgagatatcagacgattttcctactaagtccatcaacttgggttggaatactccacaaaatggcatatcgggatcaagcactctctggccagttccacctctactaccttccatgtcatgcagtcttggagcccttttgtccaaactaccttctgtattcccaaactataatttcacagaagcaaataatgacactgcagtgcctgcaccagataacaaccccaccaccaccaccaacaacaacaaaaattattccaccactgaaattaatggtggtaacataaaactggaaacttcctttcttggtgaatttcaagaagaaaaggtaatggacttaggttttgctcctgtgagagaacaaggaaagaatcagcagggtgcaataaatctcaattaattaggtaagaggtacgtacttgtatttatgatgaataacaagggatatgctgcttaattgggattagggaaagtaggtgattgacagctcaatttttaatttctgttcaaatgaacaatttgttcaaggaaacgtttagacgtatgatttgtcacttgagctataccatcatgtaagaacatttcccttagaaagaaggtagatcgtgcaacataaaacaaaatgcgattatttcttataagtttatgttactcaccaaatatctttctttctttttattattatcgtaattttattttattttatttttagatgaagtgacctccactgattgggattgaggttttgcatagggtggcagtgtggggtttaactctgtgacccatccttatctttgggtgattgtattccaccatatgttatggtccccaaagacaaaaaggagaataaaaattgacaacatgaggtcctgttggcatgtcaatgttcaaagatttatatatatataaaaattaataatttgttataaaataatata

SEQ ID NO: 110427 - DNA, 1763 bp, Cannabis sativa
tcttctttcctgcatcaagaaatataataaatacactttcaagcaaaacctaaactagtaattcattacaagtttcataatgagtaatatacctcgaaagttggccaaccttagtagttatttgacgttggtattgccttattggcatgttatatgtgactttggtaaaggttggacattcaaacatttttcatgaaaatgaccattttgatttctatttaatatacatgtagatttagtgctatattaattgtttcgttggtggtttttaatattacaaagatgtactactcatattaggttaaaaacggggaaatcatgttggaaggaggggttcgttatttagaattgaagaagcttcttctgttgtcatattgccaagcaatcactttctatcttattctcaaatctgaagggcagcctgtccgtgatcatcctgtactagctcgccttgtagaaatcaggagcttattagataaggtattcaattcttctatgaagcagctatcttttaatttttattgctttttctttctataatcatgttcgtttcttctatttcttcttctctctacagacaaaacaactcgatgaaaatcttcctgcagagctggaggagattcttaacaaaagtaaaatggtgaaatcagtggtgaagcttggtaaagagaatggcatcgcatcggattctgttgcaaaagaccatgtgagctctcttgccactacagatattcaagaagcagcggaggtagttactgttttcttatctttacaaagttattttagattcttcaatttgttggaccttagagaaaaaaagtatggatgtctcttttgtgaagtttagaatagttaaccttcaattcgacagtgaagtgtacagtgccaacaaatttattcattcttttaatgtactttggatgattgtggttattagcgtttattggtttttttgcaaaatatttaaattatatattattgtgaagaagcattgcaatacattaaggttcatttcttaaacatgctctcagatctgtaattttaaattccatgttggtaatgatctttccagttgactaaagagttattcctttgtatggcagcctaataagaaagttgattcagtgatggtggacttaatcaaggacagcgagaaaaagtcggagaaacgcaaacgccaggtaaattatgcatggatttttgtttaaattatatattttcactaatctgctctttgttttctttaaccaagtatattcattttgctgatttgaactgtttatattgtggcaggatgaacaggttggtttagagagcatgaaaatgttgaaggtaagagctgacctggaggaaaaattgaagcagaaaggtatctttagttccactaccccaaagcttgagaaggctcaaaaacgtcaaaaacccttgaaccggtattggaattgctcttacaattcaaattaattatgtcttctatttgtgatgtgctaaatcagccgaatttgaaacctcaggaagcttgaaacttatgatgattttgatgatgacactggaaatgctcaagtggccgctcagggattgaccaatggtcgtgcaggttcattgagctcactcaaatttgctcaacttcttgctgctaacaagtcaaaggtacaaataagtttttgatcgactaaaatttaatgatttgaagcatgccataagttgggattagtgtgccataacatgtcacttcaatgatgtatatgtacatatatatatat

SEQ ID NO: 110428 - DNA, 1473 bp, Cannabis sativa
  modified_base (1394)..(1399): a, c, t, g, unknown or other
agctttcttgtaatcttgatgaaatacttttatttgtattttgagtattttgattgtaatcctcctattctctcttgtaatgagaatttttccaacacatgtacttcgcaatatctatctcaccattcagttcaccattgaagaatttgaagcgtattataagtatgtcacctcggtaaagaaattactttcagataaggcaaagtagtagttatttggcagttatatacgatttgataaacagtcatttagatgaggcaaaaagaataactgttagccctataaataggggtatggtcaacaagacaatggatgaacaattttgagagtgagagaataagtgtgtagaaaattaagtatttcttacattatgtactgaatatcttgtattctgtgagggattacaactcataaataatatagacttatgaactatgtatatttaacaacaaatacaatgaggttgcctcaacatgtacttcgcaatatccatctcaccattcagctcaccactgaagaattcaaagcatattataagtatgtcacctcggcaaagaaactgcctttggtttggataaggctaaataagcagttattaggcagttatacacgattttatcacattgtaattacatgaaacgtgagaattccacatttcataaacaattatttagataagacaaaaagaatattaattgtcagtcctataaataggagtagggtcaacaagacaagggatgactaattttgggagtgattaccctgagagaataacagtaaaaaaactcaatattttttacattatgtactgaataacttgtattctgtgagggattacaactcaaaaataatataaactcgtgaattatgtatatttaactacaaaaccatgtaaaagtatcatctcttatttattgttgtttccattagtttcataaaagttattattattttttttttaattttatttaaagggcctcattgtggttaaccaaattaagtgttaacagtagacattgtctttgcaacttccatccggaaggtaatatgtatatatcttaatcttccatatgattttgtttttgaattaaatagtctcatgttagcccttcatggcaagacttagtaaccctcttatatttatgataggattgagcataaaatttaaaaattgtttaaaccattcaatcgactagccgaacattgctaaaattgaaattgccaaaattaaaaggtcaaaaacactatcaacgattagcaatgtcattggacggtcaattttttttggtaccgaaatgaccgaacaaaaccgaagccgactgttactttatatatattgttaactttctactttttatattatgggtgactattcaatggttatatttttattnnnnnnatatggttacatttttctttaacctgtaatagcaggttactaataggtaaactttccttttttaaatttaatta

SEQ ID NO: 110429 - DNA, 3003 bp, Cannabis sativa
tccccgccccatccctgatggggaataagcggggatggggattaaaattcttaacggggatggggacggggggagcactccacgccaattccctgcctcgtgtgcatccctaacaaagacccttctcacctttgaatttaccctggatcctaccattcataagaaggttataattggttccctttaaacaagtcataatccaactgatgaatcgagctggaaaacaaaggagcttcactaaatcttccagaaacagcaagtcaaccgtgtcataggccttgcttaagtcaatcttcataatacatcttgccgatatgttttctcgcaaataacctttatgaagatcttggaaaatcattaagttatgagcaagaagtctattcttcacaaatgccccttggttactttggacaagataggggagcacttccgaaagcctagtacaaatcattttcaaaatgtatttgtatatcatgttacaacaggcaatgggtctataatcacttgctgacatcgggttcaacaccttagggattaatgaaatcaccgtctaattcaagattttaggcagtcttccttcttgaaagaaaccaactcttgaaatatcttcaccaatttccttccaaagatttttgaaaaaacccgacccaaagccgtccaaaccaggacttttagaagagtggatgctaaagatagttttcttcacatcactcttactaaaaggtctaatgagactcacttgttgcatcaaattgaggcaagcttcctgatttatacaatctttctcgattctgctagtagttgaacttctactgcccataaaatgttcaaaatgagataaaaagtgatgcctcaccttgccaaaatcatcttcaatagtgttaccttgggagaaggtagttattctatttttgagctttctttttctcatggaagcatggaagaaacttgagttttcgttgcaaaatttgacccaagtaatcttactctattgagtgataaaactagaatagtttttctgcagttgttggagatgctgcagctggtttgaagcagcctgttggaggcatatatcatcagaattcttggcagcttcaccctgaattctgctataaatctcctttgtttctcggtatttcaacgcaatgtcatccacctcactcctgctgaactttattaatttctgtctaacccgaaaaagtttctgcattacaccatccaacccgtctcttaaagtaggacaactccaagcatttaacacagattgtttataaataggaatattagcccaatagttacaaaatctaaagggtttgtatcccacattattatgctcatggcttcgaattatacaaaagttgtggtctgaagcattatcccacttgaaaaaagcacatgttttagaaaaaacatccagccacattttattaacaaagactctatcaagtttggagtatataaggtcatcaacctcatgcttattcgaccaagtgaaaaaagctcccgaacacctaaattcctcgacttggcccaagacaagccaattttaagcatcctggcttgaatttgtcttcccctatttctgtcttggaacgagaacatgacattgaagttaattaaaatgacccaaggcaagttaggttaaccaatactacgaagcttcatccacaaattcttcctttcttattttgaattactgccatacactacaatgactaaaaacatctcttttggcccacacactttgatcttacaatgaacaagctcagcatcctcaagaattatatcaacttgaacaaatttcgactgccatagcatcaatattctacccgagatgatgctactagaataaaactcccaattaggaaaattattctcaaccatctctttcactttgtcatgcttcaccttagtctcaaacaaggctccaatcccaactttattcatcctacaaacatcaagaatcgctctttgctttttacttttattcatacccctcacatttcaccctagcatattacaaacttccattatgagcaagcgatttagggggaaccaaaatctcttcattagtctctcgtaacaccgcatagccattgttactacaagttttctctgttacccctgtcctaaccactgtaacaactttcaatctttttttcctaggggcgatccactcatctgcagctgaaccttccatgtgcctaccagtcattatctagcttttttcctttgtcacctggtctagaccttgtttttcattctcagccttagcagcccctgctaccccattcgaactagaatggtcaagctcatttgaaggattaactgtactcttatccttagaacctgctgtgttcttcttcttcttcctaacaacctttctatctttattacaattcaccaccgtatgacccaattgctcttacgttgcacactttgttggaagccattcatactctatcgtttgttccaccaattgcttcctctcattaataaacgagatgatttttgagggattatcagaattagcaatgtccacaagaacacgagcaaacttcaccattgatctattcaacgtaaatttttcaaccattatcggcttaccaattgtactcacaagagcgctgagattattcttgccccattgtaaccccaatccattaagacgaatccaaacttgtacggattgaaccattcaagcaacatccaaatcgattgtccaaggtcggagaaccactggttttttgtcaaagtgaatcatgcctgtttctaggattaagccactagtggcttcatcactgaatttcaccaaagtgaacccaaaatgcatcctagccactttctcaattccaagcttaccccataccatgttaatgaagccttcgaacactttaaaaggggggtattaacacctaaaacttaaggggcgtattaggcctaaatgtttcaccatgcaaaatatgtacaaaacaaattattttggtaatttgaaattttttc

SEQ ID NO: 110430 - DNA, 4960 bp, Cannabis sativa
  modified_base (135)..(141): a, c, t, g, unknown or other
  modified_base (4135)..(4139): a, c, t, g, unknown or other
cagccgtcagatgagggacttatttgatctgacggctgagattgatctaggagtaattagggttaaaaagtagaaacgtaccatgatactcatttaatgtacctcgagatccatctaatgtaccacggaatacannnnnnnaaagtacatcacgggacaaaatcgtgtctctaccctatatttatataagtgaaaaagaaattaatgtcatgaatgtgttttaaagttttaaatttttgaacaattaataatattaggaaaaggataatgaggggttgggttttggttgcaaactatgtaaccgaaattggtattttgtcaataataaaacgtgaaagaccagtttaatttgaaatatatatgcacaacaagtaataatatagagagattgaatgaaaatttatagctatttgaaaggaaaaattgcatatgtttcatattttttttcttaatataaaaaaattattatagatacataaaaagaacttcagtgatttgtttttttttcttttttttttctcattttccgtgcatatgcatatggatctacaaaaactattagtaaattaaacaatttatcattatgagcattgctattaggcaccagtggtgcttagcacctgctcgacatgtcgtgttgcgattggctagcgatactctctacaagcgattatattaaactatatgggacctaatacttagttggaccaatagcgatactgtcacataagataggagggtgttaggcaccactgataccccttagcatttattatttatttatttttaagaaaaacaaaacttacaacttttgttgctgaaagggaaataaatattatagcttaatttaaattacatttaataatatttgatatgtagctggatacctttttacatccatgtttcataacactagctagtatttgtattagtgaatggaagtatattaatataaatgttatactgtataatataaattaactagagaattaaaccacgtttttcgcagtattgtctaacttttatttaaatttgatttttttttttttgaacgaaaaggaattttattcaaaacaaaacaagatacaatcaagctgagcacatcacaaaacaacaactcaaagagccaacaagaggctagctccctttttcttagggtactacaagtcatgctcaatattctagcttgagcaaccttcctaacttccaagctcaatttatgaagagtgacacaaggcaaaccaaatatacatttatttctgttcttccaaatcatatatatggcagcaacaaaaactgtattaattatacgattcttgaagtcgaggagaccccgtaaacaccaatgttggacgttgctgatgtcttccggccatttcacatgtcccaaccatctgccaatttcagaaaaagttttcttggactaaacacattcaaagaagaggtgagtatgcgtttcaataacagacttgcagaccaggcaaagatctgaggggatgctcaagaacttgcataaatgatctcgagtgaggagctgaagattgcaaacttaccacaagatgaatctatgttttggaataataagtttattccaaataacactactgtgcttcacatcatgagcgtcaaaaagcgagttataaaaatgtttagcataaaatttacccattttcagcaaggaacaagggtgtctcatttgtactagatcgaagcttcaagaattttttgaagtaccagctcatgtcttgtttgataggaaggctccacaaactttgctcctttaggtaaatagaatttatccatttcatccaacggctatcttgcttgctagcaatgacccaaagaaacttggccatcaacgctttattccactttctaccctctcgaaaaccaactcccttaaactttttaggaagacaaaccttttcccatgaagcaagatggagcttggcccggttccctggggtcccccataaaaactctctgtaactcttatcaatggcagctgtgattttacttggaagagtaaagatactcatctaatagtttctaactccgaggagaactgagtgaatcaattgggcacgacccgcaaatgatagattcctactagtccaacaatttagattcttattaatcttgtccagaatcactccacaatcttcagtcttctatttagttggtcgaaatttgacccctaggtatttgagagggaaggagccgtcctccattttgatcggtccagatctgagctttagtttcatctttgattcctccaaagtaaatgtgggacttagacttattagcagagagacccgtagcctggcaaaagctcaaaatggcatcatttaagtaaatctgaattttttaattgtactaattgtgatataattaaaaatatcatattttgatgtgtgttttctaaacaaagtaacatttttaaagttagaaacacaatatgctattttcaaaagagatttttacaccccatactgaaattttcaactttttttcttttttattgtggggcagaatttttttcaaaaatactgtgtttttttcttcaaaaatattgtgtaagtttcatactgtatactgcgttaagttttcactaattttttacggttgtttttaagttgttattctgttgtttttaactgttctattttgttattttatggttgttttaggttattttataaaaagacattatttttataaaaaattctgtatgaataaaattgtaaacttttgttcaaaattcagtatttttgtaaaaatcccttttcaaagtagtaatttataagtttaacaaactgggcttgtgcctgatgatgtaattttttctttaaaaagattatcttttttcttctgcaaaaataaaaaaattacttaattacaaaaatagttaactactatacattcatgacagtttttatatttttactaataaattaacaataaataataaataatgttatttttgtgttaactattaattttattaatttttttaaaatttaaagctgttgagactaaaaagaaaaaagaaaattaagaattttattacatataaatagttgaataatttatttattttttatataaaattttgataaaaattaatgaaagattagaactataaaataaataaaaccaaaaaaatataaaatataaataaagaaaataaaaaatataaaagaaatattgatattattgctgccttatctctttttatttaaacaaaaataaacttttttaagatacattttaattaaaaaatttatgaaaaaataaccttatattttacctaatgtattactgtaataaaatataataaatatgtataaatattaaattttgtggccttttatttttataagtatgataaatatataatttcatgcatcataattttatttactacctactactatttgtgcaattaacaatacaataactcttctaattctttatgattcatttgttaaaaaaaatacttcataattcatataataactaatttatattgaaaataataatagtcaagttaaattaattgtaatttgttagtttttattaatgaacttctttcttgataaaaaaatagctaaaattatgaaatcctatatattgttgatcctttttattattttattatttagtatacaaaataattatatcaatatataatatcaagaaataactaaaaatatgaaatattttttaaaagacattataataattcttgaactattattaaaataagaattatgattgaaaatattaaatatttttaataaacaaattcataaataaaataactaaatcaaactaatcaatattttaaaagtaaaccatattgaaatattatttagacttatatatatactataattgttttatggtgacattttcataattttgtaaattggtatttaaaataattatttatagcaatactggaagtataaaatatatttagaaaaatattcaaattttttttaaaggttgttgaaataagaattatgattaaatttttgaacatatactaaacaaaataattaaatcaaactaatctatccttaaaaaaaattaaacttatctttgttaaaaataatatatatatatatannnnnatatatttatatgtataaatataaatgtcattcagatgtatataagtatgtatgcataataatttttttttaataatttaacccatattgatttaaaataaacatatcaattacatgaaccacaaaaaatggtagttgagttacttaccattatcaaataaattattagtttatattattaatatttttttttgcaagagccttacatagttgattttaataattagaatatatattgtttttattttagtatacgagtaaaggcatagatgagaacaaactagaaatggaaggcaaaatagagatggaaaattataaaaggaaaaatattcaagaagatacaaagaaggtggtggtggtgaacattaaaagaacaaagcattaatgagaataatttttgtaatagtttatttttctctcttatttgttccattttttcttctataaattcctcatgtttcctcaaatgtttagtatttgagtatatggttggtagttattatctttgcactctctcgcgcacatatataatatacaagttctttttaaattgtagttttaattaaaatagaggggtaatattatagaaaaaatgcaccaaatattattaggaacaaaatagtctaatttcaaaattttctctataatgcataatcgaatcacactatttttcataaaaaaaattacataataaattttactactaaatgaattatgaatctaactattagtggatatcatattgttattataatattatttattattagatattatatattattactactaaatgaatttttcctttttttttaaaaaaa

SEQ ID NO: 110431 - DNA, 4385 bp, Cannabis sativa
  modified_base (577)..(589): a, c, t, g, unknown or other
  modified_base (710)..(711): a, c, t, g, unknown or other
  modified_base (3592)..(3595): a, c, t, g, unknown or other
taatgaggtgagctgtattcctcagtttatatgcttggaaaagtagtggtctttagtctttacttatataaaaatatatcttttataagagatatttttctcaagtttggtatcatggaaacatgcacttactactacttctacataatattagatttaatgataattaagagtttatctctacattctcattctctaataatgataagaatttttgttaggttagcttactaaaacaaaaaaaaatgatcttaattagatgattagattcaaaagcattaatagagagcacttgtttataaataataaagttaaaagtggtcaaatctgttaggaataggatgagattgtaatagtagcatttgttgtactatgtgatgtaccttcatttacaactacaattgagaattgaggacatgataccgggaccacataaaagtatatagatataatcaatatcattaaattaacatatatataattttgacttaaatagtaaaaaaattcaaaatctcatcctgtaaatactcattattacactacaaaaaactcctacttttagtgataattttttagnnnnnnnnnnnnntttttgtgactaaatatgacttttggtcacaacaaaaccttacttgtgactagaacatagcatttagctacaagttgtgactaatttagttttagtcacaattgtgactaaaaacacattnngtcacaacaaattgtaatttttgtcaccaatacttttagctgcgaactttttagtcataacgtaaaagtaataatttataattagttacaatttttttacttttaaccacaatttttgttgtgactaaaagtaaacttttttgtagtgttaattctatggtacttaaactttcattagtgatgcggttgagatttacgaagatgaggaaattgatttacttagctcaattgagactgagatagatgatttcattacataggaaaatctaatactataggatctcacaaaatggtgacaagtgaaaaaggagatttagcaaaataatcctaacaaaaatgattgttttttgtgtgtgtaggtagaagagatttgctgtgatgctggtgctgcagcttactgtgtacccttgtacacatcatttaaggttcgtaacaccgccccctaaatgaaggggtagttgcttcacaccgagtttgtcaattaagaattagactatgacttaagctattagtgagacaatctgctacttaatctgatgagggaatatagtgcacttcgagctctcatactttatcttgcacaaattgaatgtcaatttcaatgtgctttgtctttgcatggtaaacagaatttgatgccagtttacttgcactttgattgtcaaaccaagtaagaggaacacttggtagcttgaattttagttatttgagtagtgattcaatctagattatctcaactaacacatgagcaagaattctatattccgattttgtccttgatctggacaccacgacttgtttctaagagtaccaagcaactaatgtatcaccaagataaacaaaatagcctgccattgatctcctatcatcagggcaacaagctcagtccgtatcaaagtatccaaccaaagataatctttcactatatccaatatggaggccataattcattgtccctttttaagtatcttagaattctcttagcatcactccaatgactagtagtaggaacgtgcagaaattgactcaatttgtttacggcaaagacaatgtcaaatattgtgtgacacaagtactgcagggttcctattacactattgtagactatatgatttgacaatagttcaccatctattttggacattggcttgcccaaaatcattggaattagatacatggttttaagttcaatgtatcctatttctcaagcagatcattgatggatttggcctatgtcaagtacaaaccagtttcatctcgatacactttcatgccaataaagaaatgaagtaatccaaggtctttcagtgaaaattattattccatgtccaaaatttgaatgaaactagccatctattcataattgttccctgttacaataataacatctctatagatcaaaactaggatgataatttgatctgtcatgtatttgaataatgaagaatcaaccttagaattatagagctttcaatcaattagagtgtcctcaatttatcaaattaagtacggggtgcctattttaagccatataatgatttgttcagtttgtaaatgtagtctgattgctcttgtcctcaaacccaagtgattggaccatgtacacatctttcttgtaactcttcatttaagaaagcattgttattaatgtctagttgcttgatttcttaattccttgatacaacaagagtcaagataattcgaatggttgataacttgatgaatgaaagtctagctaaaatcaatttcaagcctttaatgaaagcctttagccacaaatttaactttgtattttcgtattgagctatctgtatttttttcatttattctttattttactaaaaaaaatgtatttagagaacatggttgaagacgcttttacaaaactataagatgctaaagccaaaaagctttttgaactaaaaagtaaaattcattacaaatccaaacatcaattatagtaaatatttttgaaaatggatgattagctaaggtattttggattagggtttcaatttgaaccaatcattgagttgtgtggcttgagggtgtgctagctacaaaatagctgtctatatatataaatttatatatacattttatgtgtactatatactatatagcttctctattctttgatttgccatttgatttgatattttctttttttgctttaatttttagtcaaatcacaaagtcagatgcctagtctgatcaactaagcctttacattaatcaattatttgtacgagaattatatataattaataatttcttgttattaattacagtactacggttcaggagacagacccctctacctatatatatatagacaactatatatataatttgatttgtagcttcatatattcatagtttcatacgaaaaaattgttgtttttattggttaattaattatatatattcttctttttcatacagatgatagattacataatatgtataatattgcatgcatgcaaaattatataattaatatatagctagttagtttattatttgtaattttattatttgttaaaaaataaaattatgtatatatatacttggattagctatagtactataaatataaatgtaattactaatatactagtactttagtatatttttccgtatagtataattaagtattaaattgatatattatgaaaataattttctaaaaaatatcactaactgcggtgggcatctatgctgggctacagattggtgagagtgtggagacggattcttctgttgttaattcttagattacttttccgaattctaattttacgtataaattaattgttgaggagattatttctcttttagctgctgttggtggtgattcttgttgtgccatttcgcgtgnnnngaatggtgtggcccacgcactagcaaagtctgttattagttctgtaggggttgatttgtggacagatacttatcctagatttattagtgctcctgtaacagctgatttgatctaatatgatacattctttcttacaaaaaaaaaaaaacagaatcaattaatgaaagctaataatttaatgatgttataatatatatatatatatatatagagaactgtaaagctcatccatttatataagagcggcttcaattgtacgtatatatgtatagtgtctttgacgtgacacccatattaattaattatatataaataaaatttaatttacattttaaattgaaatggctcttctttttctctatcaagagttacttttttgtataattaataattaagtacttaattaatatacacattaataaaaagaagcaattaatagagaatagtaagtacgtagctgataaaaatatatagctaagctaggctgccacaaatagggaagcattatagatgttgcttatttcttatctcttactcaaaattcataaaactaattaataatatctttaaattgtaggtaaacatcaaattaataataatgatcatcataaatattattcattatttttgttgaccaccacattcatgaatatatatatatatatatatagtttgtatctataatacattatgtgtactcctgcaatccctaattattcgaaagatttgaataattttttagtctaatttttttctagttgtggacgttatacttatttaagacattctg

SEQ ID NO: 110432 - DNA, 8814 bp, Cannabis sativa
aaaaccccaatcgaatatgtgtgcttttaaaacaggtaaagtttgaagcctattgttcacacatattacacaagggcacctaactctaccgtcacaatatttacatttcgaggccatctctaaaaatgcatttagaccattccaatattgtggacatctacgattttgcaatgtggtccaagacttgtcgattgtcatctaaaattttataaaggcatataagattttatagtttaaagaaaaattaaatgataaaattttatgccattttatgatatcttatgctattttatgatagttaagatatcttatgctattttatgatatttttttttttaaaaaaaatcatgcattattacttatttagacaaattattattcaccatgtaaaatttataatattattacttttatttttaactatattaaaaatttattattcaaaaagatttatattattattttaatattaattacacaattttttataaattattacattattaacattaattatatattattatattattatattattaaatatattttttatttttaatttttaaagaaaaattatttataatttttttttatattaaatctttattcctaaaaaaattataatttaaatcttaaaaaattatttaattttatacatgaaaatatttttttttatttttatatttatttttaaagtaatgattacaataaatttttcatttattaatatttttttattcaaaagaaattaaattattattattaatatttatttgtaattatttataaattataatttttatatttaatttttaagtaattattttataataaaagaaatctcttaacttaaatctttattattaaaagaattataatttagattctaaaatcttatttaattatttacatgaaaatatttttttttaattttttatatagataaaaattatttatatatatttacatttatataattatagttaaaaaaaattaattataaataattttttcaatacttaatatatttttattctaattttttttactaaattctttaaaaataattaaataatcaattatataaaaattttataattttgtaaatttttttaagaaattaataacataacatttgttaacaaaattaaataattaaccctataaattacaattactattgcataatatatattattacaaataaaaaatcaaaataatttttttttttacatatttacacacatatattatactgtatatacattatgtatattatatataaatatacaacacatatatatacatataatatatataaataaaattacacttataatttacactatcaactatacacatatatataaattaatataccaattataaaaatttcaaaagacgaaaagtaaaattaataaaattataaaaccaacctcttaattgctcgtaaaaattttggttcctcctctagctttctaaattctcgttagtgtcgcagccggtgtatcgcacccaatacttaaaccaaagacaaaaaaaaaaaaaaaaattaaaacaaaggagaaaaaataacaaaatacttatattaaaaaaaaaattgtctgtcgtatgcaatggtggtggaataaaggttcacagtggtgcaatgccagtaatatatggtgaaatgaccggagatagaggaggagaagagaaaacagcggagggatgggaggtgatcgggtgggggaagaaaataggggaagtggaaaatattttcagacttaagagggggcttttatagtgttttattacaggcgggacccgcaggtattaattgaggttccgccaataatcaagaaacggtcaaaatcccttattaataccggtggatcccgcctctaataattcgccggtattagtctttttaaattttgggcggtcaaattaccgcccaaagtattagagatggatattccgcccttaatacttcctatctgccggttttaatataatttattaaatatttattttttcaaattttttaaaaagtattacccgcggataaccttttctgttggtaataacctaattaataccggcggtttggctctgccagtattaatttcgccgatattgaattattttcttgtagtgaattaaatattatatattacatattatttattgatttttacacttacaattaaatataatacattataaaaataataaaaaaaatatagttaagcactaaaactaatacaactcttagctatatatttagctaaatactattcataaggtaaatttttgagctatttcattagctcatctattaaatgtgtttttttttttaaaaaaattagctcttagctattttttaacctttgtagctactttacattaaatatgatatatagtgcatgattacatattaatttgtaaaaatagcgtttatgaaaatttttattagcaaaataatctcttacggtagcaaaaacaatcatgaattatactgtgcgaccataaacgactattatggtcaccaaacgactatttatttacactgtgcggctctcatgattgcatagagtaaattaagtgagattattttgctaattttaatatttaaaatgattagtttagcaaatttctcattagtaaacacaaattaatttcactattgttggtgatacattgaaattaactacaaatttttgtttggactaaatattttaacctaaattgtaactaaaaaaatgattaaatgtgaatatttaacataaattattggtttaacgattcttttgtattaatttttcgttaaagtttaacagttaattaaataaattaatactaaatcagttattaattattattttttgaaaaaaaaattaaatatctaaatttaatttatttattaaaatataacttagataattatttaaaagtatcaacaaaattaaaaaattatatttttttttatataaatcttaatttaaatttaaattagacattaattcaattaaataatcatactttatttataaaaaatttattaattatattgttttaaaatctaaaattatttacttattttattgtttaataaaattataattgtatatattttttataaataaattcaaaaaactagattaaattttatatatttaaaaatataattgaattgtattaaatttaatttttaatattattatttaaaataatacttaggtaatagcaagtttaatatctctaactagacatgcattacatgttatttatacccagtacacatattattcgcataatcaatatatctcttctgtaaaattaatagaaggtcatgtgagagagctttgattttttttagagaaagaataaatttaaccttacaaaaaaagaaagagaaattaagaaattgatgatttaattttaagagattatcattagatgcaaaatttagagaaataaatattaattatagctttcttttgagctattaattaagaatttttattcttttggattaggttaaaattaattaaagacgttggatcaaattccatgcatgcatgttttcccacgcagtaccattaattaatatgtctggtataaattttattaagaaattatttgaacgacaatatgataattaaacatttatgtataatactaactttagagaaattatatatggttttgtttaatttcgttggaaatattgaaatatatatggataatttggatgaataaaaaataaaacagtgttattatctcagtattttaagcatcacaagactgacacgctcacagtagtatatattggtatctagtgtcaaaatatataaataaatttatataaattaggtgttatgtagacagtactagacagtggtcagtggtcacggcctgcattattcatatccaatatataattactattcaaactctaagtttgggttctccatgagtaggtcttaactgaaaacaagaataaaagaaggccataaattacttacttaattattaatagacaacatgttactcattgataactaatcgaatgaagtatcaaatcaataaagtacatacaaaaaaaaaagagaaaatttatcatgatctgatcatataatatattaatattattaaattaatcagtaatatatatattagtaattatcatgtgatattgtgatcatatgtgtttgtgtggatgtggaatatatatatatatatatgtatatccttagctaattttgtgtggccaggatggaagctaggcgccgcgcgtttggttatattgtgatgataatgcaagtaaagtattatagagatatatatatattgcggctaagctaactagggcttcttataatattatactatatgtgtggggatcgatcgagtatttgaaattataatagtgttacattacagatagggtttttgtgcaatggggtctctcttactagctttccacacatctctttggtttatctctttttcttttgtctttttttaaaaaactctttctttgttattttgttcattggcttctctcatctcatatatgaactcacgtgaatcccttacacacgcctctttctctctctctctggccctctgatctcgatcctttaaaagagttttaccactacactgcttaggcccttttgccatcatcatcatctctctctctctctcatgaccatattatttttccatctcaaatttctagctatagtttgatccaccaatattgttggaaagtactacacaaatacatatatgttcttccaattccattttttataattttctttttgatccctctctatagttatagctctttgaattttgccctaatggatcttccttcttcttaccataatagcaatattaataataatttatcaccttattttgttgaccttaaagaagatcaaacttcttcatccttatctctctcatcatcatgtcctcatcctttcatgatgaataatccagctcaagatcaagggaattttctctataccagggagacaaaacaatttcaactccaaccggtatatatatatctatatcaactttacttatatgcatgaaatcggatttaattaataatatttattaatcatatatgatctttttacaggctgatcacgttggatcatcatcacgtgaccatcatcatccaagagctgaagaaaatcatgaattattatttgataataataatcatgatttgaaattaagcattgctactactactaccactactactgaagatcatcatcatcatcatatcaattacgatatgaaatatcacaacagccatgatgagaataatatcaattcggttaagtggatgtcttcaaagatgaggatgatgagaaagatgatcactaataataataacaattcggatcaaacagccagtaatgatgacatatcaactacaaatttcatcacttctactactactgatcatgatcaaaacttcgaaccacagccaccaccacaacctcatcatcctcatcatgtgatgaagatcaatatcaagcatcctggatcgcctactgatcacagcaccagttctaattcctcaaacaacaacgccacaatcattagggtttgttctgactgtaacaccaccaaaacccctctttggagaagtggtccaagaggccctaaggtatatatttaaacaaatatatatacatacaattattattagtttattattatgttacatattaatctatattctaagatgttaatttgtatattatatgttggggttgcagtctctttgcaatgcttgtggaattcgacaaaggaaggcgagaagggcaatggctgccgcggctgctgcggccgcgggatccaccaacggaacagttgttccggtggacaaaccatctatgaagaatactaataaagaaaagaaatcaaaaagtactactactactgctactaataataataataataattgtgttccattcaagaaaagatgccaatctagaggaaggaggaagaacaaggtttgttttgaggatctgatagtaagtgtgagcaagaacacttcggcatttcaacgagttttccctcaagatgaaagagacgctgctatcctcttaatggctctatcttatggtcttgttcatggatgaagatcagatcatctattattattattattataattattcaaattttatattgctgtgtcttattatcatcatttcatcatctacctacctctctccgaattttattagaactttcgttatggtgttaattacttttttttttttttttgaaataagttttgagttataatgtttttatagcttaatatttagtatgtccatgtgcggtattagactgagtaatttattatattctaataataatttagtgagtgttaggagcttagggtgtgaatttagagataaccaaatcgtgggtctcttaattaattgtgttgttatttcattgttatgtatccctcaaatatacctatttattaataaaataacaaaagtttttgtttaattaatatttatatgaatttcacttgatcgttctagctactgacaaaattttgaccattattagtttaaacatgttagtatatatttatatatatatatatatatatgtatttagcagttctatatataatgtttttcctttttctttttgaaaagtgttctattatgtatattgacaatatactagctagataggtgtcacgaggctattatatgtatgtatatatatatatatatatttacttattgatcaaacagtactgaaagaaaaaaaaaaacaaaaaaattaatccgaattattagttaaatatatggtggctaagtgggtacgtagaatgtagggcttcaatattgtaaacatattatatatatttatatatatatatatcccagatcccagtaccaactgtagaaaagcaggtagcagtgcctaaacttgagacacgtaatgatgattgtgatgattcatattaaagtttctgcttctggtgtaacgagagatcatcgccttgaggattgtactttttgtctcagacattgtcttcatatatatgcatattccatatagtgagaattataatttacaagcttgaattgaaagcaaaattcaaataaacaattattaactgcagttattactttgaccattacttacattatttgttttgtcaataattgtacacaatattaagaatgatagattaattaattaagcctaggctttataataataagacgattactgtagctatagctaacctttggcggcttgtatatcaattatatacatatatgtagaattatagatgagtcagtgaatatgtaaaaaagttgatgacacatacgaactgcttttagactcatctaggtagctaaatataatttactataagcatgcaattggcacagtactgttttatttgcatacttttatgtttacatcctaactagctacctttgccagctggtttgcattgatcatgttgagactatccaaccagtatatatagtagttcttttcttgtttgtaattttaagctacctatagtctccgtgaaaatttaacttaaagaaattaattaagtattaagtcttatataacttaaaagaaaataaattttaaaaaatatcactaattaatcataagacggcacctattaaaggtaataagtagtactgatacttaataataataatacataataataatgctcatgaagtctaggcgcatggattttagttactcttattgagatattctcaatccaagttactcgtgccggccctttgtataaagtgaccacaatattggtaacatatatttgggtgcttaatgattgaggcctacgtagaaccttggtgatctcccccattttacaaccccggcctactcaccactacaccaacctagtgaatttttttatttttggtaaagggggccaacctagtgacttttgggtggtcctttgaaggtagtaaaaatcaacgttttctcatataatttaggatatatatgcttttatatgatgttttaggatattcgattcctacaatatctccctaaaaaatgctcgaccttttctaattctaaaagcaatcccacaccagctacttcataataatttactttttttttaaaaaaaaaaaaatgagtgaaaattttattgctcaatctcaactctttacaataccatgcaactatcaaagagttcctcatctagaacttaaagcctcaaaccactctttatcctctatatttgttttttctctattaaaatgagaaaacctaatacaaatatcagttttaatcttttttactatattatttacaatatacatatacctttttatcccacaaactagcattccttgcttcccaaattgaataaaccatagcattcaccattgtgcctacaagaaattcacaactgaatttagagagctttaattcatcgcttaatattcttcaaacaagtctctaaagtagtgtgttgcatgggtaaatcaagccattaaaaaatggatctaaaaatctcactgcagtagcaaaaaatcaaagaaaatatgctgatgtgattcagctacttaatcacaaagaagacagttactttctacattaataccaaaaagaacctgtcacgacccgagccctaggctgtagcaaatgtataatattcataatttgggtggtcaaatgtcacactttgacccttgtaggaaaataaaacttataaatgatccttttatttatattacaaaa

SEQ ID NO: 110433 - DNA, 1894 bp, Cannabis sativa
ccccccttctctctctctaatgtcaaaccacaagtgtggttgtaacaattgccaacataattctgttacaacacctacatctttgtggaaggatgtgaagagtttgaagctgttcaaggttttctgaagactcaggttcagtgattgatcatactctgtaacagaaagaaataaagattagatcactaaatgggatgagtcatatttcgttgtgcaacaactctataagtattctatactcaacatgtgaaatagatattatagggtattgaattttttacttaaatgttaatttacatgaaaaatacactgattcgttaagcatgtattcccaacaactgtctttagagtcttggttacatattttatttttcaagtattagcatctctgtttgagtattacatggttttagatgatatttttgttttgtttgcatgattataaaataaagttttagaaataaagtttggttgaaagttaaaaagaaaagaaataaaaaaacaatggtaaaaacgaggctcaaactcttaaaaaatagtatttttttttatacttaaagaaatcccagcctgtcgacccaaattggttgattccttcctcaactgatagctacaacatgtggctctctcccatttgtgcgctggccaccaacaggtaggggtgaaaatcggtcagttatgatcggtttttacaattttataaccgaccggtcggttacggtttttattttatgaaaaccgtaaccgagcgtttagaaattataatcatataaatccgatcgtacgatttttgacagttttgggcggtttattgcggtttattgcggtttttggcagttttggccattatttggtttaactattttttaattttaaaaaccgaaatcgaccgccatgttacgaaaaacgaaaccgaaaccgaccgctaaattcggtgatgacgtggaaccgaaaattcgattacggtctggtcggtttgatggtcggtttcggtttttcggtttttataaacaatattattgatgatatttttttaaattagaatttactcgtatatattctccagggacacaccttcgttaatacttgaatttcattacacgtgaaattaatttatatattttgatttgtgtatatcactattgtcactcttgaacatatatgccgtcccaccaatccaattaggacatattcatgctaaatatacttttgttatagcatcgaccatacatatatgcatatcatcttaattgaagttatctctaattaacattatattaatatatctacaatgtaatttacgaactaattaaaaacatgatcaaatgaagaggattcttgcaataatagtgacacatgtatgattcgttgtaataataaatattattaattatatttgatcatgaaatccaatccataccaaccatcactagctatatactaaatttatattaattagttagtttgtttcacaccatgaattgatggtcaggaatcttcaatattgaattttgaaattattttatttgagtatattattatgggaaaaatgtggatcaaccatgcattaaagaaagaatattaattaacaattagcaccaacaactagtgaggcgtgtacaatattaagcaaagaaacgagtatagccaactccaacgtggatccgagtcacttatccacgtgtcgataatggtcaacattgaaaacacgccaattaacaaagagagacaatgcatgattttattaaaacacacctagagttagtttggtatataaggtattactatatggtattctacttattatattaaattgtattttatgtaatatttttatgtaaaatgttgtaattaaggctcactgtgaattgtttggactgccacatcatcaact

SEQ ID NO: 110434 - DNA, 5587 bp, Cannabis sativa
taattatacatagccacaataggattttaatctaacataaatatctatatatgtacaactattattttatcgcaatttcaatatttgtaacaataagatttttatgaccacatatgagatttcagccacaataggtcctgtctcaaaataattcttttttagggttttattcttgcaaatgagagtttttttatagtgtctttgctctcaaatgtcttttccaattgtgctaacctattttgaacttttgaagagttttcattggtctagccttagcaacgagaaaatgacgccagcatcacaagaaatgaccgcttcaaacatccatgtggctttctcaaggtaaattgatcctaattttttatgactctaaatctttctctcctataatattgattattttggtgttgatctgctggtaactgcttttgagtcagagaagaagccaatgtttctttcaaaatgctaaaagggatgctctttgaagatgtaggttatgtaatgatgtaaaatattttaaaaagtttaaacgatgtgttatatctatatttcgagcagcaatatggcattgacacatgtaatacaactggaatatgaaccagccagaattatgcaataatcaatgctttcacataactcgcctcaggaaataaagttggtaaaaatattcgaactcaccctcttaaagataatggcaaggcaaattgatgagaccagtgagatgaacaaagaaagtccatctcagaattcacaaaatacataacaaatttttttgaaaagggtgtataatgaattatctaaagaacttgcagctcattgacccacatacacgtgagtatgttaaaagactaaatacaataccttcaacagattcacctcgcaattgtcatgttgtgacaaatatcttgtgtctgtctaactcaacattaataaaggaacacgatgaatactacagcacatacttagataatggtttaatataaagcgtctaaaagacttgttataccacaaggaggatgaaacatagtcagaataactgcatgtagataaaattaaaggtgtagttatgggaagttatttgtaattatctcatgtgtgcaaatatgaaatgcggagattgtcaacatttgatgaacggttacaagtgataaaatcccaagggaataactgtcatcctagactcctataagtagggacaaaacccaagaaacaaggttcggccaattggagaaagaaataattatgcttaccatacattttgtaaacaattaattgtattctgtatacaattcatcaattcctaaataagatgtactcgtggactatgaatacttatcttcaaaaccatataaaaatcctcttgtcatttattattactatattatcaattattgcttgagttcatttattaaaaaaaaaaaaaagcttatttaatagttagcaaaaatttgtaataacagtttggtatttttattaagagccttctaataaaaatttagaagaacaccctccttcaaaacaaattcaaatcgtccattcatgacaaatgataccccttcaaatgaagagaataagccaggagaaacaactcatcatcttgggaaagagtaccagacttctcacaggacaaataccactgaaactccccattctcaaagaaatgggggaaaatttgaacaaactgaggatgaaatcccagagagatgaatcggggatgcctacaatcccacaagatatgttccattagtggaactagaaaataggcaactttgacagtgactggctaaatcgaattgaagaaatgcagaattagagcgcaaggcagcggctgcaatggctgtgcaagatgatgcccctctaaaccaacctgacacgtctactagacgacattgggcaagacctagaggctctaagaccaggagacatggggatacccgtaggggaataaccctagaattccttcaaacactcagggggatcaacttgagaacacgagggacatccagtggatgaagagatcccccgaaatcaaagaagcacgtaaaattatgaaactcgacccaatgatccaggaacttcccatggatatgaaaattgtgggaatgtacaacctgagaatccagaatcatcttgcatgaatgcgaatacatggaaaacacaacctgagaatcaaggatgatcttaacacgatgtgagaggggtaggtaatcgaccttgatcaggtcgaccactgagatacctgcaatggccaaaccacaacaacagagatagcacatacacctatttaagtaggggatgcgtataaaaaaaattgtatgaagagagaggcaagtgtgagaagaaccttaagaaatgtgctcgattatagatcctagtgggtcaatatcaaggacccatgggcagagcagatcaactagaacccatgcacgtgagaggtaagcacgagatgggaagggttcacactgctattatttagaagatcaagagagcatcagtaactctcaaagttatcaatctgagtgttattcggtaacaaggtcagtaagcaattatgactagagaaacgagaggcagtgtaaccctgatctatctgagcatctgaaccgtagacaacatgacctacgtgaacacttgaatcaaaatgttctagatctttgtgatcaattaaaccagaatgcaggttgccaataacaagtcgagcaataacccatggatttgaatcagttaatggtaatacaattagaggacaagttcaagctataccatgacaggaagtatggaaagttattatgatatgatttagacaaagaaacatagtttttctatcatgatatattgaattcccaaatccctcatggattcaagaacctgcacgtcgcacagtatgacaagacaactaatctagtggcacacttaaacaattttaacacgataatgcaagcaagaaatgtttcaaagaacttgcattgcattttgtttccaacttctctaataggagcagtgagcagtttgtttgataaattcaccaactattccatgacctcctgggaataactatccaaggatttcaagaaacaattttaagctatgagggataggaggccagaggcatcctcactaactaatatcaaacaacagctaggggaatccttaaaaacttacttgagtcgctttagtacagtagaaaaaaaaagtaagaaatctaaataataacatttagttgacatctcttcaggttagaataacaactgacttatcaactgcaggaggagaactatgggatgatttgcaaggtcgccccgttagaagcatcaatgaatttaatgaaagaacacaaatcttcacgcgtaaggaagaggcacaaagtgagatgaaattgcttaaatcttgatcggaagacaatgccagcacaagttactgcaaaagtgagtactgtaacaactaaaataagaaattcaaaccacaatgggtcgaatagaaaaaggaaagacaagtcgagagattcgtcgaaggacaagaaaaagaataataagcacgagaaatatatttcgatatacttggtgtatacagaattaaacaaaactcgtgaaaacatctatctcgtaaatgaaaactgatcatgttttgaagactgaaaccaatgagatatgcttggaataagagagatcccaacaagtattatcgtttccatcgagatatcagacataccactaaggaatgacgtaattaaaagatgaaattgaagggctcgtttctcgtggatatctgagatagtatgtaagaaatcgagaaaatcaatagaatatacccaataaccaaaacaacaaccaaggaatacaacctcctctagttgagggtgaggacattttggttatttctagagggccacacctcaaaggaaaaaagagataatgctcaaaaaaagatataaataaagtgaagaatcaagaattttcctttgctccaaggcccttaaagtgagccaagcttgaagaagtgcccattatctttactaatcaagatgattcacatgttcagtttccatatacggatcccctagtgatcacagtttggctcccaaataagagagtaaaaagagtcctcgttaataacgagagttctgttaatattctctacaaagaaacattaaagaagatgggtctacaagagcaagattgaaaccatgcatggttaacctgtgtagattaacgggcgatagtgttgcaaatttaggcataattgagctcccactcactatgggagggtcaccactatcgataagccagatgcaagagttggtcgttgttgacatcccttcggtatataacatactcatgggtcgccctggattaataggaatgggggaaataagctcaatcaaacatttttccttaaagttaccaactcgttctacagtagggatggtgaaaggtctctagctataggctagacaatgctataacgtcgagttgaagaaccgaagcataaaccatgattcgatggtaattttgatggaagaaagtgacgaaaacgagatggaggacttggatcctaggatccatgatgagaataaccaactcaagcaaattgaagacttagaatagatgaatttagaaccaaacgatccaaccaagtgtgtcaacattagaaaaggtttgggggaaggactaaaatagcaattaatcacatttttataggcaaaccaagattagttcacttagagctattcagatatggtcagggtttacccgaatgtaatatgccatcacctcaacattaattcttcttatccctcaaagcgtcagaatcgagagccattagatctcgagagacaaaattctttaaagggagaggtggacaatctttattactaacccatgaaagtaggcttgaaagacattactctgttggagactctaattccaatatctcaacaaatcttagtatccataatacaagatccaacataggaaatggctatcgcacatatgcaaatcaaggtcgtggctatccttccaaaaatcgtgctcagggtcgtccttatggtagaggcaatccatcaattccataattactctatcaagtttgtaacaaatctagacacacgactgttgtctatcattacaggttcgataaagcctttgtcacacccaagattaatgactctaaggcatttcttgctgaaattgatgaccaagatgatcaataggtttactccagttcaacactaccagagtttgtggaagattatgactggtatactgacacggtgcaaccaatcatatagcacaacgcatggaacatcttgaatctgaaattccatattcaggttctgatactcttgctgttggaaatggaaaaaagactcgctatcagtcatattggtaactattcactctcttcttctaattcatctttacatttaaacaatgtccttaaagtttccactataaccaaaaatcttattagtgtctctaagttaacagtagataataatgttttcttggaatttcactccaaatgttgttttgttaaggacaaaattgttggtattatatttatccaggatcttagatctatttgcaag

SEQ ID NO: 110435 - DNA, 1926 bp, Cannabis sativa
  modified_base (1898)..(1900): a, c, t, g, unknown or other
ttgaatttacaaaaacactatgattatgattcctttgtgatcagagtgacatgttaaatgaactcagatagatagtagataagtatctaatacctaagtttgcgtttgtttgcaagtttcagtagtcaattaagttcaggattgtacttgctttctaaagcatgttaaatttgagaaactgagcagatattttatattttccacggttctacagtctgatgctgtttaattatgtgatccttctcataaggaagaattttgttgtgtcttgtatcgaattactctgatcaaaagttgtatttgcatttttctaggttctcccttctgttcctccagttaatgcaaccttggaaccacatcatcagatgctgcctgtgggagttgttttatcggtaagctcagaagaaaccatgaaatacctgagaaatattaaattcaaaccttagcataaacactgacatattgtaatatgataacttattccttttgatacctactggcatttgtatttttatgttttaactgtgactgaatcaatatgatgtcacttgcaatcttgcagataattggtacccaagttattgtggaagggattgagaaacatagtcctttaaatgatggttctattctatggataactgaaagcagatctccattagggatggtggatgaaatctttggacctgtcaaaaacccatactatgtggtgagatacaattcagaaagtgaagttcctgctggtgtgcaagctggcagtttaatttcttttgttccagagtttgttagccatgtgcttaacaacaaggacgtttacaagaagggttatgatgcgtctggtgctaacgatgaagaggtgtatgatgaagcagagttttctgatgatgagaaagaggcagaattcaagagactgcaaaaagtgtcgaaaagaggcatgaacgaccagaaacctatgaacaacaagaatgataaaaggaaggttaaaaatagagctgaaccatggaaaaatagtaaacattcatccccacaagcaccaacagatgtaggtcatgtaccacccaatcaacaccagcatcatttatcatcccatttagcaccagttgataatgcaaatagttcaaccccttttattgtagaacaaggtttgagtagtgggacaggtttaattccacaacttcgacctactgcacagactgcttgttttcatccaccttcaaatggagtttggggaaatggaatgccatttcaacagccacaaggtgcttttttccccggtggctttccagcttatggtatgccatggcttccacagaactctcagccatatccatttcaaatggcaatgccgaacatgtttgcccagcaggtcgatcctaaccagaggttactttctggtaatttgctacccggtcaacaatcaaatacattagcgggacctgcatactctcagggactcatgggtcaaaatggatacaaccaaatgacatttggaatgggtttacaaggtcaacattctcagcatatgttaaatgttggccaacaaggaattaatccaaacggggtacaaaatggacagaattgtaatgcgccacaatctggagggattccaggaaacaacaatgaagcctctcagcagttcaatgcaggtgctccttctggtcggggaagaaaaccattccatggaagaggtggtcgattttcacgtggaagaggtgggaaccaatctagatagagttaacagctgctctgctgcacgattttgatcttagcttgtaggcttaggagtacaaacgctgcattttgattttgttttttttattcgtatgtcaatgatagtttttgtggcctatattgcaatggggattctgaatttatatgcatatatatctttatatattaannntgcctatctaacggcaattcttggtt

SEQ ID NO: 110436 - DNA, 6316 bp, Cannabis sativa
  modified_base (4407)..(4422): a, c, t, g, unknown or other
  modified_base (6254)..(6283): a, c, t, g, unknown or other
catgtgtctcaatattataaccaaccactattcaagatttgaagggtgcatggttgtgaccaatattagagtgtccattgtagaactaccctatattttattgagaaatttacactaaatattaatttttattttaaattttacatttatacattgataatagaaattttttatatttatactttttttatttaatttttttttttattttaaactgtattttactattttacttattaaagcttaaacaaacttttttttttcttttagcttttgctgatttttttagggacttatctgtatcaaaataaattttttagggacttatgccataataatatcaacacgtgacattttagggaagaattaacgaatgtgttaaaaagaggaccaaccgacttataagaatctcaatcttggagactattactgctgttttttaaaattgggaacttatttgcatcaaaataaattttttaagggcttttactgtaattttcccgtctatttaatcaaattattttctaatttataatgttatatattgtaaaagaacccataaaatttgtatttttctcgtacaaaaattgaaggagctcttcaaaagtaggtactgggcccttaatacaatagaggaaaatttacacaaaatattatttttggtcaattttatacacttttatagtcaaatatttatttatataatttacattttcaaaatgttctataaaaaataacacaaaaataataaaaaactcacatgaaagtaacaagaaaataactttcaaataatatcaaaacatcatacaaataacaaaaaatcaacaagagtataatatttaaaaatataaaaatattaaatcactgtactttcggtaaataaaatcataaaaaccgtaaaaatacatgaaatttagtacaaccttatttttataatttttttattcttgtatttctaaaataatccgtacaatataagagaggaaatcattgtaatgggctgggctgggctgggctttcttagttttatcaaatttcaaaattgctataattttcatttgcttcgttttttagacactaatcaaactgtaaaagagtgtttctttgaactcggtagtgagtagagtaccgagtcaactcaattcgagttctgagtcgaagaagatgaaagatgaactactgccgagtcaagtacgaccgagtttggccgagtcaactcggaatcgcagttaaatcaacagttcttttgctcatcaccttccttacattcaaactatctcaaattctcaatcgaaattctactatgtcttcttcttcgtctccaaacgacgccgtacagcgtattctctctagcaagctctatttcgatgttccaatctccaaggtattccaatttgagtctctgttcaataaattgagctgttttatgctgaatttgtttttgaaattgaatcaggtaccgttgatttactcttcgaagtatgacatctcatttcttggcattgaaaagctgtaagattagggttttgtgtgaaaatttccagcattgtttgctcaaaagaaaagaaaaaggacaaatatatgattttgtgattgaatttcaggcacccatttgattctgctaagtggggtagaatatgtgggtttttaatcaaggatggtgttcttgacaaaaatggtattgttgagccattggaagcttcaaagaatgatctccttgtggtattttagattgttaagcattttatttttgagaaattgtgtaaatgtttgaggtgaaggaagtgggtgtttgttgatttgaacaggttcattcagagtcatacttgaatagcttaaagtatagtgcaaatgttgccatgataattgaggtaataatgcattttgattttctgtattgaatactcatatttgtttttgtaagtgttatgattactcacatattatgttacactatcaaatagtgtgatgcttattagtaatttgtaaatagtgtgaaaatctatatatttatatatatatatatatatatatgtaattgtgtagctattattggatatggaatgagaaaatagatttttggttcaattgggagaagtgtattttggaaatttttcctatcttgaagaggacttgttacctatcatattagctaaatgactatgcaacctactctgcattttagttatttactcggcttggtgtctcaaaaaacagttttgttagttattattctgttacttagtcttatcaatacaaatgtttttctgagtttttagtctagagaacaaaagtaggaaggagggttgtataaggagttcacatgtgtctgaggtttcatgtgaggagcttgactccattgtttttgttctcagatttttcattctttcaataaagagattaagtctcattgttcattccctgctcttcgatcttttgtaccatttctttgttttatactttgttgttactggtcaaattgttctggtgtttagattatgttattgacataggtgatatcattcccttcataacaattattttgatcatgtttcaaggattgtttacatattttaagtactatcacataggtacctcctgtggcattatttcccaattgtattgtgcagcagaaagttcttcatccattcagaaaccaggtaataatattgtgtcattcagccttgattttttcttcagacctgtttttgctattgaattgttttcttccattctttccgaaaggataatagagaagattgtctagtcatgttttaactgcaggttggaggtactattgtggctgcaaagcttgcaaaagagcggggatgggccatcaatgttgggggagggtttcatcattgttgtggagggagaggagggggattttgtgtttatgctgacattaccctttgcattcattttgcctttgttcgattaaacgtatctaggtagtaacagatgcctcacttaagagttatattattttttaagtatgggcttggtcttagtctccaaatttttcagggtgatgattattgatcttgatgcacatcaaggaaatggccatgaaacagattttgccaatgacagtatgtttacttttactctcatccttcccttaatagctttatatgattctctttggatccgaaataacttcattttttctaacaggtcgagtctatattctggatatgttcaaccctggaatatatccattggtaagtcacctgctttttattctccttctatggattctttcagaaatgatttaaatgtaatgagagctggggttagggagtgattttgggtaccgaaaaaacgccttctcgattgaatccttttgaagcctttataaaattacaatattctttaacattgttctcccttcctaatttctttataaggattatgaggctaggagatatattgatcagaaggtcgaagtagtggtaagtgattaatatctcatcttctcaagaaaattgtaattgtatcttccttgcaccacaataaattgatgcttttcatgaattttgaccagagtggcactagaacacacgagtacttgcaaaaattagacgaagcacttgaggtaaaaagcttttaaacttttattctcttctgattcatgcaaatattgtgctacaattcctgttttatgcttatgtatttgtatccccctccttgtgtaacttaacattgtttcttgaattctgttgattttcacactcagtactctcgttgttattctgcttcctgtaatgagtgtgaaatcattgtttttgttcttgttatttttaatacaacaaacaagcagtcacttttgaagctgaatgaaaatgattttaacatgtaaagcaacattagttgctattattctacttgaagaaacaaatgaccagtcattttattttctaaacgatgtatctttttcattcaaaacttgtaaacgggatggttcgttttgtttaattatttttggttttatatttttaggtggtaagtgaaagcaaagttcaatatgttaggcctacaaagcagcaaagtaacaagaaaggatgtgttttagagcatataagatgttatctttaagagatataatcacataatcttaaattgtctttttatctttatttgactactgaaagtcattataataatgctttgtcacatgtatgaaagtggtttctttggtactagttatcatatctggaaatgagggatttcttctatgtccaccacattaggttgctgcacacgcatttgatccagagcttataatctataatgctggaacagatatattagatggagatccactggggaggctgaaggtaatcttgtcataggatccgattcattgtttagcttcactcttcatcttgatatatatatatatannnnnnnnnnnnnnnntatatatatatatatataataggcgttatgggataaccagtaaagatgaaaaggttttcaattctgttttgtatttcttttctataacacttgtgcagattagtcctgatgggatttctagtagagacgaaaaggtttttaggtttgctcgcgagaggaacattcctattgtcatgctcacatcaggtgcgccttctctatctttctctctttgtttgcaagaaaagctatagccacctgagacaaacttagtagtattacttgttagtaacttctcttggctattcaggtggttatatgaagtctagtgctagagttatagcagattcgataacaaatctctccacgaaacgtttgatcgatacacatgtaacggggacatgactttgtgccaaagaggatgcaaaagggcacaaatttcttgagttcttgagttccacttatgttggaactcatggtaaatgattatctttaaagtagataagtgagtttttattttgattttagtgctcattgacactactttgaaagagtatgtaaaaatatgtatatttttagttttaatattgaaagaaatgttctttgaggtgtatattcaaatgtcattcatgacaattttacatgaaaacagttgagattagcatacataattaattactaatgtttgtttactaatctaatgacactaaatcctaaccattttttttttttttgcagaatagctttattttgatattattttgcaaaataataattaatttgccaaggaaatatattagttgattacttgtaaaattaaaagggtaataatgtaatgtagtgcaggccatgtgattcaatcctgagttgtcttggttgtggcagatggatgttgtttaattttgaaatgagattcaacttaaaataattaattaattaatactagaatttggtttaggtaaaatgagagcatgtcaccttgtgcatcatcaatgctattgttaagattgtataccaaataatttaatataagtgttgatatttcaacaacaccattttgattttgttgttattaataaaaaaaaataagacatcttaaaatacttattttaaattgtgtcattttgtcctaaaaaaaaatgacattagttgttaaaaaatcaatatgtttgaagtattgttactgtaaaattatgcatccggaactattattgaattgtgtttttcaaactattactactattaagtcgtgtctttaaaattttgagtagagaagtataaaaaattgtaataaataaaaaatattaagaatgactaattaggcatggttatgaaaaacaaccactagtatcacatatggttaggacctttttagggtaacaaatatattagggttcgaccacgaaatgccacaatttacatatttcatgtttctctttgtgtggtggtatctagctcactttcaaagttattttcgaataaagtataagcaattacaaattcataaatattattgttcttataaaataagaaaattattggaagaaaaagaaaagtaataggataatagattcactcaaacatattaataaaaagattgatactctccatccttatttgttcggaataacgaaatcgccttttaaaaaattattaaaaaattacttgaaaaataatttaataatttcgtagatgaatattgatttatcattccatttctttatatttttcatcttctcttaactattcatcttctatattctccttccatcttaccaaacatattcttagatttgtatttttcactctacaatttttattttcttttttgttaatacagtagaacctctatnnnnnnnnnnnnnnnnnnnnnnnnnnnnnnaatttgttataaaaaaattaagtcccaatttgg

SEQ ID NO: 110437 - DNA, 2998 bp, Cannabis sativa
tagaaaaaaattagcataaaatttagtatacgtgtcttgcacgtagctttttgctagtatatatatatgtgtgtaaatctgacgaaatttaatgtagttcaaatagcaaacttatgaaaattaggcataccaagccctttacactaacttggaacaaaattctaacaccaacatcaagcaaccaataaactgctaggagtcaagcattaaagaagtgtgaaatatattagacttactataaataaataaacatatgacagaattcacttattaaaaactatcagccagtgttcttctactaaaaattaaggcataagcatagataaaaaaaataacatgaccaaccatattctaatgcttaattataatagattagatcacataacaaatggctaataaagatctaaagatcctccagatttgacgaccaaggacaaaaaccaagatatcctccccaaaacgatttggaactattgatgagacatccagggtcggccttaacattttggaggccttgtgcaaaagattaaaattgggccttttataaaaaaaaaaattgtgtacattaagacctccattgctagttttttacttcttttctttttttcaaagatatgtacctaaacttttaaatataaatcttttagtgtatttataataataataataaaaaaaaacttttcctataaaaaaattggcctttaaaaatggggagccttgtgcaatggcccaagctgtctaaagtttagggaggccctacaaacacccataaaccaataggagacaaccaacacggcagacctagtatttaaagtgaagagtgtaatttttttttttgtaagactgaagtaaaagtaaacttaaaaaaaaaacaaaagtgctcttatgggatttgaacacttacatctattatatatgctatttagcttaaccattacatcaaaattaatattatgtttacaaatattatctttaataataaatatatgtcgtaactaactaaaatatatacacattttttttccaattttattccagggatcaatcgcctccctcccttctatgtggattcgccccagtacttgcatcttgcaccaggagaatatcaatccctactaatctagtagggcgttgaaaaatacaaataataattatagagtaatttgtaacgtaaatatttaagtttaactcctggttacagagaaatacttaaggtggcgtttagttgagaggaataaaaatataaaaataggaataagaatgaaataaaataaaatttaaaatgcataaaagaaattgataaataaattattaaattttttctcatcatgcattagaatattctttctttctattttaaaattgaatagtcattacaccaaaatgtttcaaaatggaatagtcattacaccaaaatgatgagaaccattctattagaatgacatttcaatactttaatatgcaaccatacaaaagaatggaattgagattgtttccttctatttcattccatttcattacctccaaccaaatggcacctacatttaatttttaacggtaataatacctattttaattataaaactttcttaggtatccaactgttaagtacatattatttttttattggtatatttaaaaaaaaaattttaaaaaataaaaatttaataacttagaccaatcaggaattaccatgtggatattaacttgaaatttaatggtgatgtacttgtggaagttctaaaaacatagtttagctattattatcgtaaaaatttaatctaaaatatttatttgtaattgaatgttaaatttaatatttttgctgcaaattattcataattatatacttttattgataaaaaaaattaatttcaaattttgtttttgctaaaaagagtttggttacatcagaagggttatcaaaatttggtgaataatacatcaaaaagtgagagctaggttggtatatatttaataattttatactctcaaatataaattatatatgttttttaaaaagcaattaattttaaagataataattattagttgatatttaaaatattttgttattaatttatttaatttgttgataaagatttcctttaggtggttatgatttggaaataatgaatttggaaaccttttgcgaatcttagagtgtcgtactcattttagataattgcatttgcagtagagagatataggttcatgcatgggaccatattaatgcatgttttttaatttacttccttttaaaaaaaaaacaaaaacaaaaacaaaaacacattattggtctctagtgaagaaaaaaccaaaggcagttcgaaaaaattgttcaacgtggggagactatacctctcaaacatacagaaactaccttgtataaagtatttatttatatatatatatttattaaaatactttaggcctaattgattggtctatatattttggtataattaataagttataattatttaaaattatttataaattttagaatattataaataatttatcgtactaaaaataaaatttaaaaaattacttattacaactgagataagaaaaaacaatcaaagttagaaatatacggaagtgatagccttttaatttttaagataatataataataaaacaaatcacagtctttttatttattggctgctcgtttgtttaacatacgtgttatattgttctatcagaattgtttttgaaattaaggatcatttttttaacaaaaattaattattttgctatagattgtaaaatatataaacatataattaagaagggaaaaaaataataataattaataaaaaatctcgacatcacatagatttgatgctataaaacacgtttaatgatagtgcgtagtttttatatataatatctattctatataaagtgtgactatataacttaaattcttggtttatgaaaaattcatgggtgactttatttttatttaataaaatattatttatatata

SEQ ID NO: 110438 - DNA, 7558 bp, Cannabis sativa
  modified_base (7514)..(7514): a, c, t, g, unknown or other
taaaaatgccatatttttctaactttgttatgaaatcccatatttcatgtaattttcacatatttgtttgggcaattagaaatgggcccgtaagcccgtatttgacgaagctggttgtaggcccataagaaaaaacgaaaaagaggcatgaggtgtgacccctaaagcaacagtcccagtggtacggcccctggtggctagtacgatacacacagagatccgatttaggaaaaattaggcccaaaattagtctctataaaaccgactcacttgttcttccatcttctttgcgcctagcccttttcttgcagagagctctgttctcttactttttattttctttttttttttagttttttcttctttctttttttttttcacttttctttttccttcttgatttagaactttttaatttgtttctgggcaatttggtttaagattttatcataatcagagccattgtcaagggttaggaggtgtggatcggttcttgaatttctcaaaataactcgtgttttcccacctgtgtccaaatataccgccaatttctatttgcactgaaatttctttgtacaatcccagatttatcaacgtaattcctattctgtttagctgatcattttgtttctatttattgcccattttgcctttgagattgattgtttaggagagtaaaaattgaaactttatgtgtgttggttttagggttttttcgttgccctgtttaattggaatatagatcagaagaaggattagttttgtttttggtatttgggtttttatctgatttggagttttgagcgatatggataagaagaaggtggctgttccacttgtttgccatggccattcgcgtcctgtggtcgatttgttttatagtcccgtcacgcctgatgggttcttcctcattagtgccagcaaaggtgcgtttgatttataatcttaatgttgttttgaatgaattagtttattagacaagtgaataactatttgatgtgtaggaagatattgaattgtttaatccaactttaaattttcttactttattagtgcattgcaatacagtagaaaaaatgtgtaatgaaattgtagtaatgttttagttaagattgaattcatgtaatgaaaagtctttatgggtggtcgtgtgatttagattctagtcccatgctgagaaatggggagactggtgattggattggaacatttgaagggcataaaggggcagtgtggagctgcggcttggatactaatgctcttcgtgctgcaactggttctgctgacttttctgcgtacgtctgtttcttttttcctctaaaacatatttcagtacgatggctctttgttgctttctatttatattcttagctagattcagccacacaatatttaaatgaactagtatctggaaagtggtatgatttcatttgaaatatgcctaattgttaaatattgactgcagttggagttggaatgtatgtgttgctgtatgtatatttgaactgaaagcggtcactttctgtcttttgttttcaatatttttactacgcttcccttgcatgtattgggaaggttattttgtccttaggaaaagatatttcttagcaattttaagaatgattataaggcttgcctcatagtgaggctttcacaaaaaagtcttaagctttgagccttaggggtgatgattatgtaccctactctaaggaccgttgcaacttttttttcatttaaaggaaagaaaatgaaaaagacagtacatatttgtttcttagaattgtggcagtaagaatgtgagatacatatggggacatccaataaaatttgaatggtatagagaagattagcatggcccttgcgcatggatgacacgcacaaaaatcaatttcttataaatgaaagataaatattaatgaggagcaagtgcacttgtgtaatacaacacttgctctagttcttagtttgtattacttattgtatcatctgcaactctgctgcatgcatattgatttcttaagggtaccttgttatgtcaattttattattactttaatttataatttagctaaattcagaacatcccttgtgtattaattaggtcatgatatgcattatgattttgatgatctcttagatttcacactaattataacatttattctgatcatggatgatttttgttagtgcttagtttatactgaactaaaagtaactgaaggatggttgacttttccttcttttgttctttattccaaccctttttctttatgcttgttggtggaacatcaagctggggagaactacgaaccctgagaaagacactcacaaaacacactgatttataattcatttttgttgttaattccctaactgtgttgtttatagtagttacatatcattgtgtaacttttatgtgtctttagcattactctaaaattccggattggtaaattgaaaagaaaaaagatagtaatggtaaaaaaaagttgacatattagacctgacttgcaggaaagtttgggatgccttaaccggggatgtactacactcttttgagcacaagcacattgtccgagcctgtgccttttcagaggtggcttcttcttcaagctagtttccatttgcttaccttttttcccctttatccttcatagtttgtaaatgtttcaccttcctgtcttgataggtttaatgcttccacataatgtggaagtctctgagatgtttattttttattgctttgcttatagatttatgtaatggctattgtttgcattatttctaatggttagttttatggtttttcttttcctttcaatatacattttaattatcatatgaaatgggctactactaaacgtctcttgaaaccttttgttctaagactgatggtgtacttttactaataaatattattctcattaatatattttgtaaatcatatttaatggctgacaaccgcaatgcaacacaggatacacaccttttattaactggaggatttgagaaagctcttcggatctatgatttgaatcggccagatgcccctcctagagaagtggacaaatcccctggttcaattagaactgttgcatggctccacagtgatcagacaatattaagttcttgtactgatatgggtggtgtgaggtatgcatatctctgtgaaaacactcaaagttaaaaactatcatattattttagaggcctgtgctgtgtcccatgcttgggttttttttatttatttaacttgtgactgttgatcatacagattatgggatgtaagaagtggtaaaatagttcaaacgcttgaaaccaagtcatctgtcactagtgctgaggttagtcaagatggtcgctacataacaactgctgatgggtctactgttaagttctgggatgcaaattagtaagccacaaactcactcgcttttgtttttgctgggcttgagtgtctttaccgttgcttggtttatgatgtgctttttctgttgcttggtttatgatgtgttttttcctgcttacgtgtattcagttttgggttggtcaagagctatgaaatgccatgcacggtagagtcagcttcgctggaaccaaaatacgggaacaagttcattgctggaggagaagatatgtggatccatgtatttgatttccacaccggtgaagagattagtacgtgctcctatatctaaattctttcttattaacagtataaagatgaatgtgctgagatttacatgaaaatagatttgagtcaggttttaattcacaaacatttatgcagcatgcaacaagggtcatcatggtcctgttcactgtgtgcgtttctctcctggaggggaatcatatgcctcgggatctgaggatggaaccattagaatttggcagactggccctttgacaaatgatgacactgaagctgttacagcaaacggggcagctggaaaagtcaaggtaaccgtagatgaggtttctcgaaaaattgaggggttccaaattgctgatgaaggaaaatctgcagagaaggaagaggcaagaaatgagtgataatcctaagtgatataaaccagactttttgttttctttttgtaccatttttagttgttgctgctgccgctgtggtcagatgtcaaaaatttccatataagattttaggtgctgcatttctctctccttttacttttcttttttgttacttaatattctggcagaatgtatatgcaagaagacgacaggtatatctttcttattgaaacagcttgatgttggaaactttttgaatatcaatagaattaaagtgttttgattgttcctactctctcccaattttcaatcttcccttgaaagtaaggtaaaacacaaaatttcccaatctcacagacgcataacagctttaaatgatttggagtcaccattttcttcattccttttatttccattttttatatgaaaggggttatttgatcaaacgtttaaatagaccaagcgtgtcattacaatgaactccattttgtattgaaactagatcaataaaaccattggaggaaacagccaattcccatttggctaccttatgtgttacgaagtttaactgtctggtgtgttggggtttatcaaatatagatttggtaagatgtgtatttaatatcgtaaggatagctcaggttggtggcctagctatcctttatgtattaaaaattttgttttggctgatgacatgaattaatgatttttttttagttattggcctctttgaattcttcgttcttaggtggtattctctgaggctattcttttttttcctatcatagtttgaaaataatttaatattttctattttaaaatacaggtaagtaaaacataagggtagatttagattggtattagatcatttctaatgaaaagctaaaatagtgtcatagtgttatattttaatattcttgagaaaattagttctccaattgtgttcatagtgtgttaaattttgcacatgctaaaaattgcatatattttaatgaaaattccaaaattattattaaatcaaagtttcagccaccaaacaaggtagccagtcagatcgaatattctccaatctgaaacgacaatcagaatagaatatagaggctttaataaatgtgtgagccactatattaattgatcgtttaacaaatttaaaacttttacaatcattaatcacttagtcaataatagagatcatcctaatagaacttcgtaaagcttgcatagccgtcaagcaatcagatttaggagagacatgttgccattgatgatctttaatccaattgagtgtctcacgtatatccatttcctctaccaaagttggtgaaactaacccatgaatgagctttgtgcatccttccacaaagaaacctttgtcgtccctagctacgaaattgaagccataacaattgaaatcctcaaatagagttgtattcacattgactttaatactatcgacttgaggtgaactacattgctccacaccatctcctttctgaaaattaggccaagatgactcgaaatccgagttttgagaaattctccactgattaaggtaccccttagcagaggcgacaatactagcaattctcaaatatttttgctgccaaacacgctcatgtctagcattccaaatagcccaacaaatagctgccatcaaatattttttttatccatatcaagcatttggaaacaagacacacactagtcaataaaagtatcacttagttgcactgatgttccgatacattcgcgattctaacatagagaaatagaaggacgggtcactaaagcatgtaaaatatactccttcccaatattacaaactagacacagactactaatagctactctttttatccgtaattgtgtcatagtaggaaggcatcccttacatcccgccacaataagttcttcatttttagaggaatttttaaactcgaaagcttcctccagaattagaaatctgcagtaacataaatattccaattcccattaagttactgaatgctaaaagttatatcaaatctggctaataatatacttttctaagcaatttttgaattacaattttacaatttatcattaatgatatagtttaatatacactttaattacaatattgctattaagtattctttaaatatttaaaatatttaatttatgaatgattattaatgctattttatattttgtcctaatttttaccttaaaatgttattgtgcatggagcacaatagcaaatattataacaaatatagcgctaactcatatttttggccaaatttattacaaattatacactatgcattggagatggtcttaggcaccgatgacgtcttacaaatagttagtgcgatattccataatagttatttaaattaattatgtggaacttaatctttaattagaccaatacttatattttttttttggtggtgctacgcaccataagtgactttttaacatttttcataaagaaaacaagaaatgctaaaaggcactacttgttcctagtgttgtaaatataggttagacaatttgacatgccacaaaactgacacgagcacgactagacacaaaaaaatacagatttggacacaacataacacgatgctagaaattggcacgacacaacacgagaaatatatcattaagcacgacctgacacgagaagcacgaaaggcacgatacgtaagtacgaatagactataacccaaaaattacaacacccgaacaagctcgaaaagcacgacacgatatattaaaacatgaaaaactaaggggcatttcgacacaactgtagttgtactgtgagaaaaacaactgcagcaaaattgtggaaaaggctgagaagcgtatttggtaaattatatattttaaagtgctgtgatttattaagattctattataaatgataatgataatattataatctaattcataataataataaatatattaaaatttatgttatataatttttttttttttacatatttttaattattttttctaaaaaaatataaatttatatgcatttaagaaaaataaattatagtacttttaaattatatttttatcgtatgtaaaaaaaattaaatttataagaaactctaaattaatgtgaaatgttaatattaaaaatataaaatatcaacataaaaaataagaaatttaaatattatttattttaaatattttattattttaatatataataaatacgtaaatatatttttagtacaattataggtttttaatcaaaataactttttcaaaaagttggtttatactagctttagattttaattgtagcttctccataaattcttatataagttgtttttaaactatctaccaaatatttttttatcacaatttttttaaaaaaatagcttttagcttttccaaaagctgtgccaaataagctttaagattatatataaatttatttataggatatgatataaaaatttgagtatttntaagtaaatattcaaattctaacagggccgaccctgaaaatata

SEQ ID NO: 110439 - DNA, 16490 bp, Cannabis sativa
  modified_base (9634)..(9641): a, c, t, g, unknown or other
ttatgcggatcagatttgatccaaaatatgaaatccacacttagtgcgaattggatgttgtttgaccaaaaaagtgcgaattggatcgaatgaacacccctacattgacccatagaattttttagttggtgaattgtattattcttccatctagttgtggccttagagtgaaaatacttcgtgtttcgatctccatatttgtgccacaattgcttcgatctctggcactaaaaagtttcccgctgatctagtattaccgctagacttttctttgcttcatcaaattgttgaaaaagagacctcatcacgtctgtcctagaatttctttacagcagcccgagtagcaacaatccttgcttcaaaatttcttattattaatcctccctaatccattaacctctgcccacaagtagcaaccttcatagtaattgactggccttgaagcaaatttcaagtattctgcacaatcaatccgcacatttcctccttaagccatacatttttaaatcggaacgtcttaattctcctgccagtagtcctaggcaccggatgaagaaaaataagacaatggtctaaatgcccaaaatcaagattgaaaagcttagctaaatggaaccgagacatccaaattgagttagcaaaggccctatccaacgtgaattacacctattggcttgttcctttaccccatcccaagtgaattgatgaccatgaagctctaactcatacaaagcatagtctaaaatagccaattgaaacacctctagcaaccatgacggataaggcactcctcctctcttatccatctgatccataacattattaaagtcctctattagacaccaaggcaacgaagatttatctttatgagtctctaacataggaaaaatagggtcttcataagtagcttcaaatgttggcttctggtagtaagaatgaatataatcccattgtcggtggttgcaaaaccaaatagctggcaaagcatgtccacaaggtattcttataagctataatacactgcaagtggaagttcgtttatccaaatcaaccgtatatgcacctccaatgttcatcctaaatttaaacattgatgcattcacacgtgtaactgaacagtgtcgtgaaactttttgatgttgtttgaaaatcttcacaatattattgtggacagtttctttccacttcgacatagattctcttctcttgcaaaatcgacacattaaccaaaaccttatactctccaaaagaataataattggcttgtcccttacatccataatagcgtggttaaaactttcacatatgttgttgagtaacatgtcacatttaaaccctctttaaaatgtgcttttgtctattatgttggtggtttagcagccaaccacttgtaatcactctcattttgattcttttaactcttacattttagagtcaaactctgctggtatagtggctcgagctgctgcccaaagcatctatttcagctcgagcccagaatagtccttttggaagtttccatacgtgtgtctcacacgaaagcaactgtgcagggtgttgaagatagattccacaacattttggaaaccctttttcctatcactcatcttagtgaatgggttagggttagtcagtgtcaaatcatccttcaacagctcgaagaaccatgtccaattgctagttgtctctttttctataactgcatatgctattagaaatatgcatttagccccatctatctcaacaactaccaacaatactcatttgcaataccctttaaagaaacacccgtctaaacctatcagtggtctgcactctcttaaaaatccatccttgtaggccttcaagcatataaatactctcttgaatattctttgtccataaaccaggtcagtctaaagcttagctttgctaccaggatttgtagctaacatctgattccaataatcctccaatattgcatattgttgagctactaatccctctaaaggcaacatggatagatataaagtgagattcgtggaaaatgactacggtcaaagagaaggcatcaactatgatgatgtatttgcttcagttgctcatcttgaaactgttatattattaataatttctttagcggcccaaaatagatggaagatctatcaaatggatgtaaagtctactttcttaaatggtttcttcgaggaagaagtctacattgagcaactattgggctattaaataaaagggcacgaaaaaaaagttatgaagttgaaaaaggctttatatggcctaaagcaagcgccaagagcttggactagtcaaattgacaaatactttctagataaggatttcactaagggtccatatgagcatgcactttatatcaaaatcaagaatgaggatactttgattgtatacttgtatgtggatgacttgattatcactggtagcagctcgagtatgtttgaagagttcaagaaagatatggcaaaagaattcgagatgacagatattgggctcatgtcatattaccttggtattgaggtgaagcaagaaggcaaaggtgtttttatcactcaagaagactatgctaaataagtacttaagaagtttaagatagatgattctaatccagttagcacactaatagaatgtggagtgaaattgtctaagcatgacgaaggaggaaaagtggatccaactttctttaaaaaccttgttggaagtttgtgctacctaacttgtacaaggccgaatattctctatgttattggaatcgttagtcgctatatgaaagctccaataacaactcatttgaagattacaaagagaatacttcggtacaagtacgatcaattgtggactattttattcatcctctaataattgtgagatagttagatataatgataataattggagtggagactaggatgttaaaaaaagtactattggatttgtgttcttcatgggaaacacagtctttacttggatgtcaagaaacaacaattcattatgctatcaacttgtgaagccaaatatgttgctgcaacttcatatgtttgtcatgctatttggctgagaaacttgttaaaggatttgaatgtgcaacaagagaagtcgattgagatttgtgttgatagcaaatcaacatttgcactagcaaagaatccattttttcatgaaagtagcaagcacatcgacatctgttatcattacatacgagaatgcattggaagaaaagaagtaagagtggactatatcaaatctcaagattaaggagatatttttatgaaaccactcaagagagaaacattcatcaaattacgaattctaggagtcacaaatcaagtttaaggaagagtattgaaatattaaacttgatttaatatatagttaatttctagaattttcttaactttctagaataatgttcttgtatttactagtttgtttgactactcttcaaatttttagaattttttttcactttttttagtagtgataattatatatgtagaaattagccatttattaatgcgtttagaataatctatagagccctataaatagacatgtaatcccaccattttgtaccaaataaaaaatcacacaatttgagttataaaatatagccgcttccatattattctctccaatactttcttatttcccaacaacaaaaggatctatgaggtggagctgatcacagagggacttgcggactcctgaatcgcagccacttccaaatgagcccaagcaatccactgctcagtagtgtcaatgtagaaatggaggcgttttttgtttggtctatgccagacaagccaagataacagaagaagaggacaaactcatacctggacatatggctatagacatgaataacgaactcgagcttcagagtcgggaccaggaagatacttaacacttttctatttctaaataattcatttaaaaaaaaaaaaagtttcaacaatatattatctaataataagaatttattatttattagttggacttcgccacatctcatcaaacttgtagttgcacagaatctaataaattttttagtgcatataaattaaggaattagtaggtgaatcaagcaatcggtgagctggaagctagacaattaactgtacgaatgacgatgaaaccccattttatttatgaaaaacaaaaaaaataattggaaactcagctgttttgtaccttatactacaaaatgatgatcatctcagctggggatatatatatttaattatatatatatatatatatatatatatagacaacaaaaacaaacaaacaattaataagaaaagttaaaaaaagaaaaaattattagtctagtagtgttgggcaaaatggcctgtcggaaccatctctgtggctaggaatattgaagtgcctcaaccttccctcttgcttcttcatataaccctcacatagaaaagccatggagaacttatcttccacaaccctattcacatcatgaacaaacacatcggtctctccttcttctctgttcctggccatcatcccagctgtgtaaatggcagtcattcttccaggtgcctcatcatagtacccagttggagcatcaaccatgatcacatcccacttcgtctcgtacactaagctcggcaaccccttaagggctagctggcacatagagaatttgggatcgctgaccgccgtacactccggccccttccccacgtccatcaggttgtcagcctcatgcaccttgctctcgtacgtcacatggtacgattccagcgttgggaagcggcgtcggatttgctcgatccacgcctcgtcctcttcgaggaaaaccgtgcgccctccgtagttgagggcgctccacatgaggctgtcgtgccctagcccgaagacgaggaagttgcatggagacttcttctcaagaactctcgccgagacggatatttctctcagtgtttgttgtggagtgatggtggaggttgtgtagtggattagggtttgggctaaagaaggtggtatttttgtgcatgtttgagtatcatcatgaggagggcatttgctactactactgcgcctagcgttgttatcatttgtgggttctttggaatctaacgataagtttgatcttaagaagaagagaagcaaaaagcctaggaaaactccgacaaggagaaacttgaggttgagtgattgatgagctttcgttctcatgcttttatgatgatgaagaaaaggaaaaacagatatataacaatcaaaaactggattttgatattatgggtgtttctagctagctagggaaattaacgagactgtatataagatatttgttgaagatatattatagactactaaggagtaaatgatcggtttgcagatcaaaaagggatatagagatgtgagatgatgatatgagcgttgaaaaagtagcaattgagatatgatgtggtagtatgtacgtattatatatatatgcttaaacatcaaggaataatagtgatgacatggatctaacgtacggttagaagcttgatgaagacataagagctgctgtggtttttgtattaagcaaaagcttggttaggtagatctactagttcggtgaaagttttttttttttttttttaatttaatcatttgttagggttagtttgagtactgcttattcattttcgtgaggcttgaaaaagttctgttagacttagatatatgatgaaaaactatatatgtgacaaaaatatggttcattataatatatactataaatgatcatacatacttttaatgtcaaaaggcaaatcttgccaacttaaaaagttttggttttgaatatatgtggcatcacaacttaaaatggtttgtagatatttgattacatattataatctatcatcgctttgattgaaacttttaagcaaaaccctatcttcatcaaggactgtggagattcttttcgtttaagaaaaatcatgatatcagcgaaattatagtcaaataataagaataataaaaaaaaaaatgccacaaaagaataatcttaaaattacttgcaatttctttcataagaactggaaagatgattaattattccagcaatataattaattttatcactctgaaactagaaaaaagaatcatggtgtttggtgcattaccttatgataaaaataatttaatatacaaaaggtaatactataatttcaagatggggatcgttggactgtctattagtttgaagttagttagtcatattcttgttgctacttgtcccagttaatatatttggaagtatatgaaacaagtccaattaaatcccactttgatacaaataaaaaataaaaaatcactaaaacaatactaataaacttctctgaaccagcatttctaaatagattaatgtcactttcagattctcagctataataatcatacggccttatatttaattgtgaaacagaaaatgaccattcaaacaactatttaatttttctcgtagcaaccaaagtactcagtcttgaagagaatcttagtatttaattttatgtctaaatttgtatttcttctgataatcatagtgagatgagtgaactgtttttctttttatttttcctgtgacaaatactaattagcacctttaactttaatgttcttccaaacaatcaaaagcattaatagaccccctttcttagaaataataataataataataaaaagcaatgattgaacgggttaaatatgatgtactttgggttaagaaactgatcttatgatttgtggcctacaatattttggtcaaccgctgatcctttacatagaacgggttaaaatttgatatcaaaagaggttcgttcaactgtacataatgtctctcagtactttggacaaaacaaggtgacatttatcaccaagtatgtcaataaatatatcgtatcataatcagaaagatttcatttaccccacaaagacttgcgtcaggatcatttgaaacagattcgtggctagagctgtgctttttatggcattcatacctttcgatgccataaacaaatgcccccctgcggtgaagtttcagaaaccgaaaaggtctccctatatctttcttaaaatcaaaattatatgcccttctgcaggagcttctgcaccatatcaaggaaacatgaatttcctcatcaatcaccccttgtcatttctactgtggtgaagtagcgactctgtgatcagtccagggccgttgtgtgtttttttggttttcgtcttatcaacacgggctttacggacagcatgctggatttttttctcatgctctttgagcatctcatcaaggtttcctcctgctggcatcaatggtccagagtaatgaattcggttcttcttgtaagcataagcctgagatagtagagtcaaagacaaaatgaggaatattctagcagcaaaacactatttaaacagtaaaccaccagcaaaacaattttgttataggttttaactggccgtgagagaataattaaaagcaaactctcaaaatataagtttctgagttttttgtcaaatgtcttttctaatgctgcttttaatgggaacatgataggtttcatcaatcagcacttgtggcataaaatacaagcatacgaattgagatgttcatatattctgcccaataaggatggcctcaaacagccaatagaaggaaaagagtggtctcagttaaatgtcttaccgcagaaggctccttctctgacattggttcatctttattcttatgtgaagacattggcctctccagcaaatggtgagaccattcttgttttccagaagaatcaccaccattcagctgactatatccaccattaatacgctcctcaggccagtgtgaagtcatactggtctctccagaactatcaaaccatgattcacttcgtgctgcaacagaattggaaaatctggacaactcaactgctccacgatgcacattagatcttggtgacctcaactctgcaccgttcctagactggccagcccttgcatccatattgtgagatccaaaggcactcaatagcatagactgcccagattgtgggataccattacgtgacatatctctaggaggttcaataaggaaaccagagcctccctcctcttcatgattgaacttctcactgacgcttttagggttatgctgtcctttatgcttctggggtaaacaacaaaataaagatgttcaacataaaggcaactctatttcagcaaaagtaatcatgtactataaccttctttagaccatttaaagatacctgtattgatgactgcaactcagcattggcatccggtgctggcacagccttagagaccctagagccctttttaagtgactcatatcctacttctttaccggctgcttttaacctggttataaaatgaaagaagaaagtgttaaatgcaaacaaaagaatctcagtcttcaactaaatattatagtaatgcgaaccattttctttttaaaagttatagcaatgtgagccgtaaaaacatagaaaagatcacatgttggtggctctgataatctaattcagttaaatgttcaccaatatttacaagaatcaagagttattattgtaagtttgcatgccccaactccttagctaataaaataattttatctttcttttcatgaatcatttcctcttaagcttgaggtataaagaaatcaaagctttggttacacagattctgatactaatacttaaaagatttttctcccacgacgatatagccaaaatttacatctaattggttaaaagcagagcatgactggtaaagcccataacccgaatgtcttatgcatagtgtccagaaaaaagaaccagcaaatgagaacagctcaccttctagcttcctcgtctcgaagcttggcatcaaactccttgcttggtgggtactttggcaaagttgatggatcacaagggagaggcttcattgtgaagaactgaaaagaaaaccttaggactaagaattgaactaaaaggaatgaaatgagtagcactacaaacaatgtgaaaactaatatccaaaaattcaagtagacaaccaaatgaatataaagcaagattaccacatgcaaataaacgggatttaggttttagctaaatgattactaaaagtccaaatacctcactctggagtgcagaagaagctgttccacggcctgcaggctctactgcaacaagcttctccaacagtgataatgttgatgaagggaagtccttgaatgtttcagcaacgcaacgcttgtaaggatgagtaggtttaaaaatggttgcatgaggcaactttgatctcttccaatattcttcagaaggtgacccacaaagtttgaagatcttatgcagctgctccacctataaaaagaaaaaaacagactctagtgaacaatcaattagcataataggttgattctgtttgagtcctaatcaatcaaaagaagagcattttacagaatgaatgtaaaactagccaaaaacaaatactggatttggttaataataagttcctttctggaaaaacagaaatagagtaagactggcctaacacacttgcgtagttaaacgaaattctttctttcattctttctttctttctttcnnnnnnnntttctttctttctttctttctgttctgttatatctcaacagatatttacggtatgcttataatgtgtatcttatgttagattttgataaatccactaggtaacattaaagcactcaaaactctaagtggtgtaatatctgtggatattcatgagaatgaataactcaacagccgaaataccacatttcttaaagcatatccagtgcattttactactgataatattacttttaaaaggggttacaacaggattataatgtatagataaaacacaaaaaattgcatatagaccagtgggtaaaaaaccaaaagacaaagaagtacctcagttctgcccggcataataggcttcccagcaaacaattcagcaacaatacaaccagcactccacaaatcaacagcaactccatattctgtagatccaagcaagagttctggtggtcgataccacaaggttacgacacgacttgttagaggctgcttttgatgaacaccgtaaaaatttgccagcccaaagtcaccaatcttcagatttccataattgtcaatcagaagatttgatcccttgatgtcacggtgcaaaacaccatgactgtgacaatgttcaagaccttgaagaagctgccgcatatagcatttaatctgtcagcccaaagagaaagatgagcatgttagttgtatggatgataagaaacactccaatctcacctgtactgaaaccaccacaagataagcatagagatacagttgtaagaatttttttaatcttttgtaagaatatcaccaaatatttgatttaatgtctttactacttgataaaatacaagcaacgaacacaaaacaacttgatacataatgataagtttaggaacaaaatccagagtagcactggaagttaccatcacaaagattgcatagaactttaacaacatttaaagataactaatttttatatgataactatttaccacatagaaagattcaacccaaaaggaattatcttcttcaatacatgtcaagcagtgttcttgcagcatcagtatacataaaagttactttagcatattaaagatacagtatagtagttcatgctaatagtcaaatacttaagcacttaagtttatcacgctagaaggactcaacaaacctgtgcctccgtaaacttgactcctggtcttgatgcaagccctgcaagatcatgctccatgtactcaaatacaaggtataagcttccagatacccttgaggtaattaagccttcaagcttcatgatattagggtgatcaagcctacgcaaaataagaatttctctagccataaaccgaacactttctggatccatagtagcaaatcgaaccttcttcaatgcaactagtttgtttgtgtcaagatcccgagctttgtacacgctgctataagttccttggccaatctgcataattgccaaggcccaggagagtcagtactaaaagcaaaagcaatatagaaatgataatgaagacaaatgtaaaacccagtaacttttcttaacctagaagaagtaaaattaacattaaatatttacccaaggaaatatcctccaagataaagcataattaattattagatacaatacaatcagtttaacaatatgtcaacaataatccttgcgtctgagtttgttaatttccttagtaggtttctctcgttataaacttcacatctatcattaattattaagagagcattttcagacttgcataattttacagttaagaaaaagtttattaattacaaagagataatgatgttctccaagtggaataaaaagctataagtaacaaagaacactcattttcttcaacaaaaaaaaaaaaaaaagaaagaaaaacacaaatggcgctaagtgatgcatcacagtttctattctaaccacacaattgtaaataatttagtcccagtgtcccacattctgagataatgtgtgggtgaaaaattatccaacatcatgcaaattaagtagtgcctgcatcccacattaaggtgcaaaaaataagtacccttcgcatttactcaaaagctataacaacatttaaagcgtaatcaagtagtgcctgctgcatgctccctatccttcaaattcaatacttgatttgaaagataatccttaaagtcagctacaattcaaaacacataaatgtaggcccacataaaaacatacgctttcaaaaaaaaaaacaagcacagtatacaatgtagtggaccatagccatttaaaataataattttcatttgtgagacctaatcctacattgcttccaacatgttgtgagatctaatccaacactgctgccaacatctattaaaatccatcatgcacaattatgattaacaaagcaccatgaaatacggcaatgtcatggcgcctgactagacgagcccagaaaagaatctcattaatctagattccaacaaacaggtagaaaattaattcttgtaaatattaaaaagacgcctgactattacatatagagagtagacatcttggtatggacaaatgtaaggcaattagtgaattatatgtcattttgataaaaccattcattagaatgtgatggaaggacaaaaggaaagagatttagcaaacaaattgttgtaataatttaactaggaaaacatgactacaagtactaccgtacgatccactactaataaaatggaatgaaagaacatagataatcaaacgatcgaaccaacaacaacaacaacaaaatgtaaaattaaatggggaaataaattgaccttttccaacttctcaaacgagtctgccttgcgaggaacccacccactgatagcttctccagccacagcagttagccatgaaggccatccagcaataacctgagctcctttttccccattggtgacgcttgatgcccgagacaccctgggatgtacctgtcccccgttgccccctccaacttctatagatgaaggttgttttggaagctggggtcttgtgaggttctcactaacgacgactgcccttttcccaacctcatctgataaaacaggagcaaacccaacattttcttctgttcttggatttgaaatcaaccgggcagtagcatcattcccactattgtcaatgcctgcatgagcttctaaccgcttcttcttcaaatgcttatttggattcgcttccttatttctcccattattctccgcgtcatactgtttcgctaaccctttcgagcaaatgcagcccataattccaaacaaagctactccatagctccaattgccaaatgagaaactagaaaatcactccgatcctgaaacaaaagacaacttctttttctttctatgtattatcttgtggcacaattgaagttgagtaatgatccaacccttcaaaagaaatttccctccttccacagtttttttacggcagcaactcaagtcttcaaatgggaaagaacccagatccccaaatgccaaagcctcggaccaaaactgaaaccttaagaacccggatcaccaattacaggtattggcggtcaaaggacgaccccaaaacccaagtcataaaaggaagatagcccagatccaaatttgaggagtatgctaggatcaagaatgagaatttgtcagggcaatgaaaatcaatacaaaaggaacagtaaaggagagaatacaggtaccagccaaaattttctgtttcgaattgctgctgaaaagccaaaaatagaaggcggaatccaaccaaaacccgaaaagttaacaaacaataaggttatctcaaatttgaatggatatgaatattggaatgtgcgttgtgtgacagacaagacagagaaaggtggacgaaggagaagagattttcgaatcagggttggtgcgaaaatcgcgaatagccaataaaataaccaaaacaataaaaatggaaatgggaagagatcaagagagtggcgatcttctctcccacccaacaagaacacttgctaagtcttacaatttttatttatttttttcaaaatatgaaacagagggaattgaagaattatttataaaattaataattaataataattataaaatgtgggaattaaaggtgggaagttgcgaaaccgattatgacttatgacactttcacccaccttcttctatataacaagcaaaattgacttaaaaggcatgttttatttactttaaaattatcatttaattgtgattaaggatttttaccaaaaaaaaacattgcaaaagtatattgtagaatattatatatatttaattctaattgttttaaaatatatatatatttaagtctaatagtagttaaaaaaaatcttaacattacttatttgaattgcaatatttagttaggaaacacatcatatacactcgtaccacagcttctttttgaaagtaaaaacgtttataaatagcaaattagacctcacggtcgttacataaaatattgttcgggaaagacgaatcactcaatctaccaaaccggtagttcgtgaaagtccatttggccacattatgagccataaagttacaacatctactaacaaaagagaaattacaaccatcaaacagtcgagagagtcttaaacaaaaattagagtaattttcaattccccaacaaacatccaaaccgttgattgaattgataaccactctagaatcactctctataatgataaatttccagcctgcctctttagccacctccaaagccaagcaacaagcagtcgcctctccacaaagcgcatcacagaaagccaaactagaagactgaattctttccaccacccccagatggtttcgagccacaactgcagcatacatgctatccagccccactttcacgtcacaattaagtttaatccagccatgagggggaggcttccagcaaatcacctcagatggggaaggagctggtaatagggaagctctgtaatctgcataagagttggaaatatagtcaacacactgagatatattggacacttttttattatgtaccttatcgttcctcgtcctccagatagtgtcaatcacaattgaagcatagagaaagacttcatctgaattaatgcccattttgtcaagtctccagatgaatttcacccagtcccagagacgatttccaggattaggattaggagatattccccacgggaaagctctccataagtgagaagcccagttacaagtaagaaataagtgttccagtgtttcctcactacccccacataaagggcacgacacatcctcaatggtcagacgtttagccagaatagcacgaacagggatggcctttgaaagaatacaccaccatagcattttgtgccgctctaagattttactgttccacaacctattctagagggtaggagctacatcaacacgtggcattctgtcaaacgcttggattatgtaagcagatttactagaaaatcgaccattgctctctttcgcccagatccacctatccggttcctgacccgagggtttaccccctttaagaatagccacaaccgtctctttttcaaacaaaaggtttaatttccggacatcccaatccccatcatcagaaaggagatcaaagactttacgatgcatcgactaaccatcagctctagccctaggaatgaagtccctaccatgcggaatccaggggtcatcccaaattctcgtattcttcccgtcccctatcactttacaggcccctttacgcaaaatagtcttagacttaaccacgtttttccaaaaccaggagtcagagtctttatactggcaagataagaaatcttttcctctaaggtactttgcttccaatattttgcaacagagggactggcaaccaattaaaagattccacccccacttagccaagaaagcaaggttcatttcttttgttttccgaaatcccagccccccacgggatttgggaagacacaacttatcccaagccttgagatgcatgccctggttacctttctcgaaaccccaccagaaatcacgcaccatgccatcaatcttatgcatgagatgatttgaaagtttcgtggtttgcatcgcataacaaggcatggccaaacccactgatttgataagagttgtctgaccagctttcgagagagatttaactttccaaccctacagcttcaaagtcaggttatccaaaatggaattataatcaacatccttttgtctagacctaaacaggggaagccccagatacctagtattcgtaacaaggtcactagtacccaggttcgttttaatgtcggttttaacctaatccgacgtgtttttgctaaaaaagatggacgtttttagcctattgatttgctggccagaccacgaacaaaactcatccagacagttccacactcccctagcttcatcaacattagccctcccaaccagaatgaggtcatccgtaaaaagatatgagtgagagtcggacctttattgcttagtctgatacctttaataacccacttctccaaagcctcattcaacacataagagagcatttcagccgcgcaaatgaatagataaggagaaagagggtcaccctggcgcagaccacaaaggggtttaatctttccaacttgacccccattaaggcacacatttagggtagtggtagtaatacactgatccacccagttacagaactgcactagggtatcatagcactggagcacatgtctaatgaactaccaactcaacatgtcataagccttcatcaaataaattttaatggcgaaggtgttaggttttatgccctaaataaaactccgtttcaatgtaatctattttattcaacatcaataaagaaacaga

SEQ ID NO: 110440 - DNA, 12736 bp, Cannabis sativa
ggcagtatttttgtaaagattaaggaaaaagtcaatatttttgtaaatttccttctatttttatttatattcatattcgcatttttattcttatttttattttttatgttttcattcccaaatgattttatattctgttggagttttatgggtacccttctttttatttttttgaaaagaaaaatggaataagtacacgcatgaaagatgggaactataatccactctcccttatttttgaaaaataaaagcgtttatctacaacaaccagattatacctctaagtcattacaaataatgttcttaagaattgaggatacatttattgttttgcttcttcgatactttaccaatattgcgttaaatatgcagctgaatacaacttgtgtatttgtgtaaagattggatatcacagactcacagtatgtactgtctgctgagaacacgttgttggctggtctcagatatgaaagctgtaccattgaaaacacggtaagataataacttcccaaggagagatgtaaacaaatgttgtgcaaaccaagaaattgtattgaatgccatttaatgaggtaaaactaaaacacatttctgtcagccgtttgatcttcatcaggtggccataaacaatcagtagcacagaattgcagtgcagagcaggccatagaatttcattgacatctttcttatctttctttagtctcttttggtgtgtgtgtgtaatcttacgcacaaaatatatctataaaacagcaagctttccaccctacaaaccagcggaaaggctaaaaataagtgataaaggaagacatatcaagcaggggtgatgaagaaaatgctgtctgcaccaattgtggtgctgctggtattgtggctgatgatgtctccagcgctggcatgttcatatgatggtagtcgatgcaaagactgcattcttaagcagatgaggtgtggttgcccctcgtgtgttccggtgctccgctgcatggccaagtgcttgtgggggggcagctccagggccaactgcattcagcgctgtaactgtggcagaaatggcaatccaaaactctctgattgtaagaaatgcatgtccaaatgcaagtgtagctgcatgtcttagatgagtaacttccccatttcgtctatgtatgtttctaatgttactttggtatctgtaatattggatcatttagctatttctgaaccccaattaatttcaaatgaataatttaactggaaatgttcattcataaccaaaagatagatgttgtggattcattactatataatttcaacttcatagagttacagaattttcaaaaacaagttatatacactaaaaacattttatcacttattttgaccaaaaaaatcacttgttatgcacaccctacagcttaaatatatatattaataaaactcaagggcatttaagataattccaattttaaaatagggatgctaatttccaaattgatcacaggtcaggcaacctcgtactttcttgttgttatggttcttttatagtcctgtctttagcaaggatcttcattgtgaagtcccttagttgttttgccactgaagaagattctccttagtctgcatgattgtcttgttattaatttatagatggagggatgatcccatgctactagagaaaactggtcagcatattcgtccactccttccactagcaactgccaaatcaaggctccagcccctgcttccctcttcttagcagattcatagactctatcatatacagtctttaacaacaggtttgtgtcttctggtgtcttattcatacgtaaggaagagccgaattcagtgattaaaacaggtttcttcagcacatgctccccgtcgcttatatgagaatccacccaacgagaaagaaaattcatttttgcttcagaatcacctttttggatcctgcaaaaaagccaaaaaaaattaactaaaagtttaactagaacagaaatgctttttttttctttctttaacaaatgaattaaggaaagtactgactactgagtatccagattaatgaaactcactcaccagctatcagggtaagcatgaacagaagcaaaatcaatgttgtcgactgctgaattttgaatgaaatctgatccaagtgaggctgcccattcaccaggattcactttagatctttcagtagtttttggaccataaaacccctcgattccaacagtcagaagatgtttttcatctagactcttgacatatgcagccatctctgtgatccatgcctgtttttctcaagatatttaagaacaaaaaagtctcaatattagtttccgctttgtgttatatgcttagaaaaatgaattcttttctttacttggttttggtcattctttacttttagcttggttatttatatttacctgaagaacaggagcagatgaattggataaacacctaggctcatttataagctcccaagcaaagatagcagggtcctcggagtatttaactccagtaagtgaattttttcttgttaaaattgcctgtaaaataaatgcagaaggcaagttaagcatttgatcaaccttttttttacctttcttttctcggctaaattgcagaatcaaacttctgaaatactcgaaattaaaacatgaataatgacagaaaaaaaaacagctacccagggaaacagacttggatatattattctaatatcatgctgagttccaaaaaaagttattgaagtaacaatcttgctgatccaaaaaaatgtatgttagcaactgagaaacagaagaattctggggaacagacttagatattaatattattctaagatctgattttttctatttaaaatcatcaacaatcacagttctcctgaacagctctattagaagtatgtacatattgctaagaagttaaactactttagaatcccatatcaccttttccatttgaacacttgtgttatcaacacatgagcgctaaaatgtagaattaagcataatttgatgtaaatattacttctcaaacttgtctaatcacttccaattgtaattagcagaatccgaggtacaatgaagttgaagtcaaggaaacttaccttgatataagccttgtagtaatccttaacagtggggtgtgagaaaaatgaatcatcagtttgagaaacattaacaccagcttcttctgcccacctgacatactgagttttcccaccaaaagcatttagattattaacaagactcaaaatcaaccttaacttgttcttcctcgcttcaacgatcacataatccaaggcctgcaattcccataaaaacttaatagtaaataaaaaagaaaaaagaaaagttcaaacaaacaaaactttcagagagactgactgacacacgaacccgaaagactctttcgttgaagaccccaggtgaggtctgcagagcactggacccataaccatcgctgaaagcccaagtcctgcaaactgttaaacccatttgagctcccattctcagcatcttcgacaccttggatcgagacgaaacccaaatactcttctccatcaaccaatacgagttccacccattaacgtaaatttctgaatagttccctccgtggtcgtcttctgcaaccacgaaatgggttgagttggtgccgacaaaggccattttgggttgccatagaactggaaagctgagctggtcgctgaagtttaagtagagaagagtggtgaatgagattatacccagaaaaggaaagagaattctatctctccaatcggcctccatctcttcctttacttcctcttcgtctttgtttggaaatggcgcacgttagtcgaactaagcctttactgtactcgtgatgcgcattacgcactctcttttttcctcttgtaaaatggcttccctaaacgcgtaggtgctacctactaattaaattacccagcttgccgacgacttagaatgcatccaatttcagtggtgccccatgacacgtgtgaattaaccaattgtgattttgacatgaaactcattaagtttcaataacagcataaatataaatagatttaagaaactctttcctttttctggctttgtgacaccattttacatgtaaatggattataatttgaagatattataaagattcaccctaaactcaatacctaaaatgaatgacattattgcatatgggcaagtccttttccttccattttaagggtaacacaaactcgtgatctgttgtccaataagtagtagtactgaacatttaaagaagaggaaaaagaaaaggaacagttaaacaagacaatattccacaacaactacatctacattatatacacagttagcaggagaatcattttttattctatgagatctgtttagtacattactacaagtgtacaaaggcttgaaaacacgtgtcgacgacaaaagctgccatctaaactgaattgagtaggttgtaacacagaggatccagatccaatcagggctcgcgcagaaacctctggaggcaacgaaacccaagatgctcagcgcagaacctctccaattcatcgcctccggtgctcttgcaaacgtcctcctccatttccgccagtatttcgtcccaatttctcgtaaacccatcgtacccccagaaataggactgtccatcttctacctttgattctgtaatcgcgtccagtatctcctgcatccccacaatccggcgacttactttcctcctcgcctcacgcaccgccgggtcccaccccggcaccgagtccagcctcagtagaagagccatcagggcctcgttcatcctcagcttctcccgctcgtcgctcctgatggcatccaccgtgtcctgccgttggattactcgttggagttcatcggctgccgaatcaacggacgagattgttctgtggagggttcgaatcctgtgggcacgataggcggattgaatcttggtggctgcgggtgcggaattgggttgggtttgctgtgggaggtgaacggtgattgggatgggagcttctgtggaatggacggggacggcgttggttgtggagtttgattgggaggtaggggtagtttggtcattgtggaaagtgtaagtgacggtggtggagtagaagcttcctctgtgagagtgtgtcattatttaatttttctttagtttgtgctaagtggtaagtaaggaacagagtgagtaagaaaggaatgtgagaaataatattatcgaagattggaaaagtgattttttgaaatataaaagtgtaatgactagcaaacaacagtagaaggatgaggtttcttgaattctcttggcgcgtaatagacatggctggcgtgtgcaccgttttgtttagtatgaaccagcatgtaagatctgcttttggcacacgctaaaaaatcctctctttttgggtctgatatttatattataatttataaagaaaagggagcaagagaatcccgcttcagtttctttaaaattttaaagttaaaccatgtcaatattagaccatgtttggcttgaaagacctcaatcttataataattcctatatagcaacctttctctctcactttaaactaataaattaatcaattgattgttgttcaatctaaaattaatattggagtcatatgattcagtactgtaaataaactgtcgcgaatatatgaactctaacgtgttccccagcatgtatttgacggtcagatatatcattacatctaattgtaatagtcatatatacgtacgcaggactcactttgttcgggaatatattcaaatttgtccatgatgttagttaccactagtacgtaaaaatcaaatatagacttttcatccttggtagatagaaactacgctaccaaacttttatcgaatttatcgattaggcaacagttcattcggcagagtcatgtagaaaaacaatacctaaatctaatgatgacaagacacttaaatgataaaatgaagccattttgaagaatccaatccaacacttgatagcatcatcaaggcaatggaggaacaatcttccctgagcaggtgccgaacccaatggtgtattcatctccctgcaatgttcgtacacatatacatatttcagtcacagcattttgaaggattatttatgatgcaatcataacatcaaacaaactactcacatctcaattctcaaagcataatgcataataaactaacggacatctattctttattttaacaaatattcactaattgaagatattagtacctaatttgctttacattaattttcttctgtataactattctcaaacattttttcaaccagaatcggactctggtcatggtctcttaagatctcttttaagtagacatcacatgtaatctaacagtttaaggcataagcaaaagttgcgacccactactagtggttaaagtcctatttgaaacaaatgaagtgctatcaaaatagtctagctttttcctctttttctttttatcgaaaagggggttcattaattatgaacactaactctgaaagtgatatattcatgcacacagcacagctagagatatctattctatgatgtggaaatatatattgctgtcatcatcattctttatatttccaggaaaaagaaaataatcattaaaaaatttcaggaaaaaaatgaagagaggtcttagtgaatcgagaaccttgcaaaaaccagtgatgataacttcatcaccatcttctaggaatttacgggtcgcccctttcagtgatattgtcttctgtccattccatgacaactctaacaaacatcccaaggaatctggctcctgtttgaacatacaacactcagaatgattaacctaaatcaaaacaatagaagtgcaaagctgaagccagattcatatgaaattatcaacacaaaattattattattattgacgtcaacacaacaattatatacatataaaagtactgaaaccatacaggtccactaatggttccagttcccaggatatcgccaggtctcaagttgcaaccgttaatagtatgatgagctatctgttgtgtcaatgtccaatatctgtaacatgagtttaccaaaataaatattagagggaagttttggccatcatgtaaaaacatatacaagcggattttaagacattcttaaaagaaaacatcaaaaaagcggctcgacataacatataagacaccgtttgtcaaactgaagtatgtcttatatgattccaatttgagcatataaccaaccaaaagaacgcttgaagaaatccagattgaggcaatagagaaataattgggtacataatctactatgtaatggaattaatgggtgcttacaaatgtttgaaattactctttgtgaccacagttgaatcctctacgccagcaggcttgatctcaacctagcaagaacatgcatttaatcatgacccaaataatgctgtagaaaaattagttgcacataagcacttgtttaagattacagctaaatacctctaactgaatgtcataatttctagagactttttcagccagataaggcaatggaaggggatcctgccatttaaagcgcacatcatacagcataaaaaagttatcacaattttattattttattaactggtgtttagcttctgaagctattaaacaattacgaacctgtttgggagcagcacaagcaaaaggttctagagcttcaaggctcacaatccaaggagatatagtagtgcctgaaatattttgaaaagataaagttaggtaaatcctgctatgctaacccacatgctataacagcgtcactgaaaacagagaattcagacatatatttataaaattagttcttaccaaaacttttaccaagaaatggcccaagaggaacatattcccacgcctgaatgtctcttgctgtcaaaaccatcatgtgtcaagcagcatataaaatggataacaacaccgagagacttaaaactacgtaagaaaatgtataccactccagtcattcatcagcacaagtccaaaaatatgatctgctgcctcgttgacattcacaggctttccaagttcatttcctgaaccaactacagcagcctacaagcaatcaagagaatccgtgcataacaaaaagcaaatgaacagttcagcgaatcattagcaaaaagtaaaaaatagtaatttgttctatcaaatgttgagcagaacaaagacaggttttccttattgtaaaacttttaccatttccaattcataatctaacttcagtgtcggaccaaaatatggtggagaggttccacttggatagccttgacctctgtaacccaaaaaataaaaagtaaccatatgaaaagaatccttataaaacatgatgactagttcaatctaaaaactaaactaggaaaacattgtagtctatcaaaatgattgtttgccacaaaaaaatgcttcagtatccatctgtgatcatttttcaatttctaatctactctaaataaaattgattcaaacttaaaactgtctcatacagactttcccagcagaaagtgaagaggttgcacagatccaggcatattttttcgtgttgcaagcaatatcatagtgattaagtcaagatagattgtaggtaatgcatgatggaaaataattatgtataatgaagctatatatattaaattcccctactctttcttttttctgccgtgtttggtagttacgggaaaaaataactcaaggaaaataactttaatcgtacctacttttagtagaaggactgaaaactcatgctaagaaaataaagaataacaaagcatagtgaaatggagaagaggggatgtggtgagagatagagagagaaattggatcggaatttagagcgagagagtgagggctggagcaaaagtaaagtaacgattctaattacattccatgatcttaattctcataaattatagttcagcttttgtccatgttttccctgtatgatacctttttcttttttaaccaattaccaaacaagactaacaaagcattgaataaacaaagagaaaacagtgaacatactaacctcggtcgaataatgtctgttccagagattacaacagatgatgctctcccatggtatgcaatgggaaggtgaaacctggacaacagtgaaatgacttcacgaacttgaaaatgtaaattttttcttttaaaatggatgaaaaagtataatttatataaataaatatatgttatatgaacacacacacacacacaaagccttaaaatgtaaattaaaaacaataccaattgggtggaattgcattctccggtccacgaaacatggttccacaattctttgcatgatgcattgaggaaaagaaatctgtgtaatcccctacggcaataggaagaagcaattccaccttgttctgagcaaatggaccagttataggttatgatcacaattaaaatatcttcatatcgatcgtgtaatcaaaataataataatagaatgtaatatatataaatatatatatatatattaccattggaacgagtgctttctgcctcaaatttgcattatcacgtaattttggttcagtagctgcatcaaaataataaatatataaattgatatgagcctttctataatctctagattttctttttttgtactatgtataattgtaaaattaaaaaaacttaaactggacagtatattaacgcttagctaacatgataatagcttttgcagagtaattcgagattccttccatgcaggtcgtcccaatgccaacaacttgtttagattaggctaccaagggaaaaaaggaaaactcaaaatcaacaaataaacttggagtggaaaacgaaactccattttgcatttaagtggctaagaaaccaaatagtaatttccattgttgatttaacttaatactaatacaacagcaccattacccaaattataatacatacacgaaaagcatattttgcgagattaaccaaacaaacctgctgaaaacaatcggagttcttgagaatcggaccatcgaatagaccagcggaggcgatctcggagaggtcgaggacgtagtcaccaattgctacgcccggtcgaggagctgaacttggctcaggcttgaatactccaaagggaagattctgtatggggaagtgagaattgggaagaacatcgatgaaggacttcagagccatggggttggttgatggttctcggggaaacggcgtcgtatgccggtgaagtgagcagtgataagtgagtgtaactaatctgttggtgtttggagtatttttatactaataatatttgtgctattctttttttcttcaggggaggttgttgtgcttgttacagaccctcgtgtacaccaataatttctatcttctcacttcagtaaaatgacgaaaatgctcctataaaactttaatagctacattaatttcgtattaatagctacatttctaaagtcgggaattacaccattatagctttccaaaaaaaaaattacaacattatttctagaaagacgtaataaaaaaaataaaaaaatagattgtagatataaaagttcattaggatataataaaagttttgaaaaattttactatgcacccttttcaaatatgtatattgatgtattctaatctgttttggtatttagaaaaaaaattactctaaattattttatggttgtatactttatagttatttagtacattttacaaaattttaattttaacacgtcgaaaataaaatttaaaaaaattatttttttattttatacgagtgtgaaataaatggtttaaatattgatttctaaattttaaattatttcgaacaaagtataaagtataaatatgattataaaaaagttaaaccgaaaaattctttaaaatgtcaaaaatagttagggaagcagcctaaagtttataaatttttataagggctatttggtgtataatgatacttttggtattacgtcagtggcaaaacaaaaggataggcatttttgcctccagtggtcgagtcatttccttttcgtttatcactattttaaattttaattttaattttaattgttcttcaatcttcattctcataattttggcttcaaaattattgacgtcagcataactatcccgataaaatgaacatgttcttttgattctattaattacaaaaaaaaaaagcttgtgattatttttttaaaaaaaaaaaaaagttaaattagagaaaaagatgtcaaacatctaaaaaaatagttttaaaaattatatgaaatttgaaatttgataaaaaaaagttataaagatatggtacttataagtttgtcactctcatatagtatttttcacatttaaagtttttttatggtatttgatttatattttgtttttagctcaattaattttattttttttattattattattattttacatttacattttagggtttttatttttttatttttttcttgaactctaatatttttagcgagtttgtgggttttgtgtttgcttgggctattatttaattatttctgggtttgtttggtacgctataatacattgtattgtattgtatagtttatattgaattgtataatttatacaatatttttatgtaaaactatatgtgttattaacttttatagatacctaaatatataatattttagtataaaataaaatttaatataatattatataaaaatataatatataatctaatacaatacactacaatacgacataatacgacgttccaaacgagtccagagtgtataattttaactcacccctatttttttgttttttatatatgatttctttctctcttttatttttttggttattttttttatagtttttattgtgtttttttctccttgattttctttgtttctttttttctttttgatttttatttttgattctctttgttatttttgctctatattgtatgtttaaatcaactttgatttttgagcaagcaaatataaaattaactagaatagagaatgaagttagaaatttggttattaggtattgatataaaatttatatgttcgaaactggtttttaaagttagtatcgtttttaaagtttagttattaggcattgtgtatttttcattatgttttgataaaattactttttttctgcctcttttaatgaaataattagtttattttaatgttgatggaactggtttttaaaattagtattgtattatatttattttcattatcttgttgatgaaactgattttttttatgtttcttttaatgaaattattagttatctttaatgttgagaaactggtttttaaaatttgtatccttttcatattatatttttgtattgtgtttttttttttagtataatattggggtaaaactagttttttttttttttgttacttttaatgttagtgaaacttctttttgaagttggtatacgtttttacattattatttttttatataaaacttgttttagtttgtgattctcttggtccttggagatatttactctatactgaatgcttaaatttttgagcaaacaactaagagatttaatgtcaaaatagagtatgaagttagaaatttaagtattaggtatttatataaatttagggtgcgtttggtaacacttttttaattagttttttgtttttaaaagtagaaaagtgaaaatattttttaaaatcatgttctat

SEQ ID NO: 110441 - DNA, 17105 bp, Cannabis sativa
aattacatggtcagacaaacatgacaaattgtgtaattacctccaattacacagaaattcaattacattgtggctttccaaatgcacccttattgtagaaagaataatatgaatattgttatttttcaaaacacaaattccaaattcggtaatactttattattacattggaaaagaaaaattacacacataaatctaaatacgatgtcaatttcctattttaatatctttttcgattggaaaatttgattaataatacataaaaaaatcctcactatcaaaatttataactttcgataagaggaaattagattctataccttttttatattgtcctcttttatttttactctttttttttaaagtctatcatttttacctctctcttaaaacaaaaattaggattccaaatttatcagattaaatagaaattctcattatgttgtattacgggcttcatgtttaatttatttatttctctcatttttgttcaatgtatatatgtgtaaaaataaatatgacttgttggacatttttttgttgcatgtttctttgatttgatcaactaaaacccaacagcttgactcctgttattttagggaatagttttgcttaattaactatagtccctccattagtgaggtacattgcaattaacattttttgggttaatccgatctaacacacaaaccaataaataaaattatattttattgtaaaaggatatgaattttttgttcttaagctaaaataatttgaaaaatcttaattaatagcattgattcaattaccaaatcttattatgggatcgaaaatctcagctgttgtaacataagctaaactctaatatattgactcgtagactaaagttaaactgagctgattttactaaataaacatttacctaaaaataattatattaacttggcatttaatttaacacaattattttctaataaataaaaagtataaataaatggaagttgaattcaattagaattaagtttgagaattgattaaaatagtaataaatggtactaatcactccaagcctaaagtaaaacaaaagaaataaatggtactagtactactcacttattttgtatttatcttttctaaattaggatttgagcgccaaacacaacttttcacaacccccaaaaataacataccaaaccaaacaaacacacaagagggaatgtgaaaattttcgatgacgtcaccttcaccagccagcgcaccaaataaattaaaaaattaaaaacgacgagtccaaacacacagctctccaagaagacgaatttacccctctccttacactcctttcacttgtcgttgcagggttacttttgtaaattcactcactaaaacttcccaaagaaagaccacctcgctactctctttctttcaccactcgcttctctcccaactcagatttctctcttttgactctcccaactcaactcgctccctcctctgatctccgactcggcttcgcctgactcagttcccgccgactcatactccgtcaccgccttccccccctctctctccctctatacaattttcacttcttatttcaatcgaacgatcgatactaccacctttcctagggttttctccaaccaaccacctgttttgcttcagctgatcgtttcgacgccaactgtggtgtttcttctgctgaattcttcctctcgacgaatttcttttgagatctgaatttgatttgagcttcggtgagcaaatttagcaagtaacgaatggtgtatcgattcctttttgggaaactagggttactctggtgtatcacgtaagattttgttgatttggaagcttctgagctcgattttgttggattgggatacgaagaagatggcgtaaaggctgaatgttctttatttattcgggataatttgtatgcaggtgtaatttggcggtggaagtcgagaattgtagaattttctttttaaattaaacaagtttagttgtatgaaattaagggttttactggtggaataaggtggggaggaatttaggaaaatgttttactctcagtttatattggccaagaaaggtcctcttgggacgatatggattgcggctcatttggagaggaagctccgcaagaatcaggttgcagataccgatatcggagtttcagtgggttagttactcttttccttttatattctgtttcaattctcttattaacttgagaaaattagagggaatctattattttgattatcttaaatttgcgtaagaataggtcagattactattggagaaaattagttgactttaaaaattgggtgttactgatatatgatgatgatatgtgtgcatagtgatgggatttatacaaaatataattgcccaattgaattttatgtccagtgaaggttttgttttgttgaatctactcttaaatgcgatttctgggtttctttgcattggtgttgcacgctttatttttgtcgtcttttataatattcaattcggcaattatattttgttacagtacttttcactggacataaaatttctgtttggaatgtattggtccaacttctgagaacatttgtattgtagtatcttttatgggattttgtttacattgtgttatcatagttcttttggatcgttataaggaaattcaagtttaatacgaggggttttatggaaggaaaaaaaataggagtgcttaaatttaaaaaaatgaattgtgagctgagcccccattaccaaaaatgacttttttacgttttgtttatctaatatttagatccattgtccttacaaaatatttggatccattgtccttatatttagatccattgcatattaatgtaattttccatgaaatgagggaagaggtgggtcattttggggaaattaacattaaagataaatgggtgggcttttaatcatggaaaaataaaaattaagaaccaataattatttaattaatataaatgtggaaaaaaccaaagcttcttatccacacttatgtgaactgaacttgagcgaattgtgaccgactgccgaatatatatatataaagaaacaaatcttgtattaattatgaactaatgcaagaggcttaaacaaggtaattcaaatatgatactctttacatttatatttatataatatcttcatccatttgatttagtgcgaggcttatcattttcttgttttattttattgtcagtgtttgttttccctggaaatgttcttcaatattgataataccataattattctccatatcattaccatcttcatgctttctaagataccatgtcgctgtatgggcttacagttttaaagactttagactttagaggtgtaatgttctctgatttgggtagggactgggattgcctgctgtaaaattctagcctttttgcctctgtttacgtgattttttcaccacttttgccccccctgcttattctcaagttctgtttcaattaaaatatatatgctaattcatttgctttattttcattggacagattcaattctgtcaactgatgttcctatagcactccggttgtctagccatcttttacttggagttgttaggatatattcaagaaaggtgaattaccttttcgatgattgcagtgaggctttgcttaagataaagcaagcttttcgttccactgctgttgatttgcctccagaagaatccactgcaccatatcattccatcaccttgccagagacttttgatcttgatgattttgagctcccagataatgaatttcaggggtcagttctttcttatctgaaattaataataaagtgccagtttagatcattacactcatgcgaaacaacctaaattactgacaagtgactttcttgcagtaactacgttgatcatcacgttagtgcaagagatcagattacacttcaagataccatggaaggtgttgtttactcaacatctcagttcggattggatggttagtattttgtttttaattgcatgatgattgttgtaattgaaaatggggtatcatgatataagttcctagacttatttgagcttatggggtatagtttgagtttatttttggatagtttctgtgacagttgttaattagttgagtatagttggtagttttatttctcttgcagatatcttgttggaatttcttttcattttccccagtggagagggtttacataaaaaagttaatttctttttttttgtttgatatctattactttttatagaaagagatgtctgtcagggaataaatggctgctttaagaaataaaataaaacaaccaattattgatagctatgagttataaatttaaactgaaatctctaacatctcgtggtgtgttattagagcgatttggcgacggtgatacttctcaaattggttttgacctagatgaggtaactttttattgtaatttttttttaattaaattttgttggttactcaagataccatcgaaggtgttgtttattcaccatattcttgtttttttttttcaaaaaataaaaataaaaaataaaatacactgatacatgtatagtagtctaacaatatgattgtttctaaataaaacccttaagaaataccaaaccttccataatacatgaattgaaatagttttttcttacaaaaatagtgcacacctaaaatcattactgataaaattatttcttttctttgacatggatgtgtttcaacttggtctggagaaaatataaaggttgtgtttcttataaaaatatataaaattggttgtggtttacaatatcaatgggctggttttacgcttaataagttaaggctgctataatacttaaaaaaaagttattgaactaagatttgaaatgctgatcagacttcagagtgaaggacagttgtgaaataagaagtaaatacaaaagaagatgtttatacattataaacacgccttaggagtgtgtgaaaaatcagaagttaggcaagaaacttatcacggactgtttaattgcttgaatatagccaacttgtagttgttttctttttttaaacagcgaataggatgctttttctttgtataaaaaaattgagatgatgtgtagatatggatgttttgtccctgatttgttgaatgttataatagtgtgctctctccgttgcattgatatcattttttttttgttttttggatctgttttgtacattaagatttctagctttatttagtttgagtgctttctatttttcatttgtaaagtgccaaactaaattcctttgaattgcctcaaacaggacattttcctcgacaaggttgctgcccaaacgaatgacggaattccagagtaagctttttaatatataactctgtactttctgtatttagtatttttaatttttctgtcacctcaactctctctctagtgttaagtctgttacttgtcgggctggatggtgttggctgattatagcaatcttgttccttttatcagtgatgatctgcaggtgtcagctcctccaatgacacctgaagaaaaagaggaaatgcgtgaggacattgaggggttgcctggaactacagaaataatggatttggatggcgctggggaccaggttgaccaactatgcccaaaatttatactgctttctcttttctcatgttgtatgcctatttctttttctgtgttagtggtggtgggcgggtggggaaatattgctagatttgtatatatatatgtactttaattttaaatggcgtggaatgtggtgatcattgctatttgttggtctttgggggattgaatgaaatagtggagtttttgaagatttagaaggaaacttgagtctttatgggatagagtaagtgctggatggttcatttgctagtttattcattcttacgattttagagactttttttcttaaaaaaaaattaacatataaaatatattttatatatatcaggatctctttctgttcctttgtaaaaaaaatttttcgataagaaaaagatttgaggatgtacattcacacacataaattttatttatcacatcgcatttttactgatttttttgtggataaatatattgcttgtgggttagattgaagttccagatgcaaatatagaagctttcgaccatgctgctgaggatccatctactcctggattcatggaacatccaagcccgtctaaggctgaggagcctatgaactttgatggtcacatggaatcaaaagatctgaactttgatggtcacatggaatcaaaagatctgaactttgatggtcacatggcatcaaaagatctgaactttgagggtcacttggaatcaaaagatcatgattttacaacatttgaaggcccagaagatacagaaaatgctgttagtaagtgtgatgcccatgaaactattgctcctttggagaatggctgcctttcaagtgatgtggagatgcaacaggcaaatttgcagcttcatttagcatctattccagttactacagagaacagtcatttagcatctattccagttactacagagaacagtcatttatcatctattccagttactacagagaacatctctgcagataatggggtttcagcaccatcggctgttgttgagcatgataaacctattcctctagctccagagtgctcaaatggaaacaatagtgcagtgggcggtccaatcagggtggaagaaatacacaatggtgttgttatagatgaaagaactagacacaccggaacaaatgtacaattccctcaatctcctggagctagattggatgaaactgttgcatctcctagttgctcccaggtgaccacagaactggaggatcctggtcgtcagactttgtcaattgatgttgaaactcacaacatgggagaatcatgctctcttaacaatgcattgttaacaaatgttgtttgtccacccgagtcacccgggagaccagaggttgtgaatgttgaaggtcagacctctcaagagccaaaagaaacaaatactttgagtcattttactcatgatttcatggcatctaataattatcctggactccatgcctgcactcagaaaggtcctgatatgtcatcttttggaggtaaaattcagcctttcttcccaattaccatctgtgattgtttgtgaactgtaggaacatataaaggagaaaggaggagtttgcaatttatatgacttaattctgttttgcaggtaacgagagccattcaattgatcttatgagacaggagactggaaataattttactttgagtcattttactcatgatttcatggcatcgaataattttcctggacttcgtggctgcactcagaaagaacctgatatgtcatattttggaggtaaaattcagcctttccacccaattaccatctgtgattgtttgtaaactgtgggaacatataaaggagaaaggagtgtttgcaatccatattttgggattgtctatttaggtgcagtttatatgacttattctttcttgcaggtgaccagagccattcaattgatcatatgggacgggacacagtaaataaacatcttcctgaacctgcattatgtgaagagactccagttgaccgcagacagttgaatttagaaatgcataacgtggcatctcgtgatattcagctagagaattttaacagatctgcagcttcagacttacctgcccctgaaaggctgctgtttgtgtctgaagggctttttagtaaaccaaatgatttgttcatggagtccacacctagggttgatgagtttggtggtggatttagaaatgcaccagttgaccgcaggcagttggatttagaaatgcataatgtagcatctcgtgatattcagctagagaattttaacagatctgcagcttcagacttacctgcccctgaaaggttgctctttgtgtctgaagggcattttagtaaaccaaatgatttgttcatggagtccacacctagggttgatgagattggtggtgggatcaaacttacggcaggacagaaacgtagcttcacggagagtactttgactgtacatagtttaaactcgagtgactcatttaatatgaccaagttcatgagaactgcagaatccgttccggatgataatgatttgctgtcttctatcctaggtattgaagtggacttgtttattgtcttattttgtttgacttgtcagatgagttgattaatatttcgtattattttggcaaattcatgctgatgtacttaatagaagttctgactaaattgtatttcttgttgcatcagttggaagaaaatcttcagttttgaagatgaagcccactccacctgtacctgaaaaaaaaccgaaacgccctcggtccactccccgtgctagtgccaagaagagaaaagtgcttatggatgatatgatggttctacatggcgagtatgttttagtttgcacgcttgtgacctatttcatttgctaagcttcacttttaaatctgtcatgttggttctaaggtggcatttggttggaggtaatgaaacggaatggaatggaaaggaaacaattttcattccattcatttgttcggttgcattttaaagtattggaatgtcctttccactattttggtagaatgactattccattttgaattggaaagaaagaccatttctaggtggcattctcccaaccaaatgccacctaagaatttgagttaaataccaagttgtgcagtctctacttgactgtacagggaaagagtttgtacttgactacagtgggggccagtctaacacgagtggcccctttctcgttttcttaaaaaaagtgcaggctctttccctgcaaaaaagaagtgcaaacctctttcgagtacaaacccttttggacatggaaaccattgtttgctctaactgggaaaatgaaacaaccttgtgtatgagtgtgtttgggtaattagttggggggagagttaacgaatcatacttgacataactttgtaagagagctttagaaacatgggtcaactgactgacaatgctgtccagaaaaagtggttgatagttgatttaatcatatatcctgtagtctatgtctaactaatttaccatgaaatttagcgtatattttcttgtagtaagttatatactaccataaatcaactattttgactcaaacatctcacttttcttcttcctttttctgttttttgaagtataatacgacaacaattgacaagtacagaagacatacgtcgcctgcgtaagaaagctccctgtactagccaagaaatttcattgattcaaagacaattcttagaggaagaaatttttaatcaacccagttttactggtgagttattagtgtttgaattgatattttaggttactttactttattatgttcgtttgcatctggttcattaaacataaaaaagatctataatgactgtcttttcatggaatattttgctctttctcattcaacttacttattgcaccataagtcccttctgttattgacattggtctttctactacatgagccctttaaccttttatccaatttttgcattgcatataaactttgggtagagtttttcataatatcctccaagtttgttgagttggtttttactcgtgtttcaggtatgtccacagcactgatatttttgcaccatgagaaatttgatttgactgggttaagggtgtatgaaaatgatccatacaatggtcctgttgaaccagcaaaggatgtagtagagccttctgttttggtccaaagaaatttggaaacacaaactgttaacattcctattcaaagtgagattcagcatactgctgttttggtccaaagtgatttcgaaacacaaactgttaacattcctattcaaagcgagattcagcatactggaaacagtgacttcagatctcaacatgaaaaaatgggacttggtgtacaaaatagtgaagttgttgctgatgcagcaaatcattctattaaccggatagagtcatcaattcaaatcaaacttaattctattgatattgccaacaacatgacagaaaacactgttcaagcagatcttgtggataagagtaacgatgtagatgcttctgtactgatggaggcatcatgcatgtacccacagaggtttgaaactgagcctattgaggaaacatcactagcggacacaagtaacgggagacttgatgctattgaatgtagtgtagatcctgagaaagataatggcaatttacatgcctcccttgatgtggcatctgtggaatctgaggggtatgatattaatatgcttcctgggtctggagatcaagctgtggaagtacatgaaaacattgatttaagtgttatgaatccagatgaggtccaggcaccagaagaaggatgtgaaggcaaggatttggcttctagctgtatgcaagctgatggagcaaacttagatttaactctacccttagagccaaatgtggatgaagagaatgcaagctgtatgcaagctgatggagcgaacttagatttaactctacccttagagccaaatgtggatgtagaaaatgcaagctgtatgcaagctgatggagcgaacttagattcaactctacccttagaaccaattgtggatgtagaaaatgctcctttgaatgaagaagagaatacagacgtgaaggaaagtgatctaccgagtgccttaaatgaagaagcaacaactgctgaggattctgcagtggagcttcgtgatgtatgttattcttcatgatttctctgtctcgttaattctttgtttcctcctgagatgcttactcatctatttctctttatgtttccgagttgcttactcagttatggcctatattttgcaggattatgaagaagatgtcttatacgataatgacacaggtttaattctctttcttcttgattttttcttgggagaaattttttaatctgtcccagttggtcatttcatgtttagaacctgcattgattaatcatattcccaagtagcccttgaagaattgtgtgttaatttgttttcatttggaagagagatgctgtcacggtctggtgatatggtgctactgtataaatctttgataaaatttgcctgctcttctgttgatgctatttcttgctgcaataccaatatagtcgagtcacattttgtctggtgcattgttttctaatttcttaggtttttgtgatcataatttatttattttttcttcccctcagaatttttgaatgtagacgatgatgacgtagaagaagactacgatgatgataatttgccaggtgctgaagatcctcgtcttcttgaaaacagtggatggtcttctcgaacgcggtaatattccttgatcatatttagtaatgtgaaacaatatgtcatctcctgtttgttggtctacttcctaaatctaatgctaagttctagaaacatctcttttttttttgtatgaattatcatcatcatcatcatcggtggagggaaactatctttaacaaactctttctctggtgctttcgtgtatagggccgttgctaagtatctccaaaccttatttgataaggaatctgtgcctggaaagagagttctcccaatggacaatctattaatggggaagactcgcaaggaagcatcaaggatgtttttcgagacactggtaagtagtaatcaaggactaaatatgctgcagtgcatatgttaaatttctctttatgtcatattgattcatatgttaataataataataataataataataataataattgcaggttctaaagacaaaggattacatcgatgtagagcaagcaatgccgtttgacaacatcaatgtaaagcctagaataaagctcatgaaatccgacttctgagaatcttacaataggaaaaaggcaagaagatacagtttgatacgtagtttggctcatgatatattatgatgatgatgatgatgatgagggtcctttattatcaatttttttttgggggggtttcattagattttttttttcttttctttcatcaaagggtggttctctttttttttgttcttgtcttataaattatttttattttttcgtttcgatgggaagggaagggaaggaagaaagaattatgtcatatttagtttgatgtaattggtagtttaacaagtcaaaaggtctaaatctaatggcacctgtatctttgtagtagtgacaacaatgctgtaacaaggatcttatgtatatgtatatatttgtaaaatattattattatcattgcaattgattaccctaaattattatataccttcttataaaattgggtttggaataagtgttacatatttgagggtagccttttcctcttattttcttttcagtccttgaaatattactaagtatatatgaagactgtaatgtaataataaaagaaacattaaatattattttgaattttgtattttgtcaaagttaataataatttgatttaaaagtgttataataaattggttaccttcttgtatttatttctactagattttatcttgaagttagttatatataaaaagaaaacgttgaaaattgagttgagttttatttatattattttagaaaatataaaatttattttgcctatggaaaaaaaaacaatatttgatttgattaaattgctaatgcaactcttcccaacccaacttcctctttttgtttggaacagcaatagaattggggatatttaaccatattgaagactgctaactaattgcaaaactaggtattttaatcacattgagcaatgtattaattcttaattatgttgaggtatgcttcattcatattttctttccaagaaaaatacacatcagttgaaaaatttaatcgtttatgaacatataatggttgaaaacaaaagtggattatataatgcatcatattattctgtgtaaactagcattacatttttctttttcctttttcttccaccaaattctgtgtatttttttttttcttttgaataagtgaatgcaatacaatggtgtaaagaaaaggaaaaggaaagagagtaactgaaaatgcaaagcaccacaagggttgttgacagttgagctactactaatactactagacttagactagtattagcctagatagtactactcttctttgcctttcttatcttcatcgcctttaagaaaccgcaagaaccaataggcagaggacttaggatgacgggtaagacggttgtcattgtagtcaacatacactatcccaaagcgttttgtatagccttgagcccactcgaagttgtccaacaacgaccatgcgaagtatcccctcacatctgctccatccctgcttcatcaacaaatattcaggatcaaaaaagtaaaacaattgcgacgttggtgcctagaagagactcaaacattagattttgttggagcattaccatatatctgaccatttgaactacctacaatctattgttatgtagtgaattgtgatgcataagacttaagaggggtgtgtgtgtgtttgtaaatcaagttcaaccaatatttacaatattttgtatatgaacatagtatccaatgcaatgcaagcattatgcatatgctttataatacttgttaagctacttacttgattgcctgagcaactccagcaagatatcccttgaagtaagtaactctcaacttatcatctaacatttcatgaagatgggcagccttattctcttcatcatccatacctacattgcaatggcatcgatatcatataacttttatactataatgctatatttagctggaaaattgataggccttagttattaaataaaggggtataagggtagtagtaattcggtaatagtactacatatatatatatatatatatatgagtgaataggtaagcaaaaggggggaatgaaattgtaatagagctactgctcttggcttgggagagcacctggtctctcgaataccaagtaccttgttcacttcaattttcactattccattttactactgtttttcaaccgaaatgataggaaattcctatcaagaatctactactgtaatactgcttaccattctcagtaatgaaaatcgttggattgttgtatgttttgactacgtaattaataaccttccggattccccaaggaacaacataaagccactctgatgctgcctgtaacagggattaatgaaactataataagattgtgttaatgcattatatatggacctaaaaaaccacaagagaattatgaaagagaaaggtgattcattaccttctcaccaattgtctcacctccttcccattcaactgacaatgaaaaaagtaaacaatgtaaattgagataaagctatttggaaaaataaaaagagagagagaaaacaagaggtggttaatggcgattacgaagtctcttcatctcttgtgctctatagtaatcactttctgcattgctatcttttgcatatgaaattaatcttgttgtataatgattcagaccaatatagtccacagaattcctaagcagattcttttcttcctcggtgaattcgggaagtttatctccgattttttcacgcatagattcaggataatctccataatagattgggtgcaggtacctgtgcagtgcaggcattagattctcaagtatatacatattgatataaaaaggtaaccaaatgagattgtgttatacataacacttctttaagttatctattattgttaatattgaccttacaaagacttaactgtttatgtttatgctaattgactcaattgcacacatgctaaggatattaaaatctctatgttaggatttctttgtagattataaagcaatgaattaacaataattgctaaacaaataatgttgtgattttgggaaagtaccatccaatctggaaatcaaggcgccttgctgcagctgtttgatcttcaatcttatctgaattaggttctgaccattcacaatctaccaccaaacccactttccctccttgtttctcctgaaaacaagattaaacagctattaaaaatatctacttttcaagtttccattccctgctggtctgctatagcattcatattcgaatattcaacaaagctaagctaatattgccaagggagtcaactcaagagactaaaagtggcttgttgagcatactttgaacttgctttggtatacagaataagcagcagcatgggccaagagttgatgatgtgaagccaagtaaggttctgtggttgcattttcagatcttcctggagcaaatattccgagacaatgaccgtttacagcagtttgaaggggttcattgagtgtaaaccaattcttgactctatcaccaaaatttttaaagcaagtctctgcatatatggcaaagtattttctgcagtgtttccaagcccaaacattggaaaagaataacatagctaaattaatcaagcacttggcagacaagaataatgatagattagttagttagttagttagtactaacgctatatccttgttgagccacccagacattgtctcttgaagatgcaagggaagatcccaatgatacaaagttacataaggctggattcctatatttattataaccaacaaacaaaaatgtattaacaactataaagaatggaacagaatacaatccaagttatgaagagagaatcatacctttgtcaagaagagcattaatgagattgttgtaataagcaattccctcttcattgaccttagtccccaaaccatctgggaaaattcgagaccacgaaattgaaaatcgataagcttgaaatcccagctgggaaatcagctcaacatcttcctgtatatatacaatcaatcatacaagtgagtgagtgaagaaaatcatggatgagtaattgagagtgtggtgaatggagtgaccttgtacttatgatattggtcaactgcaatgtccccattacttccatcaagaattttacctaatcaaatttatacaatacacaacaacaataatcaaaaagaagaaattgacttaatttgagtaatgaaattaattagtaatcaaaaatacctggagtgtgtgaaaatgcatcccagatacttggacctctaccaccttcattgctggcaccttcaacctatttgtatatatatatatatatatatatattagtttccagatccattaaccatatgaatgaataacaacagatcatgctgagaatgagaatcttgagaatgagatatacctgataagcagaagtggctaccccaaagacgaagttgggagggaagtcagatctggctatggctacttgttcttctctcatctcgttctccttcaaaagatgctcctttttcaccattgttgttgttcttgtttctggtttcctttgtttatttcaatgatttaagttaatgatcttgctaacaaaagacttaagcatatatatatatatataaaagacaacaaataggaagatgacacgtggataaagacaacataatagaagatacgtatagtcattcattcacatgttcacctaactcccattctaattaattctaagaaatgataaaagcactactagtgcttttcttttttttttttaaaaaaaaaaaatatacaaattctattaatttgacaaaaaactcaataggaatatcacttttatttaatactcaatttggaaaagaatcttgtaagattacgagcaatcatgttaacatatcgtttaataaaaaaataaaaaaaaatattatttaaagatataagaagtttacaacaattttctataataattccaaaagaaaaaaaatataagtaatgaatttcgaatagtttggactgctaccaattaatctgactccagctcaattttctgctatagttgagttttaatccaacttagcatttcctttatactatttgctttagccaaattcggatcgcccataccagcaaatttgcccgacttactcatcactaactgtgacagtcagtagtcccgtgatccataagaggaaatactgggtaagctgtgcaatcccacatcgcct

SEQ ID NO: 110442 - DNA, 7189 bp, Cannabis sativa
  modified_base (7021)..(7028): a, c, t, g, unknown or other
cggggatggggcggggatgggggtataaataggtagcggggatggaggcgggaattgcattccccgtacatttaccgaccaatttccatctctaatcctgttcaaattagtactaaactccaaatgcactcttcgagacaattataattacacgtgttgttccaaagaccccaattttctgtcccataagaaaaaatcagctgggaatctatgataaacttgttttttgttttcacttcatatatttagaatccatgattaactttttaaagctctttccattacatagaaaattacattatgaaaggatgcgattctattatactgtgagctttgaggttgacatgcatatcgatcttatagaacagaatatggatacatgaaagtaagagaggcaaggagaatcactaactactttggtctttgataagctaataataacatacaaggaaaagctgcagtcatctaatgatctctttgtaccgcggttgtcgttttgtttttagagggacattattctgttcaggggaatcctttcgttttgatgagacatcctttcgattggagaaatcacttgtggcatcgtcataccaactgaaactatgatctctgcaaagagaagtgatagaataggaaaagggttagatagtcatgtaatgattaacaatggaaattgaagatttcagtgttacagggaaagcaaaataatagttaagaaagtgttaagttaataaatgttttagaatatttaaaggcacatattgttttccattgtaaactgacatttatttcatctattttgggtatgaaatgataaatggaaaggatgcaaacataatttaaatgactgttcaatcattacagcataaagcaaatccaggcattagggactcgcacgcattttggttttccatattcgtcctaagggaaatggattggccctcgaattatgatttacgtgatttaataactccaatctctctacagcccacactgttcctataccgaaacctaagatctttcgaccataaatcaaaacatataggaacatacagaaacttttgatttcacttatcatgctactcaacgcttacaaggatctttaacttcactaaacttctgtgctcagttaaggttgcaccatacttcacttaaaagtggatgtttacaattaacacaaatctgaaaatataagcttccttggaaatcagtgctttcccaagacccgagcggccaaacaaaccaggaacctccacattttttatgatggtatgtgtatatggactctactacaaaattccctcggtttagttctctaatcgtttactgtggctttcaaacacaaaacacgagtgggaaaactagagaagagagatttctcttttcttgttgcttttacaatattttccatctagctaatctacttgaacttttcttaaactactgtataccctttccccaagtttaactaatagaccttgtgataaaaccaggtgatttctttcaccttgggcaacaggacatcgggctacagcactgatccttcatatttctccagtgtggtagatatcaaaaactatgttgaaacagatttttcaggcaaatcatcctattttctttcaagggggaaaaagtttgtagtataaagactgatggattagggaaggtgtgacagtacaaatacaacatatacattcttaactctaactgcagaaaagcacggaaatataatacaaaaaggtgtaatgatttcactgaaaaaacctttgttaaataaaggttgaatatttcattctataaacaattaaaaaaaatgggagcatctaatgacataacttcaatgcaggtttccaacataggaaaaagaaacaaccaaacaacagtatgcacctcggcaatgaatataaaatatagaataaagatatgagaaaaatgttgttagaatagaaaacaaacctattccttcccggatggataaatttggacgtataatttcatcagaattcactagaaaaatgtcaccaatatagagatgatttgttgggacataaacactgcataactcctcatctccatcatctttctgaaatcaaacccaaattatcagatttgagaaaaacatactcctatgtactaacataaggaaaaaatcagtgcagatattcgctatggctaatgtcctagtccatttgtatactaaaaggagaagaaaaaacagatggatacagtatcagatgttggaatcattagtttaacttataaaatacaaccattcttttttaccagctctgtaacaaaatatagtacaaattttgtacaagtataatcagcaatcctcttctagtcctgagtattctaccatttttccccataacaaatatcctatcactttatcagaaaaaatagacataataaaatagccattgacagaattaacttatagatttgtttgaaaaacaaaatttctgctctcttctcatcattatgcatatcaatgatttttaactctttatcaaggggcaattggatacaatgattaggcaggtaacaaataaagagacatgccgaagtacctggaggatcactgttgacgtgataaagccaattgcatattccccaagtctgggatgacgaataattgcaacctctttaaatgccgtggtattttgatctatttttcagaggaaaagagaggttatgccttgcaatatgaatagcacatagataagtggaagatgataatggatgattcaacgtaactttaagtattcagcaaggtaaaactcaacattaataggataagtgcgtcagatattgacttggggagacagtagctccgtggagtatatatctatatatatatatatacatatattagaaagaaaaaaagacaaattcttgtgcaattcacaagtaatccgccagccaaaatatttagcaaatgatgacaagacacgtgaattctatagggatgtttcaacaactatattaggagaaataaaattagttcaaaatgattctaggggttcagaggaaaaaaaaatagtaccaggggaaattgcagcactaatttgtttggatgctgagtaaatatgcttcataaagggcattcttttaataaaccattctcctacccaaaaaactgtggcacccatccatgatgatgcaaatataccaatcaggaaaatgaaaaatagagacgtaagaaatccaaggcctgcaaaagaagaaacaattggatgatgtcatacacaagaatatatttgtcaacagattaagtaaatagctatataaagaaacagaactatttttttcagcaaatccatatgagttcaccagaagctggaagacacaactagatcagaaccatagtcattaacaagagcaaccttagtctaacagcgtagatgatgatggtgaggacaatgatatatacatattatctccagttaaagggatgttttcacatttatgttgcgagaaataaattagtttaaaatgggtctacagttcaataaaagtaagagtagtaccagggtaaatttaagttattacttgtttgttgaaactactcagtattcttggcttcttgccaagcaaattacttgtattatcagatataaaattagttcaagatttcaaaacactgatgtcaactctaagttctctactggtaatttagaaaactattaacgttatgtacataggagtctcaccaaatatttcaaccccaagcctggcatatattggactgaagaagccatccacaaactgaataaaccaccaagtgatgaagaaagtaacagcaacaggaaaaagaaccacactgcaatttcacacaccaactctaatttcgttaagatgataaatccaaaatatggtagtacaagaaacaatcaacacaggtccaaactatattaccatccagtcataaacttctctgagacccaactctgaagaacagcataacaagcctacaacaaagcaagagtaaattttcaattggcatgcttaggcacatatcaattaaaaatagttctaattggcataggcattgccaaaaattgtatcatacaagcaatcttacaaggttgttaagttagttgtaatgcagaatagagattaattcagttctgataagcaccctcgaacaactaatttgccctaaaatttaccatatcataatcaataaataatttggttaaatcttaaactgatacaaaatatcttcagcatatcatcaaattaagcaggtttaagttaaaatgaagtccaatttagaaacacaattcacacaatactgttcttaaacatagacattgcctagattttgatcacactcagtttctaagattagacccaaattgtataaagcatagcatacaacacatcttacgaagaactactgagaaatcatattgaaagaattgcattttcaaatttcaacaatgaagtgtatatattgcgattaagagagagagatccgtgaataatgtgaaatcgaaagaaaagaacaaaatgatgacaaaccttacgagttgaggagctaggtgaggttgggggagccttggactcatcttcggagtcagtttgactgagcggaatagaagttgactccttagattcagccatttttgcttcccaagtcttctggtagagagagagactcttcttcttcttcttctctaccgaaatggctttcttctgattttgggttgaatttcttttttaatttatttaataataataataaaattacagagtaagattgaagcaaaggaatacaagtaacaagtttaataacttcctctaaaattaagggtattttagtaatttcaactgtagatatattattattggagtttatttttttcatgaaaattattattagatttattagagttgaaacttagctatcacgcctgatcggaatcccatctttataatttgttatcataatttcttggttgatccaacaatatgtaatttaaatttaatatatttttataggtttatcaaaagtacgtgaatgaaagtaaaatttatcaaaaatatttatgttattggatgaaatttttattttcaataaagtatacagttacgtatttaatcgacactcaacacttttatttagtttctaatagaaaagaatgatatgtcaaggatataaattcttgcagagtattcttacataatagaaacatactaaaatgtgtgagtatgacagagcctagttgcacactataccacacatagtaaaagcactatatagaaaaaagttagcacaatagtgaagtgacatatatcaattatatgtgatgatctagtgtttctcatccgcgccttatataaagattgtgtctttttatagcaattggtttgaatgactaatgtacgtgataactcattatgaacatgcaagttttatattgtcaatacatgaataattgatgggcgatcaatacaaccacaagcattccatcttataatatcttcatgggtttacacacctaaaaccccaaaagggtcatacgttctcgaaaggtatgaagacccaatatgcaaataactcgagtgaatttgcaagctcaaaaggttacaacaatatgaacagttgatatgcaattatataatcgcacccattcaaatattaaataattatagtcaaatgtcgattaagtgtaactaataatgtaatggtcctgtctgatcaattatataattaaatgatcacttacttttcatataaataaatgattttatatgaataagacgaatcacaatttatcttctatagtcgactagcggaccaagcttgggttgaaccaatataatctctttgtatcttttatattcttgttgtttatattttaactcgttattttatatcgggtattcgtcactgtagatgagtactcgcagttctccttgtgagtgttcttgcgtagtttgaatactcacagtttttggtattatctattttgctctgacaacatttggcactaaaagaaggttatttccaataacattttttgtaattttagaaactgaattgctcgatgccattccagtaaagaacgtagaaagaccaacaatagaccacgacaataagactatttagatgacccaaattctcacattcctcaaaattggtgaactaccaaacaataaagcagaagcaaagagattgtgatacaaagcaacccaatatgtcatttatgaagacaagttctattgtagaagttttaaccaaccacttctataatgtgtcaatggcaatgagtgcgactacatccttcgagaggtgcatggaggtatatgtggcaaccatactgctggacatttaccaaggttggccctgaaaatatatgggcctaaggctatttaattttaaggccctcacttttagaaatatatataaaaaaaaaattactgaaaaatatcacgggattcgaactcacaccattgtgtaatgtgtcatacatcccaaccaaccaaattatgaatatttattatttacaatacacttaattttacttaaaataaaagtttaatgagaccttttattttttattttgggcccccaaaaaatgtgagctctaaccctaagcacggggcctagcccacctatgcctaggattgacccttacattcactcgcgctgaaaattatgtgacaaggttattactagcccacgcttcgtgccgacacaactaattttgcaaaatgatgcaacaagtgtcagcgcataacgacctatgtgcatagtccccacagtattttaaactcgattaccactccatgaccatttgtagtttggaggattgacttaattggtgagttaccgaatggcgagggaggattgaagtatatcatcattgcagtcgattacttcacaaaatgggtcgaagctgaacccctcgccacaatcatcgttgccaaactccatgaatttttatatcgagccattatttgtaggtttggaattccttatacaacctctatttaagaatactctatnnnnnnnnaacctctaatttgttaaaaaaaatgaagtctcaatttgggccaattacaaataagaataacctctatattgtaattagttatacattttttaagtctcatattaataaaatatacctctatgtaagaataattacatcttaaaaaaatatatacatatatt

SEQ ID NO: 110443 - DNA, 2388 bp, Cannabis sativa
tctcttcaggtttccccatcttcatcaaaaatgacaacacccggttccggattctaaagtcatcatcataattgtgtcatattgatggataataattttgttagtttctcaaccacaagaataagcattcatttacacattctatgtttgatctttaccaaacactttcactatttgaaattgtgtcacacaatttttttagatagaacacattcagatgacaaaccaacattcaataataatgagacatacatttaactcgaaagtgacacatgatacatttaagtaaaaaggtagtgtcatgtcagcatatacaagcataactcactttaaacattttaaatagcaattaaaaaagcatacttaagcatttattaaatggatttacatgtgtcatggtgagccacatgtttatgtttggatttttgatataataataatcatgttgtgtttgatttgaattccaatgttcatgttcaatcaagatgattcctaactttttttaatgtattgaaaatgaaataatgacaagtacagaaaatggtcctttcatttaataaccaaccagaccagctaatcaaaatcataaggtagtagctcagccaattcgttattaaatgtccataaataaacagaggaaacagagaagtttctacaaagaatggactttcaaacaataaaaagaagaaagaaagaaaaccttggggaggatattcaggtctgaacataggtggttctggtatcacagtctcctgcaacaactggaaattacacaacaaaattaaacccataaacaaattgttttagcctcttctcttcaaacaaaatcaacaatattacctcaacaattccattctgcttcttcaagaaagatacaataaaggaacctataaaaggcgtttcaataaacctaacaaaaaacttcaagccaaatccagtcaaatgaggagctgcaacaacaaaaacacacaaaacccaattcagttccatcaaaaagcttcaaacttttcatcaccaaaaccactaattactaaaacaaagtcaacccaaaaaacataattcacctttagcttcttccagattatatttcacagtagaccagtccaagtcctctgctggaaccataaaacgcttatttcccatcttcagatcacagaaacaaatgatcaaacagttagcgtgcaactcaaggagacagaaacaaacccagaaagagtgagtgagtgagacagagagagaaagataccctttttccaagatcaaccgaaatagaattttaggaaaatgaggaagctttgggagtgtcgtaagacccaattgtcgttactcgttgagtaaagtggatgttggtgatattattgaccaacccacaaaccccattggttgatcaaagctatttttctgtctttcagtttcagccaatttcaatgctgacattttcttagacttaaaacgcaaatgggacctctctggatatgggcattaaatagtggtcatcttttcgaaagtcgtgatcagacaataacggtacccttttggctatggaggttggaaaatttatgacagcatcaacctcccaattacttacattcaattatccttttaccatgacacacacctatttattttggcattaggatattattttagactgctaaattttccaatttttcgaacacgcgtagtagactggaatatcaagaactttattttcggtactataaactattcatacttttcaaaattttacatgtgtgatattatgacggctagttataacaaataccgctatgaaaaaaaaaatgaaaaaaagattccaacatgtaatttcaaacatgaaattgactaagatgttgtaattagcactcatcgtatataaaagttttttaagacatttcgagtaaaaaaattaagatattttacaaaattttaatgaatttaaaataatttataatatagaaagagtgttcaaattgtttattacacacgcatataaaaataaaataaacacgcgtgaaacagactacttgaaccctgtttttagcgtgctaagtttttttgaatttcttaaaattttgctggatgtcttaaataactacaagtatatgactatgaaaaaaaatgactaaaatttctcttggatgccaaaaaagataagggtacattcgtgcatataccataaaattttctattcatatatttaacattgatttaaggccccagtgacgtctaacaccacttagaggtgatatcttgtgataagttagcgatattccataaaattattacaatgaattatataatgtgacagtcagtagtcccgtgatccgtaaagggaaataccgggtaagctgtgcaatcccataccgcctggggaaggtcaagtgg

SEQ ID NO: 110444 - DNA, 1689 bp, Cannabis sativa
ttattattatgtaaagaaagtgatgatagtaaagtaattaatgaggaatgtaataaatgaggaacataaacggcaggagcagtttgtttgaaaagaataataaatgaggtggaaaaaatagaaataggtggtaattattgattggagggacagggttgggataaggaaatttgggacagaagatttttttcccaaacttaacatatatatcaaatttgcaaacagaattaaagataagggggtattaccaccaaaaacaaagaagagggggttaagtgtttaacaattgaaacatagggggtttggccgcaaatttctcttatttgtataatagataataattttcattatcaatgatcgttttcctagtattattgggtttgtctagcttagaagacttgaaaaagaaaaaagaaaaactgatgaacaactgaggcccttattctcctctaaatcccagagctagtgaacaaatatttataattaagaaactgaaaagaaaccaaaagttgaaatgaaaacaaaagaacaggatcatatacagtcttaatttgaacaagtgtatgttgcaaccaaacaaccatatataatcataaacaaaagggcatcaacaacacacatatacgtgtgcttcaatgccctagtataaaaaagctcatctcctcacttctccatatcatcaaacaaacttccaatatcctattttaccaagcaagtcggtttgtgggtccctatttgcatgagatacacctccacacgtaacccttgtgcgtatccacatgttttttcttctcaattatatatatttatttactttgtgcaaaacttctatttctccaagagtgccacccttagagcattctatataagtccattctatagtcctcacacactacacactgtttataggaacacaaggtatcttgccttgagctcttcaacatgataagaaaatacaaataaacatctcctctgcattctttctctcaatatataccaatcgagaaacatacaatacagacacattgagttagaacgagttgattttagaatactgactaaaattgttcaaaatacagctatatatggcccaatgatgggtctaattggagctgcttcctcctctgtttgttcctccagtgaaggtgcagcagctgcaagagtgattactaggaaaatgggtaaagagaagagcaaggtgggaggtttcttggaggtaaaccttgagcctatgttagtggaagtggagaccaaagaagaagccatagtggctccggtgaaggaggaacaaaaggatcagcagagtgtcgttgtggttgcttctaaagaatcggaagaaggcagtgacgacagtggcctaggtgatgtcccttcagtagtttcaatggagggttttctgcaatatgatgatgaggaatttgaagatgggatgatttatgagtggaactcttggatttatgagcaagaggaccgtgcttggtgggggaacttgtactgggattggatttggtatccctattctgatgccattcgcactccaaatgggatcaattgggcttcgtatgatggagaagtaaatgactgggaatttaatatctgggagtgagcttgacttgacaacaatgacaagtataatataagttctccattagtgtcatgtattactaaatgctacaaatattcttgtta

SEQ ID NO: 110445 - DNA, 850 bp, Cannabis sativa
actaatcagattgtaaagagttttatttagggcataaaacccaataatcctaaactccaaactccgacctagccccagacttcaaacctcgaaccctaaacttggatccaaaaccccgacccggaccctaagtcagccccaaaccccaaaccattttaaagaaattaatgtaagtgctttaacatattgatgattttcaattttatttccaatttaacatagtgataatcgaccataaatgtataagtatggaacctcttcacaataaaatgaataaaaagagacaaaaaaaaaatagcaacaccactccgttagggagtagggaccaatatttataaatatacaactttttgtgactggtaaaatttgaactaatgatctcataatttatttacaagatatggtcaaccaccagtttactccatcaattacatattatacagtagatttgtagctgtctatacaaaattagttaacattgataagaatatagaattggtatttaatataaagattttgctagttagttagcaaagaatatatagttattggtgcaaagtcccaataataactcaaccaaaataatagtggagtgttattacatcttctaatattttttttttgaaaaaattggttttttatagcttatagttacaatattatttatgtaaattttttttattttaaaatattttaaattatttataaaaaataatgttgtgagtataataaaaattattatatattataacatatattttttagtataaaaaataaggctaattagtaattttttttcccgaactttgacatatactaaacatgcctcttgaatttttttggccgttaa

SEQ ID NO: 110446 - DNA, 7875 bp, Cannabis sativa
accctgtgtagtgataaattataggaattcatttaatcacataatcttgattacttttcactatgttgacaacacaataatcaagaatatcagtgtgataaggattaaactgaatttataaatcaaacaaatgatcacatgaaccaaataacacattaaacaagtaataaaataaatatgtttctttattgataaatgaatgtagaaaattacattaaaatagagttttatttaggacacaaaacccaacagtaatcgtaggggaacctgtggctggattgaatcttttgcgatggaaatgccctctttcccaaacccaactaaaggcaagctcctactcctaacaaaatgaaaagcagcgagcttcgcaaaaaaaaataaaaaaaataaaagcaaagcacgctagtagcgcacatccgtttttcagctagcatcaaatcaaagcttgactaataggtctacaagcagttggaaaaacaacctacgctaacgctttacacaagttacttaatatgttgctttgttgctttcgagcctgtttccttagtaagtaagcttcaaagggaaaaggcaaggttgcttgctactaacaatgaatctttgaaaagcagtgtcaactggtctttctttacccattgaagtgaaggagaaagcactttgctttttttcacaaatatctagctagacaaattcgatgtgatctcagagctattgactctactcaactctctctaagtaacacttcacataaaattcgtcttgaaaattggattacattgcgtattggcaagaccacttcaatgggcaactcctataggagatgctcaaacagcagcattttaatggaaatgtaaattgcaaaatagaatgggggtttggaggttttaccgtcaaaaagtatttgtgcagtttacaaattatataatttatatggttttgtcgctaatattgaaaataaagtattttctatttattttttttatcaaatgcatgtaaattcatattttgggaaaaaaataactaaactaagatataattttttttaaaaaaaaatgtataacacataaattttgatatatttgtgattataatcaataatattaaagcattgttatataattagaatttttacaatttacaacactttaaaatctataatttacgaaacactcagcgcgcaatttttttccatagctcatttacagctattctttctcacagctcagctctctaatcaaaaatatgatgtgcgaattttatatagtgaaagagaatttaagtaattaatagtatcaaatgatcttttctccgctaattttaaaatgggaacatttagctccgtgatactatatttttggactatttattataatttcaattttttttttttttggtgagaaagcaacttaaatataattagtaagttttaaaatgttataattattaacaaataagcatttcaagtaatagttgtaaatatataattatgcttgtgattgtattatataaatttctaacataaaactcatttctttttagcagtaaaagtcgagaaacaccattacacactacatccattgttcttttttcttagttgaaaaaaaaaaaaagcattccaaactaatttggtttccacgaatatttccaattagctttaggttaaaataagtgcacacttctacattacccccttcttcgggctttttctcttttgcggggtagggatgatcaagtataaaaacaagataaattgcaagttgtgagtgggtctaaattcctaaaagtcagataatggtcaataaaaagcactatcttatttaaagcaccttctaaacacactaaaatttagagaccaaagatggacacaatgaagagaaatagaagactaaaacaatattcaaacacgacgacgactaactttgcatttctatattagaacattgaatataacaaatgatatggaacttcaaatgtttgtatagacaaattgacattgcaatctttgttttaaaaatcatttactgcctaaaacctctccaaaacctgaaaaatacaattttcacaaatttagcaaacatcatattgccaaattgaaaaattacaagtaccatgtttacaatataccctatgaatcaactcatctttaaaatgggctcaccctgcaatgccaagagcgaaaaaagagaggaatacagagcagcaaatctgtgacccttaataaaactggccacaaaatttgtattttttttttccttcaacattttatatatctgattatttcttgtttgtccaagcgcgaagtagagtgcgtaagaatgagaaaaaaaattgattctaccaccccaatatgaaggcgtgtatttcagcccaacttgaaactgtgtaaagtataccatttgatcctttccaacaagacgagcccccttcaacattttctttttgtttcttaaccaagccagggtacaatggaataaaagaaacaccaaattgtgttcccactctcctaaggcttgaactggacccaaccacgattccaatatccgcctcaagcaggcagagcaggtcacccacagagtctccaatgtatacagtcaaactttttttgtctttgttcgaattagatataatatcattgaaagcttgaaccttatcaatgggagactcaagtttcttaacaatttcaccagtggaaatggatccttcaaaagtgaactcatttgcatgtacatttatctgatgtagatctcctgcttcattttgaaaaagatcaaaaagaaaagcataagtatatgtatatcatactttcatgtcctgtgtagactaaagaatctttagtaaagataacataagctgaaacaaaaaaatcctcaatgcaaaagaaaaaaacttagaagcaacactgatgataatgtaacacaatttaaataggactcttaatcgtttgacattccaacaataatctttttgaaagtacattaagaaattttatagacattatgaatgattaaaagtcacataaagggaaaaaacttgcaagaaagtgtaacatgaaagataacataagccgaaaaacaatcctcaatgcacaaaaaactaagaagcaacactgataataatgtaacacaatttaaataggactcttagtcgcttgacattccaacaataatttttttgaaagtacgttaagaagacattatgaatgattacgaggcacataaagggaaaaacttgcaagaaaatgtaacatgaaagatacatacttgccgaaaatgccgatctgatgagatcgccacaccaacagtaggaaaggatatgaacatttgcgttcaaattttcctttgtaacgacattcttaaagaaggcagtgcaaccttcatgaagaaggagacgttcaccagctttttttatgtcttcaagatttatacctttaagtacccccgattctattactctattattggcctttttctcaaagtcagaaagttgctccaaagcattatgcaagtgttcatagttaaaatccactgtaaagccacaaaaattcaaaaacaaacacctatgattttatcaaatgcttctcaaacactaaatcaactaagataaaggtgaaacttcatggttggaagctactacctttttcaattggtaaaatgctttcaatgcattgttcatactcttctgtgaactgtctggaaagaacaccccaggtactcctcaaatcagctgaagacatccgcgcaagttgagtttcaagttgattctgatcagactttggtgctgttactatagcaatttcagctaaaatggcagatgagtcaacaacggtgcaagtcaaatcaaaatccgagaaaatcataaactgatcttcttcaggattatgctctttcatcaaaggaactacagttggctgaaagagtggttgagatgtaaagaattcaatctccagtttcatggcttggtgataaagcttttcaatgatgtcaagctcctcgcctgtcaaagagacactcagcttatcgagcaactcttcagtttgcacagcagatgcctaaattcgaagatcacaaattgtataagcagaataatatgagcaaccactctgtcacaaagaatgagcaagaatcaagacaaacagtgcatctctttaatactatgacaaacctgaaagctttcagaggtataattgtctatccacttctgatatggatgactatcttcgttgtccttttgaagttcctggaactcctttcccagaaaagcatacagcctcatgcaaggagtcatggcaccaagagtgtaagcagcaactttggttctctcaaaaggggtagcaagtttaccaggtgcctttactccttcaaccttcccagaagctgttgccaataagaaatctgtatactttactgttgcagagttgacaacatccactttagcaaggtctgtactccactcctgcatgacatgttaaagttatttggtttaaaccacaatgaattatgaggaaattatgaaaataatcaaagacggaataaactcaaatatttaggcatttaggcaaacttcttatcacaagtacgaatcgtctatcaatattttttcacttttgtaacttttgcctcataatgtctcagtcatttggaaagacctcataaaattacttaatatattactctctatgacacgtatattaaacatcacaattaagtagagtgtcctatctccggattctccacatttcttctttcccgttcaaagttcaaactgcataataagaggatttaatattttactctctatgacaggtagattaaacatcacaattaagtagagtgtcctatctccggattctccacatttcttctttcccgttcaaagttcaaactgcataattagaggattgacatctgctagttctctcatgccttaactaaaaagaagcacggagataatccggagttcaaagctcatacatcagtatcatggtatatactcaatgatcaacaccacaaaaaatgaatccttcttacctgtacaagagaatcatgcaatttcaactcatccaaaatatcagtccttagttttgaaattacaggctttgcatcatcatcatctgcacactcttccgccaattcataactaagaagaaaaagaagacaaaaaatcttgattctcagtaaaactaagcaacataagacatatgctttcaaatgtatatgataattcataggattgcaacctttattacatcaatatatatatatatatatatatatataacatttttgtaatttcattcgttttacacctatccttgtcaatcaacatcatttcttgaagtaacaagagagaaacttagcaaaaagtagcactgaaactaactaaaggcatgccataaaaaaaataataactaaagggaacggcagcaggtccatgtaaaatgaaaacaaatgcagaaactcaatttggaaacaataaaaagtaaaattaaaaggatcgaatatacatatccttgctaattttactaagctttcctaacggagctaccaagaaaacaagatcttccaaaacatcattacttataataatatacgtatgcgtagaaaccaaatgtcttaatcaaatcctatgcatataaataaatatataaacattttcttttactttctttcttttaataagaaatgaaaaatctaacttttcttgccaattgtgtcgcgatctacatccactatctcattttcctagacatcttacacaattttcatagaaaccaaacaaattgcaacagaaagcaagaacctaaatagttgtgaattatgatattttgaattcctagcattttaaaactaacattttcactttgataggacgatcatctatcagctatctaattctcctatatatcctccgattcagattctacactaaacaataagacaagaagaaaaaaaaaaagcaaacacatcaaatccaagaaagcattacagaaacagctacatattccgattcagattctacaatcaaacaatcagataagaagaagaaaaaaagaaaattaaagacttacgcatgagcaaaagccttaagaaaatgagaatcttgggcaacataatgccggaaggtttcaatctttaggtttccagaggccaaagcgacggcaaagggagtgtacatagcgaaaaccgactctctacggaacttgatccaaaaccggcgagctaagccgacctcgttatctatggcggagatggccgacttcgaaggaggtattgccattgattccggcggcgatctcccagcggagtcgttgcaaagagatcggaaccagttggggcgttgaagttgaaaaaggcaggagttagaggaggagacgagggtggtaagaacagctgtagcagggctcttgattgggtttttgcttaagaaggaacgcatccattaaacatctggagaagaaggagagagaaagtgaggatggtctaagcacgaagttagagagagaaagagagggaagaagaagaagaagaaggtgggcttagaccagaggaagagagagagagagagagaaagaggtttgagtagtctgtgtatgagttggcagttcggtgggtgtgtaaaaaggagggaagtaaagttttttatccaatcttgtggattttcttattttgtttgctacctcttcttttgggcccaggcccaataactccttttcttttcttaattgacaaaattagaaaagaaacaaataaccttttttcatacttatatagggtattctcatatgattttatatctttatgtcggtaaggtgatttatatgaaattattacattatgatcctgactatttttatcatcattttcttatcgtcctatcgtatatactattttaattttttttttaaattttcataatggatctgataatatttatccgatatatttaaataacaaaattaaaatgcattttttagtttgcatgcatttgtttataaaaattttaaattacatatatgaatattaattgaataattaaattgtattaaataattttaaacatattttcgtgtataatttttttttaaaagataaactattataaaaaaaaaattatcaatatttatagagagctttaaagaattctaaaaaaaatcatcatacactttttttatataaaagaaagcacataaagacatatcttcaaaataactgtcatcagtatatctcacttgtaattattattatatttaaaataattgatatcatcaccatatcttacttatagtcattattaattttaattctattagatttactttgtacataaataaaataaattaaaaaaatgattgataaatattattttttatatataagtgaatcaatttattataaattaatttagtgtatcattagttatcaaataaagtgtagaataaaaaattaaagaattaatgatatttaattaaataaaatagaataaaaataataaaaaatgagagaatttaaagtagaataaaatatttacgaaaaaaaagagaatggataatttttttttttaattaattaatgatctctaaagaaataaagtagaataagaaaatacattcatagctaccaagtcataacccaagattcatttcatctcttctggaattgccactatgcaagggccttgtggtttagttgtatctggaatttgagaactgatcggccaggcctcttacactgggatgcttggttgacatggttcaagctggatgtcaaccggccaaggggactcaacttcaatgcctttctcgaaggtgcagcaatcatatttgagaaaatatggagggaacgtaacaacagaattcacaatgcgaaagatactccg

SEQ ID NO: 110447 - DNA, 14194 bp, Cannabis sativa
  modified_base (10840)..(10843): a, c, t, g, unknown or other
tgtatattagctgtaagagagttagatatttagtagatatttagtagatatttagtctcctaactctgtatataaatatgtattattctatgaaatcaacacacaattcgaatcactattttctacacttgcaaacaaaaaatcaattgaaagagaataggatgaaaattttctaagaaacaaaagaaatctacataagcatagataatatgacagaaacaacaattaaaagaataacttcacaaggtagaagcatgaaaaaaattgtcaaacatctcatactgattcatatggtattacaaattcaacagagaatggtaataaactcttgcctcaatgtctgcagaagcaaaatcctcagccaagtttgatttgaaaaagtagtccgcaatgaatacctgcagatcagaaattatgttatttttattttgcagtactcccgtggcactgatcaatatggatccagctgccaatatataggaatcaatatttaaacatgtgcaatcagtgtaaggaatcaacacactgttacatgtcaactttcagattgtataaatgtttcatgacaatacaaaccggtggctttgctataagaagcacatcacgatgaattccagataaccaccaatgatcttgatcttcaaggtaagagccatcactccatctaagtacttgaacagctagaacattcttactaccctccgaaccaaaagcatgacagtgatcagtgatttcaaattcagcaggtagtctactatcttgactgacctagcacaaaatcagatagtttgttaatacatctgactgggaagttttgacccagaagactacataaatgaaaggaaaacgtactgcaccttaacaagtagttggtaaaataaagtccttactatttattacctatatcctacgaggaccccattaatccaagcaaagaaagctgaatcaacagcttcgaagtgcaagaatattcgacgacctatcaaattgtaataaatatatcagatgatgtaaagccagtttaatgttaatgtttctgcatttatacatcaactatgccgtgtatacttgtatagtataaacaaacattatcgaaaagcgaattaacagatagctaatatcaatatattaactgtgtattttacatatggattgcacatagcaacgatttcacaataataaataaggagaaaagggtcaaacaagactcactcagagtagatttggcgtgcattgaagagaacattacctttccattcttcaggaatatgaaagtatgttctgtagcagccagtaggattttcctcagggacaaaaggtggatcaagtggaaacggatatgtggtattcgtatatattggtgtatcaaatccatgcatctgccagtttgagggaactgtcccatcccattacagagacataataaattattaaatagcatgtaaagaaagattagctaacaatgcttgtagagagctattataaaagagggtatatcctatcaaattaacaaataacaaagagattacataggcatgcataccaggcaaagaactccattcaaaatcctgaaatgaaccatcaaaaaagttctgaggaaccttattaggacttgaagccaagaaaaacttccaatacccagacaaagatttaatgaaaggcaaattttcgacccaaaaggaagcactctctagagctgcacgcacagcatcatcatcccaaacagcagagttggccaccaagtaattcactttattctgtttataccagtatttaagagatcctaaccggccatcaatggaaaaaaaaacaaaattatgaaagcaaaaacaacaacaattcccattctaaagcacaaaaataagaaaaataagcatataacatagcaggaaaagtcaaccaaaattaaccttttcccatgataaacctgcaactagtaaaataatgtggtgaattaattctaaacagaaaaaacacacaatatttttcactacacaccaggatcaatggatcatatttgtttgggtaacaactctcaaaacaataataataataattattcactttaaaatttctttgcttaatctttattttcaatcacaaatgtggtctaagagttacctagattggaacaatgcatacataatttgtagactaacttttctcagaattcaattcaacgaactttcacagggaaacatacataatttatagacaacaaatatataaaaatatatgaataccttcaagcgattcatgagaacggaaagtgacatgtgggtctctcttgttccacttgatgaaagattggtcttcccagagcttaggggtagtttgggatggaaaaacaaggtgacccattaaagaagtagtactcatcaatggatggattctgttctgtgttgttcttctcttgttatgtagaggaaaatgaaggagaaaaaggaaaagttatgggaggatatcaatggctgatatgatactgatagtgtggatcaccactaactccatttctttctttctttcttttgttttttctaaattctaaatagctaagtccacagtctactttcccagttcttttttgtatttttactaggttgtgtcacgtggggacacgtgtacacatgatgagcttaaccattgttacgagcaccaatcacacggttttttataatttttattaaaataaagagaaatactaaaaagcatagtatacaactcctctatctattaatattattattaatctaattaattattaaattcgctaattaatcacaatacaacttgttagagaccattataacaatacctaataatattttttaatataattaccaatttattgattgattttagttattattaatgttttctcaatctatttcttcttttttcttatgtatttttgtatttcgtatagttataatatgtaaatttttgaaaatgtttcaacagttttatgttaaaaatagaatttttaatatttttgtttaaaaaatattaaatttatttttaatactataaattatttaaaaaatttcaaaaaaaaattattcacattcccatgtaatttatgtagagattaagcaaaaaattataataaaaatttatgaatagtcctattattaatgttgttgtgttccactttcataataagtggataagaaagaaagaaagagagagaccttccaaaagaaaaaatggcatcaacgctctcttctctgaccactccaactccaactacccaatccttctttccttcttcttcttcttcttcttcttcttcttcttcttccagattccttcatttccctaacttcacctctaaatcatttcccaacttaaacagaccactcacaaggctccacgtgtcctcatcctctccaacaatcaccaacaccaacaaagaagaaaccatcttcttcgacggtggggctcattacggtgaccttttggcgaaccttgttctgggtttcactctggtttggctgcctctcacaatagctgcggtttcaagagctttctttctcaggtacagattcactaacctgcgggtgactgtcatatctggactgacgggtgaggataggagtgatttctcgtatgaggtgataaaggacgttcaggtggttcctcgtttcattggtgaatggggtgatattatcattactcttaaagatggtactaaggttgatcttaggagtgttcctaagtttagacaaattgctaagtattgtctctctttaagggcctctcaaaaccctgattttgtcaaccaaacaccaccaaagggattttaatttacttttctactactattacttctacttctttcaatactaattgtttattttatttgtatattgctataaaagaagcactttgaatttatatggttgttttaaagtcatgctttccaaacttattgttaaagataccacattacctgaaaaagtaacgaaaaggtcatttatttcaaaacttaactaattaagtttacagctaataatagaattaactttaaaatgttaatttgatataataaaaaaaaaataacaaatctcttcttttgcttactaattaactgggtttaaattccaattaaacagcagaagagacagcctaagcttcttctctttagattcaattaaattgcaaaaattaacccaaagaaaagcactaaaccgatgctgataattacacagccatctgccactatatatacaatcaaaatagcagacagcaaaatatctcaactcaaggatttacaaactgaaaagacagcaaaaattaaaaataaaaatcctcgagaaattccaagaaaaaacaccaaaaaaataggatgcttttggtggccaaagtgcctactactgtgccttctcaacctcagattgctgttgttcttgggtagagttctgttctggggtagaaaactgttccgaggaattgttctgttccggggtagaaaactgttctggggtagattgttgttcaggggtggtttgccggtcccggttccctccaggttttcgaaaatactttccattaaaagcttctgagatgtctggatacttgctcttaactaagttttcgaggcatttccggtacgaaaaatcttctttatgtccatcggttaagacaacataaaagcacctggtgtcctggaaacggaaatgcttgctcacctgcaatatcattaattttatgttttgaaaaaagttgattagattagaaacaataaaaacttcatttcaaattatacaagtttatgtgttttctgattatattcattctatactacacaacataatttatttaggagagaattagaacataccatgatgtaatcgattccacaacccattttgctgtctttatccgggtgattagcaaagacattgtcaactatatacgtttgatcttcagatgccagtggatcgccatcattgtacctatggaaaccatgtaataatgtcaaaataaattaatacaaatcggaatctaaggaaaaatgaaccgttagaattgtacccgtccttatgcatgatccttctgatggcaagcatgatcggttccacaagagagaggggatcttgttcctcagttgtgaaaagatctaatctttgtcctgttgcagttctttgtacaattacggttgagttttcattaccccaaggtttatttggacggttcttctttatcttccatccttcatctgagccccatccacctttcctgaatgactccccaccttgctttccccattgattgggttgtttttcatcactgcctccccattgattgggctgtttttcatcactgcctccccattgattgggctgtttttcatcactgcctccccactggctaggttgtttttcatcactgcctccccattggctaggttgcttttcatcactgcctccccattggctaggttgcttttcatcactgcctccccattggctaggttgtgtttcatcaatgggttgtttttcatctgaaccccaacctccagagctgcctttcttgaatgactccccacctttcgttccccattgactggattgtttttcgtcattgcctccccattgactatgttgattttcatcagtgggttgtttttcatctgaaccccaacccccagagctgcctttcttgaaagattccctgcctcgctttccccattgaccgggttgtttttcatttgaaccccaatccccggcagggccggcactgcctttcttgaatgatttcccaccttgctttccccattgactgggttgtttttcgttactgcctccccattgactgggttgtttttcatctgaaccccaacccccagcgccaccttccttgaaggattccccaccttgttttccccattgactgggttgtttttcaacactgcctccaacactcggtgacagccaagcatctgaagtttctgcaatttgctttggtgatgaaccccagccgctgtcattgggttttttagagggaacatcttcactctcagtttctgtagtctttgtcccagaagaccaagcattacatgcagatttggggcggtcatcttctagcacagcttcaacacttgctttatcggttccccacacagattttgttgagtttgctccaaaagaattggcattccacccaccagcatgctctgctgatgaggaatcccaactgttgtcattgggttttctagagggaacatcttcattctcagaatttcgtttattccctcctgaccaagtaccccgcccagatttgaagcggtcatctccggacataacttcagcccctgctttatcttttccccatgcagattcagttgtctttgatccagacaacttgacattccacccaccagagttggagcctgaatcaacttcacccctagatgcattgttgccccatgcagattctgttgttttcattttagaggattcaattgtcttcgactcagacgacttgacattccacccaccagaagtattgtctgaatcaacttcaaccctagatgtgcttttgccccatggagattctgttgttttcattccagaagactttgcaccccacccactagaattggagttgtcatcttctgaagcagttttttcctttgttgaaacattgtcccaagctgaactggcggctccccaggtggattcagttgcaacattcttttcagccgacttggaattccacccactattggagctatcttctttaccagatgataccttgccccatcctccattatcagtatcctgagttgctttggaaccccaatcatcattattggtttcctgagtagctttgaaaccccaatcatcattattggtttcctgagtagctttgaaaccccaatcatcgttattggtttcctgagtagctttgaaaccccaatcatcatctggaatatctttaaattcatcaccatcttcaaagactggcttgtcttggtcgaactcaagctcaggtgatgcacaaacttcaccgtcatcttccagtataatctcctcgatttcttcaccgagacacccagtagttgtttcttttccagatgcagcacccacaacaccaagaaagtcatatacattgtttgtctcctcttgatttaatcccatctggaacagaagagaaaatgacagaatgatgattataaaagctaatagaaatagcataaaagcttaaaacactaatacagtaaattatgaaatacctctcttgtgtcccagaggatatcaaacctcgagccagtaccaacagcaacatgtttcgcccatgaacatgaagcaacaatgcttgtcaatgaatcagtatgacatttttcagctgcacgctcaaagcatctttttggtgtctacaacaagtaacaaaaatgtaaaatgattaagtgtagaactaaaagtgttactactatgttctgttcaacgaacttgactagcaatttcaacttattaccgttagtgtcgcttcagtgaatgggacttggatattaaatgaccgagatagagccttgtagccaccagaattgaagccaatcaaatttccaggacacgtcatactgttagccaagaggatgagatgctccttgagaacacccttgctcacctttgatactgatgtcgaaaggcgctgcaaatgaagcaatattgtgattatgacaggaaaccaacttatctacaatactggtccagagctacctatctttatctaacagtatacaaagacggtatttataaatcaaaagaacaacaaggaaaccaaagttacagacaacaataagtaaagagtttattcaaaccaccattttttaacacttttatgaaaccttttagtgagcatgaaaaaggcaatgctacaaccaagaattaatgaaattgtttagggaaatttgtttgcatggaataaacttcgtaatttcacaggattgcaaaacaaaggtcgattgaaagaaaatttaccaaataactcaattgttaagatcagcgaggaccaaaaataataaaaaagaaaaaaaaaagatgtgtgggaaggagaaccatgtaaaaacacatacagaaaagtgttggaaagattcccccaccaggtatacttctgattcagcatacttcaccgacaggaaaatctctactgaagatagatggaactagattatgaagaaacttcaaaagattacctgaattgcttgatcaaaagcacaagaaattcccagcaatttctggatttgtttaattccatatgggatggatcgcttggtatctatcaaatggagtacagggaggcaagagtcaaggactatcctccatgcatcaccgctttgcttgactgctgacttctccaaaacaacatccagagccaattcacccctcctctcagaaatgtgcggatgtcttatccaagttgttgcctcaggactaatccaagttatatttgccgagcaaatccgggagtcacctgcacatttgatagattcctaatattcaaatgcttgttcataagatgcaaaataaatgaccatccaaatgtgacggtttataaaattctaggactcgaaacttgggacctcagaggttgcaggcagcaggaaatttaaaatagatgaaagtataaagacaatagaaaccttaaatgccttaaatatatagaattctcgttaatcataaagggagaataacatggcaaattgatatgggagaaatcataatgatttcaggtcagtagtttagtactcacatggcaatttcgaaggcatttggatgaatttaaaaataaaataatcaatgccaaatcagctaaatggaatatatttttctacattttacattcttttctttttggagggatattaaaagagactttctattgttagatggagaaagaaaattatatgtcatatcatcttcaaatgctatattctagaactgagattaggttttatcttatattgtgtaattggaattttatgtggcaagagttaaatacttaaattcctagttgattaaagcataagttagtcaagttgcatgcaccactgagtatatgttatcaacaatccataccattggtaaaataaacaagaaaaacaaaattaaacaaataaaaagtaaaaaaaacagactttaaaggagtatttaacttacctttgataaccgttcctaaaagaaatggacatacagaatcagcaagaatctgtgaagattcctccaaagtaagactcatatcttccttcaaggaaatcaataagcacgggacttcagatgtttcatctggagacttgtggaaagagcaacattcactgcaaggatgcaagcataaaatcagatcatataacttggcagttccaaccgataaagctagggttacataataatcatcttcttccatgtgtagatcttaaccaaaggagagcaacgaaaacacagtaacacaaggtctgtaaattactcatctatgtttcacccacctttcagtcgacagcgtactaattaagaaagtatcacttaacagagattgggaatgttttttgtaacaagttctacattgattttgggatattggttttgagtagttctattctatgcacctatttatgccttaagggctttgttgctactgttttcacatatgaaagaaaaaaactacaaacttcaacagtgtccacaaaaatataaacatctctatagcagtcataaaaaatcctctacttcatccaggtacatgtggtaaacaccaaaaaaatcaaatggtcacttacctgacagataacaatgctgtctttaaatgttgccgaattttcttcctccgtaatgaattaatattctcttggcatttttcaagtatttcattgataccaatattcatccttttcaacatcgactgtttaatacagcatcagttagtaaacacttatacacatctctcaagaattgagtaacagcaacttcaagatcattttctataagtttagtaggagttatttaaatttagaatatttgaggggaagaaagaggtcccaacctcattgagatgaatatgaccaactagacctgcattcacttcacacccaccagagggatcctggttcctatatctgtgaatcaaagaaaattggaattaggagaagatggctaagccaaatagaagtcacgtaacatatctgtctatgaaaatatctaatcaacacaccaaatagatattatggagaaagaatataccgtaccaaagaacaagaaactattaaagaatgagcacaattagaaggttgaactgagacaccctgatgaacaatattatataatcttatattctgtaactttgcttaaacatctacttcttgtagtggtacttaatgacaaataatcatttccaaaggacaaacgacggtgcatcctgtccaagggtcaaatgcagcaaaaaatacaaaaaacaaaataggcagctgcagaatttgggcaacggaagaattggcaaagggaagcacagtggtgtcccattaagcttctcccacaaaatgttatgagaaagcaacatctccagaagaaaaaaaataaaaacaaaaggtggtgtactaattaaaacccaggacaatttttttttaatttccaaattaacagcaatatttctagtattattgatccaagatcaaaataaaagggtgaaatattgacatataaaaaaaaacaaaaaaacataggcatcgaggagtacttaaaaatcaagatccaaagaatggatatttctaccctctatgggaaatacaggagcaatgattatggttttggattctagaaggaattattttttttttatttttttnnnnttttttttttaatttttttaagccctggattctagaaggaattattgagagcctgtagttaaaaggtttatttcaagatgagttaataggcttaagcagcatacttggggagatgttgcaattgcgggagacttcaacttagtaaaatgaacacaagaaaaatttaacaggaatgccaacacaagtataaagctttttgatgctttaatgagaactatttgcaattatacatggaagataaaagagtgatttttttccccaaatgaaacaacacgtattattatagcgcggaggttaagcaaaggagaagtggtattaagacatatgaatgaagagattcaataacatgtataagaacttataaatggagaacataactgtgtaggagataaagaaaaaataaccagttgaaggaaaatgtctaacatactcaatcatgaactccactgcagtatctttgaggctgacttttcccagttgattcttcaccagataagcagcattttcttggcagtaatttctcccacaatagcagtcattcaaatacaagattacacgacgatcagtaggctcatttccaaaactgaccttacacagcagtatttcctgaagaaaaggtatgaaaaacagaagttacaccttacaccaaacaccaacgtttaataatgttcccaacaatcaaggcagacagcaagacagaataaaacaagggaaaacagacatagaaaatcctttcttctatcaaccccccctccccgagcttgtaacttattatttgcataggcagaacatattggaggcctaacatgctcattcatagcaaaaataaaataacaactatatgtgtatgcacaataaataatcacattaacttctttctgaaaacacaaatatagccaaaaaggatcaactaccttcatcatctcccatgagttattgctacttggactggaatcgagaactgctttataagcaggatttgacatggcagttgcagctaacacaccaacaggttcaccagcaggatataaattttgagcctttgttccatattcaaattgaatgattgagttactacaaacattcctaacagtgccatcataacatatgacaacatctcgaagaatagccattaaattcttgaacaaagttccaggttctgttaatcctcttgatgaccgaacaagtatttctctagtagatattgaatggaccatctcttcatatggatctaaaccatagaaaaaacagctcctaataaggccatgctctgcagaagggtaatcaacgtttggaggatatatcctactatatagatcggaaacatcctcgaacaaagtcttggagtagaattttcccctgtcagacatctgcactcctaaaaacccaatttgttgaacaactttgttaactgcagaatcgctcttggtgtcgatcaaatctcccagagctgacgaattcagaaaaaagttcgtgacagaagctttgatagaccgaatttcattctccaaattcaactccaccagctcattatactttgatctaaggtggaacagaagaggagaaatagcctgaatatccttctggatatttgtaatggcctccaaagaaatggaaaaatcttccaaccccacactaaaaccatgttcaaaaatgttctccatcagcaaaggctgtacagaattgaagaacttcaaaacctcttcagaacctttcttaaagaaaatcgaggtcacaatgtcactaatgactgaagagattacatctctgttgaaatccaagattagtatttcacttcctttaaccaagaatctgtctcctgagcaatcaaatgaagcaggtaaagcagattgtagaacttgcaatgcagtccaatgtgggtccaaaaaaggagccttcttccaaagagcaggttgtggcaaagaagatgaggaaaacatggccaattgttgtgctgataccttgtccataaaatatgtctcaaacaacatcttcaatgacagcaaagagtcactggccaactgcaagataaggttgccactatgtgagctaagaagctgcttctctacagaaaaaagctccacaacttctgctcttgctgcaagagactggggatagaacaagtgaatacaatctccgtcaaaatcagcactcaatggtccacaaataagagggtttatctttactatatgatcatcatgaacatatactttcagtgcttgaagcgagtgcttatgtgtagtaggaggccggttgatgaaaactatatccccatccattatccttctatgtacaacctgaccagttcttaggaaagtatgccccttagatccctccttcaaggaaaatctagttgaaccatctataaaggttaagcacaagttattatctacaagattttgtaaataattaatgttgtgatcattaaccctctcttcgaaagttattcctttggcgatatcataagggataccaacctcgttgacctctttataagcatcaccagttattacagttctagaggagaagcctgaaccctttctgataaacaaggtcctcatcttttctagccatactttggttgaagagctcttggcttctttgttgacaccaaaacgctcatcaatgccacgggacgccttcacagtaccccgagcttgaagatactgatcaactgctatctgcaactcattggcttcaacttcagtggattcaaagttcggtatacttcttgaacttttaatgatttccacttgccttagaaccttttttagcatcgccattgaaggatcctagaaagaaagaatgtacaggaatgaaaagttaattaaaaagggtagagaaatgggtctacaattagaatcagctggccaatttagttatattgcaattgtcgtaccgttgacattatagtgatgccatcagaaatttctggtaccgataaacagtttggtggaacaggtaagaacttgaggatgtagccagattgagggaaaaagtgtttgctctcaagcttctttattgtttcactaggaagtctcttgattatttcgagtacctgttagtaattacgaacaattaaaaaaaaaggtataactaaagaacaccactgcactccagcacaagcataagcacaaagtcaaaaactgttacaatcaacaaaacaaagacttacatcatatcatttatattttcattagcatgtatgcaagataaaattttacttcaaaatacaagaaaaaaaagagtcaacattattatttagaaaataaaatggaaaacaaatatatgtatagatacatatatatttatgtttaaaaggaatgtaagaaaaaaaaaaaggaggggggg

SEQ ID NO: 110448 - DNA, 7908 bp, Cannabis sativa
tttaattattaattcaaataaaaaactaaaatattaaataaaactaacactacgtggctttgcacgtaataatcacctagcatatatataagcctaacaaagaagcaaagataggataggacctatatatacataatatatgtaggtttgattcattttgattctttgcttagaactccaccaaaaaacaaagaatgagtcacaacctcctcctcataatatagtccaaatatgatgcaactcataaatatacaaatgtattataatgtacaaaatacatgtgatatatctacaatcttttgatgttatcttatacaaaactccaagtgagaacatgaaactatattattattattgtatctcaacactatatagttttagacacacgtcactatactcactactgttatttatttattttaattttaattataaacacaagaataatccccacttcaccactccatcatattaaaaaaataataattaaactatctaaaacttcattattttcttctctgcacacaaacataacttggatccggagattctgggtctttcatattaatttttttcccttctccacatattaataatataaatacatatattatcaaaaaataatataaatacatataaatataaaaacataaaatgaaaacataatatagcccaccagacatgatttggttcctctctaggattaaacccctctttttgtgttcctctctggttggacagtttgaactatagttgtaatgcctctaaatccatggcgcactattctctcttcatcttcttcttcttcttcttcttctttttcactattacttctcattattatcctcttccctttcgtggctttctcattaaacaaccagggtcaagctttacttacatggaaacagagtcttaaagggtcaccgccgccggagccgttaaccaattggaatcccctcgacgaaaatccatgtgggtggtttggggtaacctgcaactatcgaaacgatgtcgtcgagttgaacatcaagtacgttgacttgtttggtcaaatcccttctaatttctcttccttgttgacattaaacaagctcgttttatctgggaccaatctcactggctcaataccagaccagattagttctctatctgagttaacgttcttggatttgagcgagaatggtttagcgggagaaattccaaatggggtttttgaattgaagaaactcgaaactctttatttgaattcaaacgagttcgaaggagttatttctgatcgaattgggaacctggcgagtctaaaatggctgactctttatgataaccaactcagtggtgggattccaagttctatagggaagttaactcagttggaatccattagagctggtggtaataaaaatctccaaggtcctctgcctcatgagattggaaactgtgctaatttagtcatgttgggcttcgccgaaactagtctctcgggatatcttccttcgagtttaggaaagctaaagaaacttcaaacgttagctatatacactgctcttctctccggtccaatcccacccgagcttggagactgtactgagcttcagaacttgtatttatacgaaaactctctctctggttcgatcccacctcaattgggcaacttaaagaagcttcagaatcttctcctgtggcagaacaacttggttggcgtgattccacctgagcttgggaactgcggtcaactcaccgtcattgatgcttcgatgaattcgttgaccgggtccattccttcatcgtttgggaacttgactctgctcgaggagctccagctgagtatgaaccagatctccggcgacttaccggttcaactaatgaactgtaaaaagatgacccatatcgagctcgataacaaccagatctcagggactattcctaccgagatcggagaactttccaatctgacattgctgttcttgtggcagaataagctcgaggggagcatcccctcgtccatttctcggtgccggaatctcgaggcagttgatttgtctcagaatttgttgacgggaccaatacccagtggtgtattcgagctagttaagctcgagaagttgctcctcctctccaacaacctctacggggaaattccgccggcaatcggaaactgctcatcgctgattcgttttagagctagtgaaaacaaattgactggcaaaatacctccacaagttgggaatttaaggttcttgaatttcttcgatctagggactaatcgaatctccggagcaataccagaagaaatctccggttgccggaatcttacgttcctcgacctgcattcaaattccatatccggaagcctccccagaagcttttatcagctcgtgtcattacaatacgttgatttctctgataatttgatcgaaggatcgttaagtcccgctctcggatcacttaattcgctcaccaagctcattctcggaagaaatcggctaactggttcgattccgagtcaagtcgaatcatgtttgaagttacagttactcgacctgagctccaatcaactcaacggaggaatcccgccaagtttaggaaacataccagctcttgaaatcgctgtaaatctcagccgaaaccagcttaccggcgaggtaccggaggaattaacgacgcttgataagctggggatacttgacctttcttacaaccaactttccggcgatctccacgttctggctgacatgcaaaatctcgtggtcctcaacgtctcccacaacagtttctcagggcgcgtgcctgacacgcccttcttttcgaagcttcctctgagcgttctatccggcaacccttctctttgtgtttcggggaaccaatgcatcgatgacagagggcgcgttgccggagttaggcatacaatggcggcgcgtgtggcgatggtggtgcttctatgcgcggcggggttgctcctcctcacagctctctacatagtcatcggagccaacaagcggggacttagagaccgagcgtcacactcggatagtgacattgaggccgatggtgacgtggacgtgggcccaccttgggaagtgactctgttccaaaagctcgatttatcgatcgctgacgtggcaaaatcattgacacctggcaacgtaatcgggcgaggccgaaccggcgtcgtttacagggtcgacattgcctcgggaatgccggtcgccgtcaagaaattccgagcgtcagagaagtgttctgcggcggcttttgcgtcggagattgccacgctggcaaagatccgtcaccggaatattattagattacttgggtggggagcgaatcggaaaacgaagctactgttctacaattacatggccaatggaagtttgggtacgcttcttcatgaggggtgcggaggtttagtagagtgggacacccggctcatgatagcaataggtgtagccgaaggaatggcctacttgcatcacgactgtgttcctgctatcgttcaccgggacgtcaaggcgcacaatatcttgcttggggaaagctacgaagcttgtttagctgattttggtcttgccaggttcgtcgaagatgatcaaaacggttcgttttcggccaaccctcagtttgccggttcctacggctatattgcgccaggtataagcttttaatcatttttcaaattaacgttgaaatcatgcatgtatactaattaactcgtgtttttggctttattatataaatgatggtttaattattttaactcaattatgattggtttaattaatatgtgatggatgtgacaaataattacgatcgagttcgagtggagtggttattcaattattcccttttaattattatttgcatgcattttaggcgtagacaaaagcttttctttttagcctaatatataacataatgatcattttgtttgtccgtacgtaccatgcagagtatgcttcgatgacaaaaatcacagaaaaaagcgacgtgtatagttttggagtagttcttatggaaataataacaggaaaaagacctgttgatccttcattcccagaaggccaacatgttatacaatgggttcgagaccatttaaagtgcaaaaaagacccaattgagattcttgatccaaagcttcaaggtcatccagaatctcaaatacaagaaatgcttcaagcacttggaatatccctcctctgcacgagtattagggccgacgatcggcccagtatgaaagacgtcgccgttttgttgagggaaatccacaatgagcccatcacaggaaaagaggcccaaaagcccaataccaaaaaaatagataattctactaccaccacaacaacaagtactactaactcttcttctgctatgaatgttgtgaacccagctgatttgttgctcctccaaggctcttctcgttgctcacttgcttattcatcgtcttcatctcaagaaacagtcaataataacgtttgaaagtatatatatatatttatatttatatatgtacacttgttaggggtaaaatcacttctttgtttttaattatgatcattatttgttattagatatagctataggagtagagaacagagctatatatgttttgaggcagtgtaaaggtaggggtatgtggtattaattatttagttttttgagttttcaagaaagaagataaaataagaaaattgacaagaagaatatgtatgagaggagatattcattattatttactttactagtgtgagtgtacagctagaaggctatatttatgcttcttatttattcatttgaacttaacttaagatttaactatttacttgtggatgttattagatggtgaattaaataaatatatatagatgtatttactaagctattcttttataatgatatgaatttgcttgaatgtgaagtcatttttaaaacatgattattgttgttgctacaaaaagaatgtgtttgatggagatttgtgcatgtggtgttttatagtttcctcaagtttatattgatggttagttatagttagtacatttcttgggaatgtgaattaatggaaatagaaagaggttgaattaatgtgtggttgtgaggaaatgtgtgcaataataatgtttgttcttcttatgaaattaccttttctaattcaaactcaaactcaatctgtacttataatttataaaaataataataagtgtgactttgttcttattcacctaccccatgtgaaaatgaagagatcaaaagccctagttcgattgattaggattagaattgaaaaacaatattgatgcaaaaaaaaatctcattctcttctagttctactattctaatgaattagataaggtcaaaataatttattagatcttttttttttcttatgaacataatttattagatcttgttataatagtattcacatcattattgctgtttaattaaatagttaatatttattggattgaaaaccaagattaatgttattaatgagactgactgaaatgagctgattcatattttcattaaaagattattttcccttttttttttttgtcatatatattttgataaaattttgttattatattttaattgactgaaattaaacatagttgttggaaaattttgtggtataatacagtattattaaatttaaagcccttaataacggcagtctttttctttttctttttcttttttcttaaaataataataaaaagatgaagaaagaaaataataataaaatatgactccaaattaagaaaccagctcagcttttgcttgagatcacgtgacggcacatgcaaaggagcacagcacagtacacagtgtagtactgtacagaccctttcagtaaagtgggccccatatatgtgggatcttagatcgatctaatcacactaaaatgggtcccatgatcctattgctgctgcttcctgataaatctgcataacaaataaaataaaatcttccccagcaaaaaaaaaaaacaaataaaataatcttaaattttttaataaaaaatataataataataatacatttcaataataataataaactaatttaattaatcctatgtacttcgggtcgggtccaccacatgcatgtaactggaaattaaaaaatagatttccaaagtccatattccatttctcacatgatcgagtggttttagctgctcaaatatgtagtttggatcaaaaaaaaaaaaaaatatcatgttgaattaaaataatttaaaattctatttatgaaaatttatattaattacttcttcttttttatcatttgttattgatttagtatggattgaacttgtatatttattagattttatttaattatattatattatctttattagagcactcctaatagtactttattttttaaaatatatcattaaaattttattttgtctaatttacaatatgcttttatattatattatacatcaatttctttaaaatatattaccaaaatttaattttttaaaatttaaatatatttatttattttaaatatgtaatactaatatatatttaaatataaaaataattattaaaacttataataattaattaaaatatatttattatatatttagtacaattctttaaataaagaagatgttggagtgctcttagtttgttaaagttagaataaaaaaattatattgtaaagttagtattacatattgtgaaaaataattattattgagaaataatttaaataaaataactattatagaatctttttaataaaaattaaatatggacatatgcggtcggtaaccaacttgaggcaatttagttcacatcaaatcatatttaataaaccacttgaggctagctcaagtgaccataggagagtgcatgtgtgtagaagtcctgggttcgagtcccaaattatgtatggttgtaatataaacacttaaataaaaagaaatcatatttaataaaaattaagaaacaaagtgcacttcgcaaatagttttttaagttttacccacaatattaataaaaaaaaaatacacacacacagatatcttcaaagtgagtaaaaaattaaaaattgaagaatgctcacataaaataaaactcagtatatatataaatctataaagtacttatcatacaatttgaaaaattattgttatcaccgtatctcacttgtagttgctactatattcaaagtcgatgtcatcaccgtatcttacttatagtcatcaatattaaatactactatcctttccaatatgttcactttgtatataaaacaaatcaaacaatgatcgatcaatacttacaaaatcaaaccgttgttatcaccttatctcacttgtagacgtaaaggtcgatgttatcaccatatctcacttgtaattatcactattcttcttcccaataagtttattttgtatataaaacaaattaaacgatgatcaataaatactcacttataaaatcaaaacactatatattatcactatacctcatttttttaacaataagattgttatattataaataaatatcttttatattttaattttttgtagttattaattaataaatcaaaattttaaatatggaatagatttagagtattaatttataaattataaatttaaaatatatagtatgatgtcatctaactaatatatattttttttaattattattatgtttttatttgctacaatataatactatatttgtctctctcttttattctttttttataataacaatttaaaattaaaattaacattaataataaagaatggctggaaaccttgtaaagtttttttttttttaggttctccttaatggagaatgctatttgtttgtacaaagagttttgagcaatgaaattcacttgattcacaaaaaaaaaaaaaaa

SEQ ID NO: 110449 - DNA, 4330 bp, Cannabis sativa
  modified_base (3472)..(3504): a, c, t, g, unknown or other
  modified_base (3905)..(3923): a, c, t, g, unknown or other
aaaaaaaaaaaaaaacccaatcaatctataataattgtgaagcacaagtacacttatcctattttcgtaaccgttcatactttgttcattttttccccaaaagattacaagatatggctgcacatataaatataatatacatgcaaaaagaaaagaaaagtttaatctcctttattttatttctaccctttataataatctttaatttgaagttactttctttagggtaggctagctattagagcacacatgcatgttctccaccaatggagtgttttcccatttgggtgtgcattataatcgagcttgactataatgtttaccaaataagattatatatccaccaataatatatatttaatatatatatataataaatattacggaaaaaacttagtgacaatttatttaggtataatatacatattttgtgactaaatattacttttagtcacaacaaaaagttacttatgattaaaatatagtatttaaatacaagttgtcactaatttagttctagtcaagaattatgactaaaaacatatttagttacaatagattgtaatttttgtgactaatatttttagtcacggaatttttatttataattaattccaactttttcaattttaattataaattttattgtgactaaaagtataatttttttataatgtgagtatatattattaggaaaatttgagtttttaagtttaattttttatttaattaaaaaatatcttatttttatatgatataggttgagcttatttagactaaaagaattagtaaaaaagaatgttattcaattaaaaaaaagataaaaagagttttgatagtgtaaaaagaaatatttttttatataattttttagttaagtagttaaattaattataaaaatttaattttttttattatttgttatttaataaaatttaataatttaatatttttaaaataaatatttatagtcaaattattataattactgttaatatgtaatacttattattaataagtgtttcatatataaatatattaattataaagctcatatatatatatatatataaataaactgcaaagaactcctagctagtgaatactatgagaagagaggtattgggacactatcttgatttagatgcatatgaactggttgcataagaaatatctttttttagtatgatatttgtagaaagcatttttctttctttcctgtttaaattcctagcataaaaatagtagactttcagtcactataattaataatcagttaaaatctatgtataatttttttttcttcttctttatctttctatatatggccaatatataacaagtgtaaattgacaagtcatttcatttgtattgctttgtagaatataaaatatattttcgtattaaagaaattaaaattgtgtaaattaataaagtgaccatcaactaaattagggtagctcaatatagaaaaagagaaacgttaaaagaatatttatggtgcttattgtgttatgaaatgacatgtaattactgatacaatttaattttaaaactgatatattatatttcaataaagattatagaaaattactagctatttatattatataaggtccttatattagtgctaaacacacaataaaggatatagaattttggggccgaaccaaagtctagatgcacaagcatacacactaatattatattaaatgacatataattattagtacaatttaatattagatctaacttactttactttaataataattataaaaaattattaattaattattttatgaaatatcacctcatagtagtactaaacatcacagtaacaattaataaagggtatgggatttggggctgaaccaaagtccaactaggctgaatgcacaagcatatacctgatattgtattaaattactaaaattagccataattgatttttttaaaaagaaaatctttgagggtaagatcaaaatttcattcaagagaaagaaaccaaagtgatcaaaattgcagcacaagcagtagtgaggaagtcgccaaaatgagtttcggttgggagaaaaaagaagaagagagacccttaaaaagaagaagggacagttgttgaaaccctaaaaaagaaaagtaacattccaaaattttcatttaattgattcctactttagtctataaaacttcattgtaaaaatttaacattacgaaattctcatggtatatgtgcacacacaatgggaatgattaaccgacccaaattttagaagtccaattattttttgagtgatgtgtaccaaaacttacatgcactacaaaaatattatacaaagggactttgacagttttttttttcaaccgatcatatttacttttgtactttattcttgtgcataatttttatagattactcttattttacacatggaaaaaatgttatgaaaatttaatacatatatgtttatttttttttcttggttgcaaagcccttacactaaattttaattttagaaaagctacgggttgatggccacccctagttccctagctcagaattgtgttataatattgttgtttccatatatatatatatggaagagatttcaatggttaatatatatattatatgcattataaatttataatttattagaaaaatagtccaatataataatttcatgcatgcttacctgtagtttaattccaactgactttcattggtgtagttaggcaaaggaactataattaacattagagagtcaagctagctagctaggttccatgtggtgacaaagactgatctggtcttttcactttagaaattttattgtgagggagtttcggtataagttttttgggcaaaaataatatatataaatatataatttatataacccagctatctcaacaaacctctctttgatattggtacacattaaataatagaaatttaacttaaataagaaaaaattcacatgagaaaacatctatcatccctaatagaaatagtatgtatgagctacaacatatgtctccctttaaacggaaaaaaaataaaaaggaataaaaatatataatttttttaaagaaaacgaataaatattttatataacgtttgttatatatctttgttaatattttaactattaattcacattacttattattaatttgtctcctataaaatgatatttagtctcaccgtgaacattttaatagtaagtacttaaaaaatatttttaagtttaaatatttctttttatcataattttagaatattttatttgatgtctattctttagttttatattgttcaccacatttactcaacaatgagtggatgtcaatacaatagtaataagtggaaaaaaaaaaagaactcaaaaatttagagtggttcatctctagtaattaagatgtaatgatctagctattccactaagtattattattattaatattattnnnnnnnnnnnnnnnnnnnnnnnnnnnnnnnnnattattattattattatttaagagcatgtatccaatatcagataaaaatgtgaggcaactgagtttctcaaatatagaagcgtgagaacaagaaagaatgtgtacatatatagaaggagaattttaagaacatagaatggggcttcaatgaaatataagtcatctatttataggcttaaactctaaatgataggtacgtgtaaagataaattaactgtttcaattacaaaaacttaaatttctaaattcagaactcaaatttaaatatttggttgagttgttgatgacttgttgtacattcacttgtacatgttcttggcctacgcttgatgcacaaccatctcactataccataccataccaactcggataatgcctaatttaataataataataataannnnnnnnnnnnnnnnnnnaataataataataataatatctagtttgagctggccaaataaacaaatatacagctcaaataaaaaaaattatacaaataccacttacacacaccttcaacccaggatccatgcttcctgggcaactatcgcacaactacacagcaacccaacgcaactgaaacaaaaattcaatcagaaaaagaaccaccattaattccggcgacttcacttgagaaaatgaccaaaatcaatcaatacaagggctgcttcgaattcataaaaaaaagtgtagaaaaactactatgaaactaaaattcaactggaaatccagtttaatttacataaaactaatgccgtgacttcaattttcagatccatgaaaggcagatctcaaaaagttgaactggagttcccaaacaatccaa

SEQ ID NO: 110450 - DNA, 4137 bp, Cannabis sativa
cccagccgataccttcaccatcgagggacgcaatagcctgtcgccaagcttaaaccccttacgaaattcttgaagtacgaccccttcttcgaattcatctgagtcttctcgcataatcgcttcgtgcagcttttttataagagacatgaaaattatggatgttagaagctgcatacatttttttctatgctaaagaaaatttatgaatgctaatgaaagattatgctagtctaaaccagttaattaactatgaacaaatttgtttatagtgtcggttactccaaacgacaactcaccgagttggctcgaatcaatcatgagttgttcagaatcaaaaccttgtccaggccttcgtgaaacctgaacgaatttgttttactattcgtttaagttcaacaagtaaattattggatttcgagccaactcggtagcttacctgcatcaaaccaatgattagatagaaaagtcatcatgtgaactacaaaatggatttctttttcttgatggggttcacagactatgcttgctttcgataatgttgttatcatattcccgaaaacacctattctcatgtgtaagttattttacgaaaatacaggactcaccaatggatcaaaggggttcccaactgtttccacgggaacaacaccgagcgaagatagaatctccatgaattgtttgtatatgctttgataactattgttgatcttctcctctccctcggtctccaccttaatctgtgttttagctctctcaaaattatccaatacacctaacaaagtctcaacaacttctccttgagcgttcgataccaatgaagagcgttcccgttctgtcctttttctgaaattgtcaaagtccgcacttatcctcaaaactcgatccctctctgttgacatctcttcagataaagaagccagcttcttttcaagacctaatttctcatcttcaagtgatactaggaaagattctatttcagctattttagattcatcgttactcgctagagcttctctatatgactgaagtgatgctacaacggctgaaacaggtttctcctcagcttcaacttctttatcatcacttgtatcactttccgattcatcacttgtgatatcttctgaaccaactgcaccgtccgaagagtcctgtcacacaattgtatcagcgaaacgaaaaaaagaaaagcagtgttgtcatacactaggcgatacttccaccgtgatgaacaaataatagggggaaaattcaaatattacagaaaacatcaaaacagcaaagactaccatcagattgttaatcaaaataattttttaaaagttggttaaaagttagaatggtaatgtttttagagataaacttcaacataaatatcacctaatcttaaagttgagtcagagaagcatctttcatgagataaaaaagaaagtactagcttcaatcaactgtctggagtggagggagaccaatacacagcctaaaccgatacgaattagttcaccaatgacatactatgccaataccatgtattattcagtttgtatcttccattgccatgtcaatcgaaatttcatgctatcatggctttaataagaacagtaaaaaattcaaacaaattgaactactaaaatgcattccattaaatcatttactttcgaacttttaaataacaatttctaagtgttatgaaaaaactcgaacttgaggtatgaatctgcgcaatcaaaagtgcaattcaagaacccaagaagggtagcttaaatggtcaaatttgtggtttttccgcagtcccacaagatcagaagttcaagtcacttctggttaattacatacttatctcatctatccagcagactacatagaatgaaaaagcaatgataaagaaaaagacacattccaacaattgcaagatacaatcaagtcctctcttttagatggtaagcaaaatcatcccaactcttgagcccaagatagagcaatgacacttattctaatcacaccaaacatatttattttagagattactttccaaataattttggtaacaaggaaactatatttgtttatttcttcttcattcaatagaaaattctaaatgactaaatcaaaatcccatagagaccaataaagctgtcaaaggttaaaccttttaaacccctcatcacataaaaggttacaaaatacaatataatgtcacattgcattaatatataaagattcatatgattatgaaggcatgccaattgccaaagatatgccaaaaggttaagactttagcctaagcccattgatgaattagatttcaagttttatacatatatatatatatacacacacacaaaagtgtcatataataaaatcataacaaggtaattgaagtcctataagaactaaatcaagctaaaattgcctaaacaacacagccttgttctcaaagaccaatattgccaattccaataatttcctaatgatattataatatctaaacactacttctatttattattaaattatatgaattactataattattcaaatttattagaatttcataaattttataattaacttccacatttttagacaaacatccataaaaaaaaaattaaacttcaatagaaagtgctaaatacatttcatttttgcatatatatatgattatatacaaatttatataataataaaatcatagcaagataattgaagtcttataagaacaatttaagctaaaattgccctaaacaaacacattcttctattccttcaacccaaattcccaaattacccttttcaatttctcaaaaaccaaacagagagcaaagaaaaaaaaatacctcaacttgagtttcaagaacaacttcttcttcggtctcagtggtttcggtctctccagaagcaaaaggcacaaactttacgaaccgcagggaattgtaggtgaaagcccgagaaagtttgggtttggcgacttttctttgggtaaacgaaacagataaaggtttaggataattggagatagaagattgaaatggcggaagcgaagcttggaaagagggaactctggtgctgagagtagccatggctgccattaaagctaagcttgaagtaagagaaagagagataaggatagtgtttagcagtaaagcttcagacttctcagagttccattttcaatgggggaaagaacaagaagaagaagaagaagaaagtgggtggaggagggtaaatgggtttggattgatctgaaccgttgaatgagattgagtttgtaggatgatctgatggtcaggattattttttattaatttatcttattattaaaataaataaatatataacgtgaaggttctcgaattatttattggcattttgttggtaaggtaattgtaatttgacttcattttttttttgccaaaaaagggtaattttgtgatgttaccatcaacattcaattacaattttttagttaattttggtgcttataaatatatactaaaatatttttttatagtggtgcttgttatatttataacactatttatgtacatttttgaagaattttgaataatttttacaatctcaaagtagatttaaaatttagatttaaaattttttaaacatttattatagtaaattgaaatatgagaaactctatttttagtactgtaaactctgtttctattcaaagttttttaaaatattatagggtagatattatatctatgacgaatactgctttgaaaaaaaatattctaacaaattatttcaaacatgaaagttgattaagaggtcccttttaaatttaatctatgttgagatcttggagtttgtggtttaagttaaattttcacaaatcgtttttcataaaaaacccactttcactttctactatgatttggatcataaacttaggatttttagacccgcaaacccgaaaaacctgaagactcggcccgccccgacgccaaaaaaatcgaccaactgaaaacccgtatagtcgggtctggttgaacccgaaaatgactataacgggtttcgtgttcaggtcacatattagataatttcggtggtcgggttagaacccgtaacccgaaaatgataaaaattaaaaactgtttttttttaattaaaaaattaata

SEQ ID NO: 110451 - DNA, 6116 bp, Cannabis sativa
  modified_base (33)..(44): a, c, t, g, unknown or other
tgcctacaaaaaaattagagagagagagagagnnnnnnnnnnnnagagagagagagagagagaactcaaacgagaaagagagacactggagcttaagttgggcgcgcgagacgggggaacaagaaaaaaataataaatctcacctatgaaaaccccattttctagagagagagagagagggtgagagagaaagagagggcgaggacggtggagatggtcccgtgctccaagatggccaacgatgagctctaatgccacctgcaaaaaatatgagaaagaaagagttagagtttgagaggttcatgctttaggttgggtttagaagaaaagaagaaaatggaggtgatgatgggtgaagatagggaattaggttggagagagatagatgagagaggggcggcagagaaaaaacttagtatagaatttagatatattatatggtaatattttttttaaaatagtttgaagcccataactaatttttgtaatgccttgttgcatcgactgtgctatgacgctaatagtgtatataatggctttttgcatcggttgtaaactgacgctaatagtgtatacatatttttttatatttcatctcttgcttcggttttagttttatcgtcggataactaaagaaaaaaggtgtgggttgacttttgcgtcggttaacaagtttgaccagaggggttgaccgacgcaaaaaccccttttgtagtaatgctctctctctacctatcgatctttctctctctctctctctctctcaatcttgatactcctctcaaaacttatctaatctgtgcatcctcaaaatgataagtgtaatcaatcctaaagtcggtggctacaagaagcaaggttgttaacttagttaggcgataaccaacttaaccaactctcgtttgagtgagatctccacatcaacaaaagtaggggttcttccaagaacgtgcatgagagcttccagaaacacgaaccaaagttactcagtgaaggtgctttcggagaggatagattcatcaggagtcgactatccaaaactcatttctaggaggaacaactagccattcgaaattcctttccagaagaaggctagctttcttaaggtctctttccgaaaaaataagaaagccttccaggacctacttccatgagtcgacaactttccaagaatgataaagtcttttagagatctttttatttgaagaaactattccacgtgttcctttgaacaaatttagttccttgagcccattaacactcttttatagctccaattgcagttataaactcagcttcagctgtggataatgcaaccatagattgaagttgagactttcaactaataaaattcctacaaatcataaattgaaaagttgatattgatttctaggtgttcttgtcagagtcattgaacccttcaattgtgacaccttctgtgttcgccttgtacacaagacatacaagaccttcttaataagtgcaaataagtgccaataagtatctaagcaaatattttattgcaagccaatgatccattactagatttgctacatatttattcacactccttttactatgaccatattgggtcttataaaaaccaccaagtacatagtgaatccaaagttagtagcataagggatattatctatttctttttttttatttgtacttagacattgcttacttgaaactaggtattgagtagtcattggctgcttggtataattttagaacctaacatagaaaacttctatgcgactcattgataaacgagacttataatcgtttattaaggtagtttagaacatgttatagagttttttatgtcaatttgtttggttttatgcttgttttcttttgttttaagaaaataatataaaaaaatggagaaagagctaagtttacaaaatatcagtcttaaatggagttaattttttcttggtgagtttggtgatgttcaggagcaaaagggaaaaaatcgaagaaacaagttagtcagaaccatggctctagaagagacaagtgtacaggaaaggctcgggggttgcagctccaccataagtggttgcggctctgagaagaaaatttgaaagaaaaaaaaagttaaaagatcgcaagcaaaaaaatattgattagcagtggagttgcggctcttaagcatgtattttatctttccaagtttaaattctaaatcttttttagtatcttttagagaactttgttagcctatttaaacacattatgtttagtgttgttagtatgttttcgagatatctaaacttaaaacctcatttatagcaactacttagtatttttcatcatcttcttcttcttctctttccttaactttctttatgttcttatttttaattatgaatgcaaaggttatgaacataattttcatacactaattttcttatctaggagataatagagtcactttgatttttattttatttttctatgatgttctatttatttctttctctttattttaatctatatgatttatgattaatgcttgttaatacttgatcactatttgcatgtttttatgatttcaatttgagattcgagagatgagagtggaatatgctatagatatagacataggttacatattggatgagaatacctatatgacttgtgtagcaaataggatttccaatcttaataccttttatatgttaaaatttataacggatatgtagaaaacttgcacatagattgaggtactatatcgtcaaaaagaataaacttcatcttagttatcccactattaaaataggaagaagaaattatagaatacattagtaaaataaatggattaacaagtggataaaattaatactattaaccaagaaatgttaggtcttcgttgttcctgctcaactcattgtctttcaatgatcaaccagttctccacgaaccaatgttgaaagtgtttgtgtttcttgttgagagagtcccatagttattgttgttgtagatcagccacagtttggctatgctatttagctttagaatcggccttctcaaggtctttcaactgcacatgtggctctccaggtggaatatgctagttggttccagtgctgagagcatttggtggccttgggggacgagttgtggagctggttctggggcctcctcctgaaacgtgacgtgtaggagtagtctccattatagcttcactaactagcgtgcccacagtttgctggctagttgctgggggtgcctctttcgacgcttgaggggcgtgttgcaaccatattgtaagtgactttcttgggttgtggctctcaatgagagcactaaaatgttgactatgaaatcttgacagagattcctaagccgcacccacttactagattggcaataatgaattgtgagttgagtataaatagagggacataacaatttatagtagttcattccctttattgggacagtaatggagctacatctacttcgagtttttattcttacgagatggtattacaaaaaaatggctaagtttgtatgctctaatttctagagagagaaactagatagagatgctctgaccttgtggctatttctctaaatatgcaaaaatgagctagaggagctctccttttataggtgaaggaggtccttgaaaataggaattaattaaccaaaaaaatattaaaaaagaaattaaagttggatatttttgaacaaaattaacttttgaggttgattgtctatttttggagttttggttgcaacgacgacaccagttctcggtaagctctaacttaaattaagagctcccataggggttaaatttggagttaatagcctaggaattgcgattggagtttgagacatgacttgatagatcattgaattagtttctaaatgctagttgaatcttctcaatcgaatctatattaagtgagttatggtcattttactgaagtctactttgggctaaatgcccaagttgacctccagcacttaagttgacaagtgatgtcaacttggacagtgggtgagttggaaaatgtgtcgaggatgaactttttgatgcctaagtaatattttgaaatcaattcattaatttttatgttttggtgaagctggtaccagttcttggatatggtgttgtttactggaaacaggagactcgaaactacctggctgttgagtgaatcacgatgtcagaaatgtgaaaatatgaagttgtgaattagactttttgactttatggctctcagttatggtgaaaaactagatgaacggtcaagacaaaatcagaattggaaaagtagaacccagcacacaaggccatttgtcaaccttaggggctatgtgcttattttagagctttaaatatgtcattttgatacttccaaggttcccaaacttgagaacgaggtctcttatttcattttgaccattctggagagaattcacataacagaattggcatttgaataatcaaaattcaacttggacgttgtgctcaatttttaggccctcaagtttatggatttctccacaagtttacttgtatcttcattatttcagatgataaaaaaaaattgaaacacttcttcaagaaattggttggaaatggcccaagttgacaatatgtcgacctaggcactgggcccagtgccttctgtcaactgttgggctttgtgccttatataaaactctatttcaatgtaatattttatattcatttatcaataaagaaatagatttattttattacttatttaatgtgttatttggttcatttgatcacttatttaatttataaattcatcaaaatccttataacattgatattcttgtttattgtgttgtcaacacagtttaaagtaatcaagattgtatgattaaatgtattcctatgatttatcaatacatagggtttaactgataggacaatctataatctagtttacttacaccttgaataagtgctatttcctttcgactgccactactacgtactttgctcctccttgccctgtgggcaatgccccaatcaaattgattccccatattgcaaatgggtatggtgaggtcatcattcttagttcttttggtggtacgcgaggtatatgtgaaaagctctgatatttatcacaccttttgacaaattcttatgtgtctttaattattgttggccaatagtatccttgttggattatcttctttgacaagctttgccaacttgcatggtctccacaaaagccttaatggatctctttgattatcttgcttgcttctgagaggtgtacatactgtaggagaggcattcaataacccctccgatacaattggcctgctactatcgtgtagcgaggtattaatataagagtttttgtgtctcatttttgtctactagaagttgtccattgagtagatagttaactatgggcgtcatcaatgtaggcgaggcataaatcatctcaacttcttccttttcacatatacttgactcgcttaacacttctaccggtaccaaatttaagttgtcaagttaattttgcgaggccagttttgccaatgcatcgacatttgagttatgttctcttgggatttgctcaatttaacgtaatcaaacttttttaagtttttctgaaccttctccaaatatttttttcattcaacctttcacctggtatttgcctagaacttgattcacaatcaattgtgagtaactatagcacataagattcttgacttttaaaacttcagctattttcaaacaagctatcaaggcttcatattctgcctcgttgttcaaggtgtcaaattggaatcttagggcatagtgaaattaaagttatatagcgagattaatatcacccctgcactcgagccattttcattaaatgctccatccacgtacaacttccacgtttctacgtctcgctgggcaagtggattttcatatggaattatcccctctattagaaatcggccaaagccgggcccttaatggatgtacttgggtgataagttatatggaactgccctagttcaatataccattttatcaaccttccagaattgtctggttttgataaaacttgtcttagtggttgatcggttaacacctttat

SEQ ID NO: 110452 - DNA, 5115 bp, Cannabis sativa
ttatttttcaaaaataaaatttcaaaaccaaaaattttacttggcatgtacccggagaaatacgaaatgatatgcttttgaattaatctttctatcaaatcccaaaccgtagcagaggagagcagactagcgctagcgctaaacatagtgccgctttcattccattctatctctttccttcatttctgctccgacactgacagtcctctcttctccgaccccatcttcaatctcaattgggggagaccccctactctctctctctctcgatatggcggtctctttccagacaactattcatccccaagctagactcgctcacgcgcctccaaggttctttctcttgggttttctttctttttcatttctcttgctgggatttcttcaaaattgagtctttttcattgtcttgtttgtttattggcagttgtggaacaaagctttattcgggtttaaagcttcaatctccaggtatgtgcattgctttgctcttcgcagtcttagtaaatttatatataagttgtataaatttggggtctaacctttttttttcctttcaaggcacttttggagctggaaaacccaacttgacagctgagttctatggaaaagttcacaagagtcttcagcctaggtaatttggtgtataaatttgtgtgcttttgcgaaaaatatataatttggtatgtttgtatatatatatttggcaatttagtagtgtggtgctaaaatttagcatattcgacatttgggtcttgtaacttatttatgaagctttagaattttttgaactataacaattgatagagctttggaatacttttaatgcaaaattggtatcattctcatccttctgtttatcagcttcacattaatctaaaaccattttactcttccaattaatttaagttcatgtgcagaagcagttatactcagtttattttaataaaatagttataacatggttacctctttctgtggaaaaacttttctttgagaagtattttaaattctaaattgttatgtattgattcagctatgatccatactacttatgctttcaggatcagtaatcataaaccaacaagagcacaaattggaatgatgcctattggaactccaagggtgccctataggactcccggtgaaggtacttggcaatgggttgatttgtggaatgccttggtaagtttttgtcccctagaggctatctatgataaactggcaaaaatcttatcctctctccttgtttgtgcttccattttttatcctttgataagagtttttgcttaagactcctcaaaagttttatccatctctatacttttatttttctctggaaatgtttccattggttgtttgtttttgctaatttcaatatatccaccattttcctcgggacaagctgtttcatagaatctttctgtgtggatgttaatttggtctacaatctatataaatgctgttaaattgtgttacttaatccgtcaactgaattctgcaaatgcagtatagagaacgtgtcatcttcattggacaaaatatagatgaagagtttagcaaccaaattcttgccacaatgctttaccttgacagcgttgataataaaaagctctacatgtacattaatggtcctggtggagacgtgagtaccttattaaaatgttcaactgaaacagaatctatctaccttttctttgatatatgttttcgattgatttcatgctaaaacatgtactattttgtttatagcttactccaagcctgtctatttatgataccatgcaaagcttaaagagccccgtttgcacccattgtgtgggctacgcttacaatctagcagcatttcttcttgcagctggagaaaaggtagtactttgtccttttaagtttacattttttttttttatttttttaatcttcgtgaagtggagatattgtcatttataaagctatacaaaactaatattttgttagaggaaaccggaaaaaatttatgaattgggctatttgaatttcgattcatggggtatctgagtcaaatcaacaaggcttcagttagaacagctttatcatcttcccttttttaattccccatttggtgggactaacaatgtgtaatttggagtttgatgactggggtggcaagtacaatttccatataacgtccaattcattcatgcatacttgagtcaattgtcgaatcatatattgattatgctctgcattctacctattttttccttcttatcaagggtaaccgatatgcaatgcctttagcaagaattgcattacaatctcctgctggagctgcgcgtggtcaggtattcctcttttttacattccgttgccatagaaacctttttatatttactgattttggttctttctggtgtcattaacatgttatgacaggctgacgacattcagaatgaaacaaatgaacttctaagaatcagagattatctttttaatgaattggctgagaaaacaggccagccagctgacaaggttagtttaaggctttgtttttatggtagactattatttctatcattagggcctctgtctatagacatcatttgtaatttgtttgctgtgcagattagcaaagatttaagtcgaatgaagcggtttaatgctcaggaggcccttgaatatgggctaattgatcgtattgtgaggcctcctcgcattaaggctgacgcacctcgcaaggatgctgggacaggtctcggttagttgtgtattattgtatttttcgctcatattttagatccttgccgatatcaactgtagggcttaaatgtttcagaacttcatttaatgcttctgtaattggctttgttataaatttttgcatagagatttgttattttgaacgtttaaaccacacttaaaagactcagaaagcattagctcaaaaggaggctttctatagcttggcattcatatagctcaagtggttgggtgggtgactgggagcgagtggtttggggttggggttcaagcccggggtatagtgacaaatgatcatgctctctttacacttatttaactagatccttcacttcattatagtaaaacacaatcaagtctgcagatattcttggcccgaatgatatatttcaatgatttgaaagttttggagttcagtgttcagtttattctgttagtaatacctaaatagtattataacaagtagttactagagcttattctaacctagaaggaaacacaagatagagggtttttcttttgcctaaaaatatatataaatcaattttagcactcgagattaaatgttacaatacaatgaattctctgactttctccttgcatgacatcaaaagttgaaagagtacaatgatatcatacttattcatgtaatgataattggctaaaagttttagtgaaaggaagaaagtcattcaatgttgatcttcatggtctcactctcaaacgacattgtttgttcaagtaaacattgtactacatatcgtttttgatggaaatttcgtttgtatgcaagtcaacacattttcgttcacattgcatgatagatatatggtttataatttccctttagaaatagacaaaggttggttttgaagacaataaaattaagcctacaataaattgcaaaactttccttctcccccaacctttcttttgcccatataaccttgccttgtggtaattttggtggttggtcagttacattttgagggtctataaacgtttttttttatttatttttggaggatactactacaacatcataatgaattaggccaagtccaatattattcaagacagtttccacaaaaataaaaaagaaaagtaaataaaataataaaaggggttcacattcaaactctacaaattcaaagacatcaatattcataatatagatttaaagtttcaagctctattaagattttccaaaatggcttacagcaaggagagatgtacagaaggaaaggttgggagagaaaggaaacgtttttgcaattattattttttaggttcaattaattatattttattttgggttaggaattaaaaaggaaataaaataaataatttaattattttggtattcacatgtgtcttactataagtggcatagattgtgttaaaaattgtgttcgtacaaactcatctctacattaaataatgattttaacacattcataatttcaaattacatactttttgcttacaataatttgtaataaatctcggctatacaattaaaagttatgtatctcacttaaatttatatatggctaagattgaacatacattattatagaaaattttcatagtaaggacactacgaaaagttacatatgaaatttttcatagacgcaattgactattttgaacttagtttttgatgtcttaaattattcaaaaaattttaaaaacttgtgggatatttattataactacattgtagactgtcgtataataaaattaggttataaatgttccaattattgaaaactgagatgtctctaccagtaaaggtaaaagtgacatccctattcacactgtaaatatgagtagaaatttttgacacgatatgaaactggtatgagctcgagaggtacgagcaagattcgacacgaaaaaatatgggcttaggcactacacagcacaatacaaaaaaaaagggcttaggaacgacaagctcaaaagcacgacacataaccacgaataaattagcttaaaagcataacacattaaaaaatccaacaatttgataataataataaaaatttatttatcaattaaaatgataataatattaaattataattatgtgtaattactattgaaaaaaagatataaaaataattaaaactataaaataaacatatattttagtatttagctcatcaattgttataaatgcaaaaatatgaaacacgaatttgagctcgtataaaaaaacaagttgacccgaataaagcacaacacaaatttgagcacgtcacgaaattaccggacttgcgggccgtatcagctctaccctataaaaccgcccgcaccgcaaaaaaaaaatgcagtttgaaattcttggcggtgcggttgcggtttgaattt

SEQ ID NO: 110453 - DNA, 2729 bp, Cannabis sativa
aaaaatgatgtgaaagagagataaaataaaatattatatttttagatgatgtggagatttttagcatccttaaaggatgctaccattggagatgttctaagtgatgtttagtaaaaaaatttattttttaattttataatgacaaagaaagagtatttttattttttaaagtttgtttttgaaaaataaaaatgtgttttgtaattatttttgttttttaattttagaaataataaataaaagtgtattctacaactacttttatttatcaattttaaaaacaaaaaacatgaatttttatttttttttatttatttaaataaaaaataaagcaaaagcagttcaatcacatctaagtatgaaaaaaaaaagtatgaagcataatgcaaatttcttgctccatcccttaaaccaaccaatctggaaagaccgtcatcctcaccatctccaaaatatcataatgaagagaattaaaaatacaaataaaaaataaatatcctaaacaaaaacacatgtttctttacataacaaaaacaatgacctatatgaaaagagttagagttgatgaatttcacatgtcctttcgtaattcaatgttctgagatccaaatacttggtgagaagtgctttgaataaacacacccaagctgcatttgctcttccactgaatcattcccatagagagaaattaattgttccaaatactgatttctttgcttagatatatttcgcagtctaaagttattttgaattttctaaccataaagtcattgaacaagacgtgacttttgttctccccactcaggcagtcagtcaccaaaccattttcgttaaggctaccatcacattggcgtcttggctgtcggcctatgtcctcagcgcctgttagagagacttgtcaggtgtttgcctgcctttggaaattcacctgagcaatcacaaaatttataaatgataattaggctatagttttcacacacaacaaaatagaagtaaactgggtatgatgattttatagcatcatcatgtgctttaattgactctaatcacttcaaatcatataccctcaaaaccttcaaagtcttatccaatgaacttgaataaatcaacccattacagattgccaaacaagatatattatcagcatgttcaattcataatttcttatagttacttctagtttgtacataatttttctgtctcatgaatttcccaaaataatcttttgttgttggaagtgtgtccacaagcttaaaatattctcggatctcctagacgccctccatactattttactatcttgatgagcaataaagacttttttctttgatgtaacaagagatttaacatagatatcaccatatccaagcttggtaaaaagtcttaaatcaagttgttgccaaactatgatattttttccttggaaataaactcaccacataaggctaagcaagaaacaaccaatatggccagatagtacaactaacaatttatatgagaaaaatctagtcatcataaaaaccttacttggaaatgattctaaagactcgtaatcaactttaaaaaaattcaaaactaaaacccatgaaaaattaattggttgggcagacttcaatacagtttcatattaaaactaagtaataaggagttttattgagcttcgcagatgtattaacagtagtagaagcaaggtccaccacagtgaaaacccatcaatgagagatcatacaaaagagaaattaggactggcaatataggtcacgacacgacaacacaactcgaatacaacacgaaataaataaatttgggtggcacgtttaataattgtatcatgttcgtatttgagtttttaacatgtttaataattgtgtcgtgtttgtgattaagtttttgacacgtttaataatcgtgtcgtgttcgtgtttaccttaatcgtgtcgtgttgacacatttagtaatcatgtcgtgtcataattcacgataacacgaattacttttcatatattatataaaaaacgcaattttcgtatttataatgataatcgtgttatcgagtcgtgtgacctactaattaattgtgtcgtgttcgtgtttgaggtttcgacacgtttaataaacatgtcatgtttgtgtttgaggttttgacacatttaataaacatatcgtgttcgtgtttaccttaatcgtgtcgtatcataaatgtgtcgacataaacattacacaataacacgaagtgccagccctaagagaaatacataagagaataaagagaatgaccagagattatcctcaaactcaagtgaaaacctcaagattagaaattacaagcaattgaacacaacacatcaaagacaaatcaagatcccatatcaacaaaagaaattataaaaataaatattaatagtagaaaatctttatacctatagaaaatcttcattttttagaaccaaatctcttgttcttcgttctgagatctgaaagacaaaaataaaacttagagacagagacagtgagaggagagagattaatgaagatgacccaaaagatccaaaagatgttcctaaggacaacgatcctaatgatgatagaaaagacaaagaagaggagtattattatgaaccagatcctaaagtcattcgaatggctaaagaacttgctgaaactaaaaagaagttggtgttgggttttatgccctatataaaactctgtttcaatgtaatccagattat

SEQ ID NO: 110454 - DNA, 6319 bp, Cannabis sativa
tgcaactaaacaaaaaaatagaataaaaattgctttttttttcattccattctattttattatctctaactaaacgctatctggatgtaataactttggagagtattgctatctaaaggcgacacgtctataaggtaccatccaataggaatgctcgtctaaataagcacatgcacgagtttcaaaatgtctcttcatttgtaaatggtaagtgtgaggaagcaattctggtcactctttattgtttaccgttacaaaactcttgcactatatatggacaagcattgaaccccaaacccaaacacacaacctcaaaatacctctcactttccggtaaacgaccaccccaaaatgcagtctcacgcgttgaagtcatcgctttgcaccttctcttcatttcgccgccactctccggtacctgtcatcggcggactcaccgctataagaacctcaacctcgctcaccttgaattgctgctcacttccgagtctctcactgggtgagtagttgactagtactatctctctactttgtttcaataagaaaaataaataaataatgatatttacggattgtttggctagcgagaaaaatgataaaatttagataaaggtacaacttttgatgttgattttctcatgttgttaattttttcttaccaatggcagagtgtttcagctttttcatttggaatttatcagaagataattttctttgcatgtgcagcgttttctagagattttttttttctcttcttcttcatgtttttgaaatatataaaaaaaaaaaaaagaagtggcttcgaggattttctgctttgttgtgtcgttttttgtttagttatatatttttacacaatacatgtatatacattaaaaatcaggaaaatgaaaatttaaggagctatgatttgctgaaattgttttatttttttaaaaatttcatttgttgattactttttaatgtcgttttccagttgatgattcgagaaaattccaagaagcggcgaagaaagggaatttggtcccactttaccaatgcatattctcggaccagcttactccgatactggcatacaggtgtctcgttaaggaagatgatagagaagctccaagctttctatgtgaatcagtggagcccagtttccatgactcagctgttgtgagttttgcttctttttttgtttgtttgcatttacttttcaatttcgtgtcactgacatgtaattcaatgctctgatgtttgtatagggacgtttcagtgttgttggagctcagccaacaatggagattgtagcaaaagaaaataaggtcaccataatggatcatgaagaagggcgtttgactgaggagattgtggatgacccaatggttatccctgcaagaatttctgatggttggaatccccaactcattgatgaacttccagatgcattttgtggtaatgtaacttctatgcaaaagtatgaggctttttaacattgttttgtaactacatactagtggaattttgaattgtataattatattatctattcccatgcttaagctgatattgaaatagtttccagtggtaagtaagtttctcacctttttcttcttctaattgagaaggaatacatgatcatgaataataccaatgtgttgcaaatctgagatactcgatccttttaaatgttgcaggtcttaaactagattggcttactgtatcaatattcaccacaacagattactgtgtttatttgatgagaataagatgattatattccctttcaatatttttaacatcttggagtgttttcttatcattaatcgacgagtgttactgtactggacaggtggttgggtaggttatttttcttatgatacagttcggtatgtggaaaagcgaaaaatcccattttcaaaggctcctaaggatgatggaaacctccctgatattcacgtaggcctttatgatgacgtgattgtctttgatcatgtggagaaggtactaaagatgcaaatctagctttgatgcttctttttgttgcattttccatcctgtgcaaattattttggaatatgtttttttttgtcttcattgagtactcaattgacagtttcgatcttaattgaccgtgagtataattgtgaaacgtggctcatcaaaatccatagaaggcagtatatcttaatattagtatcacttgataacggaatgaattgtctcatttaatcatttgttgaggatttgagctcacttgtttgtcaatgagttttttgttttttcccaagagcttggctttttcttccattttcagaaagtatatgttattcactgggtaaggcttgaccgctactcgtccgttgaaatggcttacaaggatggtatgaaacgcttggaatcattacttgctagagtacaaactactgaaccgtgagtgacatttatgatgattaatctcatcacacattgaatcatatgatgatttgctcaaaatattatttacttattttccaatttttagtccaaggctgagtgcaggttctgtagatttatatactcgtggttttggtccttctctgaagacttcaaatatgacaagtgaagagtacaagaaagcggtactgattgcaaaggagcatattctagcaggggatattttccaaattgtattgtctcagcgttttgaacgacgaacatttgctgacccatttgaggtttacagagcattgagaatagtaaatccaagtccatatatggcttacttgcaggttaatatcttttttcttaacatttttgcactatggtaatttctgtctgttttttagtcttatgaattcttttgttatctcaaccagggtagaggttgcatacttgtggcatcaagtccagaaattcttactcgtgtaaagaaggttaacttcgttttgtttagttcatgcttcttttttatttttttaccagggcagggaataatgcaatgcaaatatttgtgtctattaatgttcttgtgaacagggaaaggtagttaatcgacctctggcaggaactgctaaaagagggaagacaactgaagaagatgaaattttggcgacacagctacttgctaatgaaaagcaatgtgcagaacatgtcatgctggttgatttgggtcgaaatgatgttggaaaggttgttccttgagctatatctttctaatgtggacatatatttaagctcaaaatgaacttgaacttcttgcatatcataatttctcagatgattctattttcttaagtgtgtgcattattttttgtcatacacaccctatctttgtttgtgaaatcattactttttataatcctttaaaagtgcattatctcatttcattgaactaaaaagcattctatgttcagaaatagttttatcttagtcgatattaataatcataagattgataaaagataaagaaaggtgcactcacgtcatgtttgctgtttgtcttttatataaagggatgaaaattaaattaataaaaaattgtttggttgctggatacgttgtcactcctttttcttgcacaatgtgaagctctatgctgcacctgcatccttttctgtgtaacaacaataataaagttattgtttttcctttaacgattctacaaaatttgagaatcctggttgaagaccacaaaattttctacccagctttacaagaacaaagatatattagttagcagctaagaaaatttttcttttatatttttacctttggcacgaatttttgaaatgaaaattcatttcccaattttgataatgccaaatgtttatgtaggtctcaaagaatggttcagtgaaggttgaaaagttgatggatattgaacgatattcccatgtgatgcatataagctccacggtgagaaccattgctcggagtctggttactttgtgacatgaaacattatgctttattgtatatgttattaatttcgtgggccacagttgtaatgcatatcagttctattgtacatatttctttcttgtgctgaaattcatgaatagatggtatgtctaacttgttccatatctaggtaactggtgatttacgtgattctctcaattgctgggatgtcctgcgtgctgctttgcctgttggaactgtcagtggagcgccaaaggtaattaactaacatgatctactctattattttatttttttaactatgcatatagcattagattgcgttgaaattatggtgaaagtaaaaagaacaaacgagaaccgtgcaacctccttccactccctctcttgattttcatggtttttaagttatgcttaattactgtatacttttctcctgcgtaaacatatttgtaatcaatgaaatgcaggtgaaggcaatggaactaattgatgaattagaggtgtcgaagcgtggaccctacagtggtggattcggaggtgtgtctttcactggtgatatggacatagcactggctctccgtaccattgtgtttccgacaggaacccgttttgacaccatgtactcgtacaaggatgctggtaagcgccgtgaatgggtagcttaccttcaggctggtgctgggatagtggctgatagtgatccagatgatgagcaccgtgagtgtcagaacaaagctgctgctcttgctcgtgccatcgacttggctgaatcggcatttgttgataaatgatgtgatgatcttcagccacctaagtcagaggtaacggtgctcccttgttcctcctgttgtaaagggtgtcgacaaaagaaacaagaataccaaccaagtacctgagctggttctcatgtgtcttagtttaaaataaaaaataaaatgaaaatattttccttttttttcctcaatagaaaataaaaagaaagaaaaaaaatgctgctagttacagtatcaggctaagctccttcgtagggttagatgtatctttatatatgaaatacatcttaaatgattacagcagatacaaattacatttacatgtcttaataataaatattattttttgttcttctgtattttcccccacattgattgatgaagtgaagaaaaacagatctgtgaagaatatgaagagtttgattagtttcagaaacagaacaagtaacaattggttacttattaaatcaaagctgttatggtgatggtgaaatctatgttgtccgtaaaaagattgttttgggctaaatttgttttacaacataatgcaaatgcatgaataaaaaagtgaagcatcgtaaaagtgtgtgacaaactgtttcaaatgattttaatccatcaaattcaccatcaccaccaactagactagtagttgttcaagttcaaactcttcatcaagctcggttcaaacaaatctgaatagttttagtggcttgtacaaatattatgagaatgcactttttctgttgaccagaaaattgaggaagaacgtggaaaatgcttcctggaattggaagcattaaaatttgtgtggaaagcattcaaatccttctgttgaaagcttctcttaattggattcgaacaatggttaacctcgctgagtcatgggattccagttgaaaaaatatgccatgcccttattggggatcagaattgccccaatctcgccattattaaggttgactttccaatcttaatttccttctcttcctcccatatctttttatgagttcctcgatatttttgatacgctctccaaaaaaaaaaaaattgtaactctgttctggaagatttggcaaaagaaaaaccaattcgctcatgatggattgcctacgtttgattaccatgtgatatatagttcgttggacttcatgaaaagtgaccaacaagcagagggtccgaaagggtcatctcctcctcagaagcggcgtgccttaacgatgagatccaatggcgaccccctccagaaggtcttgtcaacgtcaatgtagcattgttctcgaccctgcagagttcaaaataggcttagggatggtcttacattatggactcgtgtcagtgtcactccacttgttttgactctcgaacctcatgtggctaaagctattgcggtgtgacaaggtctgtattcacgattgggatatcaatatcttctgttggaaagaaattgacggagggctatgctttcccttgctaagctaactctgttgcttgagaatgataaagtgtagtgtggtggtctcgatttatctggtggaatagtttaaatttttgggtaagttgaaaactaccttttttttattatacattaaccaaatataactctaaaataattttaattgataaataccctcttataatcaaagtaccaaata

SEQ ID NO: 110455 - DNA, 10005 bp, Cannabis sativa
aatatctattacaatacaaggtcccacccaaacatagtattcttataatttaatacaatacggagcccttatacagggatccaaacgagccctaaaaatataaatttacataaatttttaacatgttatttcatgtaaaaaaacataatacaacccctcttttataaaaaaaaaatcatcccacttaacttaaatcatgagtctgtaactgtgcacccacacccatttagtgggtgcacactactacaaacaccctatatttttttatgcatgtacatataaaagcttaattgtgtattgaattttattatagtatttgatttagctttcataaaaaagaaaatatgaatttaataattaacaatttcagtttactaaggataagttagtaaattcatataacacatggtacaacccaaggaggagaacgacttgtcgtttcaactcaaggcttagcttagcgcgcgaactcactaactcggcgccttataagtacgagtgcatcgcgactcgtctctgttctaattttcaaaaatagttatttggcgcgtaaatcaaggtactcttcctctctctccactccactgtttggtttcacagaaaatgtatgagaaaaatagaagaaaatttgttttcttcttgattgatcatcgtgaatttagtttttgtcgcttaatatttcgtcattcaaatagtgaattagagaatctgttcttttcatctttgtttctctcagcagcgggaagcgaatcaggtattttagcttaaatcttgtttggtttgaagaaattgtgaagataggaactgaattgctgctatcgaaattcgaagttagattttatttactcaatcgtgctctaatatatcgatttgatgtattagatgtgattaattgtcaattcaaaatgctcaaaactttaataaattcttgcattcgatctccaaatttatgtttacctacggttatctttatcattcactaaccgatcgtgtaattttctagttataatcgcagtaagtatgggaatcctaatatcttttccttcttctttttggtttgaatctattccaggaaagaaaatgtcgaacatagcagtttgcgctcgattcaggcctttaagcacaaaagagagaagagatgatggcgattcaatctgtattcagtgcttagactcggacactttcactttcaaggtttctaattcgaaatttagaatcataattttgatgattgaaaaatatttgtgactttgatcctgctagtaacctgtttttgacaaaactaatctcgatacatggcaatggcaggatgagaaagaaggaaattcaacatttaccttcgatagggtgttctatgagaattctgagcaagctcaggtctatgattttctagcgctgcctattgttcaaggtatataactcatattgttgcaactcttaactctacatgtattttctctctctacggcgtgtattaattcttgcatcttgaacttctgtttgcttgctatttcagcacaagaaaatagcaaaatatgtggacgattggaactaatcatatttatattctggatcgtgtgcttgtttgaactgagatttaaaattttcacatattggattaagaatcaataagaaattataaattcatgcacatgtgcccagtaaccaatatgtgtccaaaatatattagggaaggttaaatatatgaataatacatatctataattgactttagccctaaaaatcacagttttcttctgatgttccttataaatgtttgtcatcatcactcagatgctgttaaatacactaatggaacgattatcacttatggacaggtaaaactcagtaagtcatttgtcaaaattttctttccttctaattttttaaaggctcctcggtgtctttgtttcaactcttcatataagcttctctaaatttttataaatgaatgacagactggagctgggaagacttacagcatggaggtatgtcatcctagcgtcactagtataatactgattctagatattcatatcacaattggaggtgtttgcatctattaatcagggccctgggatactagaatccgatgatcagaaaaaggggttgcttccacgagtagttgatggaatttttgaatgcataaaatcttctaagaatgcaaataagtactccgtcaagttgtcgatggtattcacacttacatttaagatgataattgttatttgctacttttttttcttttcatatcattcgtgcaaaattaacttcatttatttttgcttccctgcaggtagagatctacatggagagagtaaggtatacttttacaaaaaagaaaaaataaaaataaaaatagtaatccatgtatttcttggaatgctcctccaacaattacagcctataactgtctttgtcagagacctctttgatttagcaaaggacaacatacaaatcatggagaataaatctcaaggaattttgttgaatggcataaccgaagtacgttttcttatgtagcaggactttcaagcaattttgactaattgaaataataatttccaaggtttgctgttcacacatggttattacttgagagtaaatttagcaaactaacccggtaactctagcagcttttccactagtcatggtttgattgttcagtatacttcagtgacatattagtaaccatgctgaggccctcttgatgagattccaactgtgaagatagcttattagctctagaagtgtaatagattggaatccattttcgcgtgtttcctttgtatggaatttttctcctaaagagtaattatgccaagtagggacacagccatagatgcaaaaattggattaactttaaagaccacttatttctttacagaagcagcttcttatttgtttcattttcaggtctccattaaagaccccggggaagcattgcaaagtctagctgtaagatagaactactactgaattttgattcacttctgtagttctcactatatcttctaacactgacactgaatgttcagagtggtgtagcaaacagagctgtgggagagactcgtatccaccattaacttttaaaatataatgacagtagattcctctgtattctctttgggggtactctagatttatgtgaagaccatattttccttgtttctgaccttattataaatagaaatgaacattacaagcagcagaagtcattgtgtttacatattcactctccagcaagaattgaagaaagacaatcggtacaacatctatttgtgtttgtatcaggtttttccataaactaatattgaactttgaaaatctactgacaggtcgagaactagcaagttagttcttgtggacttggcaggctcagagaaagtagaaaaatctggagctgaaggaagagtccttgaagaagccaagagtatcaacaagtctttatcagcccttggaaatgtgataaatgcgctgacatctggttcatctgtaaaagcaaatcacattccatatcgtgactccaaacttacccggattctacaagatgcccttgttagttcccttcactcttggtccatattattatgttattcaactcttactgaaggtatatcctgatttcatcttctagggtggaaattctcgaactgcattactatgctgttgctcaccatgcccctcgaacgcaccagagagtctttccacacttcgatttggagcaaggtgcattgctcattgaatctctatgcaggataaaaaagaattcctaagacaaatcactacaagagctagttgtgttttcgtattccgtatattatttaaaactgaaaattttgacatttcacgtaagggaaactcgactaacatatcactgaactaaagctatggactttcttttatttaataataataataataataaaaagatttatttttgttgatacatgctggagcagggcaagtcatataaaggcatcaccgcgtgtaaagtgcaatgaagacaaatctgctaaaaagcatggaactcctccttctcccgataaagacgagtcatgtgagagaattctaaacgaggtaggaatgaacctcgcatctgcaattcctcaacttatgttttcatcatcatcatcgttgtcagtgtcaaaacatttttattctaattcttctttttaattgcaaaacttccataacttagttgcaaaagagactagacgaggaagatgtgaatctactggaggagttgttcatattggagggaattttctttgatcctaattcagaagaggagttagagcttgcattggaggatgttactttaaagacaattgtatcgttgaaacaagcagtggaagagttagcatgtgaagttaaagaggtaagagtaaaattcagcatttaacttccttgcatcaataaaaatttcatcatatgattgagataatattttcctaccatattacaccggctgttccttcatagaatttgctcacttttaaattgattatgaaaaatctttacagcttaaaaaggaaaacaaggctctcaaggacgaaataacgcgggttaaagtatctgatgccaaatttgtaaagactggagaagcttcaagtgttgtgcctaggattttgggactctgcagtttcttctctgtttcctggttcgagtcattcttacctttgtccaggtaatgaaatcataaatttccaacaaggtgactgaatttctggggttatagcttcattatatatttgttcatgagacaattagtagaatccgtgaataatttggtatcaactcggttcttattgaaaatctaaaaagcattatccaaatataataattttttcttctccaaaaatgtgcatatactatccttcaaaagtgcacatgtatatttgtctattcgtataaaacattggggatgatacccaaaaacacttttgtatgttaatgcatgaattttgtcattagatacaatctcctttctcaaaagcagattcacaaaatctagattttactcctatttttttaccttcacatccacagctcctaaagcagacagtccaaaagttacatttccataaactacaagagaaatagagagagacaataagcaatggatacagatactgagagaggccaaagagatgctagtacaagttactccccgagcaaagctcagccttccacttattaaatggcagtttagtaagggtccctttttgcatacctggctagggtattctacaagaagaatgtaacccaggtgccaaccaagttaccattattaaaaaagaagtgacagccctcatcaaggaatgcatctcacagtatataatacatccctgaaacgatccatggtagaattttcaaggaataaagtagtacgaatcatttcaacgataccctataattggttgagagccatttcagactcgtcctcattgtcatctgtactaaaactaccttcctgtgatgctattccactgttagcttcaggggataaaccggtaattgacgcataccattcaccttgcaaattgcctgaatctctcatcaatttcaccaaaacctccttattttcgagatcaccttcttgctcacataaatcaagaaaagcagatacgttaacaggttttggcctccaattctttgaaccctcagccgcaaaagcttttttccagtaaaacaaagcgtcggaaattttcttctctccagcatgcccctcagcaagagtctcccatgtggctgaattgggttttcctcccacttcaacaacgtggtcaacaaaatttaaagctttctccaaatttctttgcttagtataataaaccatgaaaagatttgctattctagggtcataagttgacttgaccagcaaccattccttgtaaaccttttctgctccttcaatatcatctattctgagtagagaagagataattgcatggtagcccaaatttggaatattgggatatattgatttataaacattccacaccctataaatctcttctttgttaccaatgctaccataaagactaaaaaggtagtgataagggatccgatcccgacctgtgattctactctcaaccttcctcaaacattcctcagccttcctgatttgccccatcttgatatacattgtagccattgtactaaatgtggtccagttgggattgatggatttatctgttttcagctgttcaaatacttcttccatcttctctgcagatccttgtgatccacgacaggataaccatatattgtaggagtatatatctaatcgaatgtttttcttcaccatttctgaaaccattaactcaaccttctcataatccttgaggttcatatatagtgtcatcatcacattaaagggaagagaatgtgaagcataacctttagttctcatttgatcaagcaaagattctgccttttctttcattttaccacgaacataggcattgagcagagcgccatatattctcctgtcttttgaagtttccgatagactaaaaaaaaaactttcagctactgcaatcccccgaactttggctattaaatctaattgaattgcagcatcactagaggacaatctgaacctctctactcgaccgttcatccactcgtacacctgcacagggaaagcagttcaatgctaatgataaggaaaatagttaaacaagataaacgggtaggcaccaatcgagatgtcaggaagagcaactataacaggaaatacttcatttcctttatttcaattctagtagcacagcttctttgtatggacggtaattggtatttacaatttcaagtttccatcctctgtagatatttgattttcgattttaattaacaatataaagacagcaaaattcactcattaaccacctttatcctcaatttaaccatggatttcatccaaattagcagccgaacttttgacaaagatcaaatcattgcataatgttagagtcccttgggagttaatcaagctaacccaaacaataaaaccatatctcaattctcaaccaaacatatcagctaaccaaaaaccaaactcaagactcaaaaataaatcccaatataaagattctcaagagcatgcatataagaacagttaaacatcataaactcatgtgaccaaacattatatgtcaaaaatggaagatgcccattgcccacccaccaagcaaaacagaaaacccattaattctaaacacttcccaagtaaaaatagaacaaacaaatgtcatgttaattattacctcaagagctctctcaaaacgcttgtacttcctcaattctttgacgaccctacaaagatcccatttagagagtacctttccctccttctcccactggttcaaaacactgccagaaccaagttcaggattctccataagagaaatcctcttgtatatggcgttccatttcattaaggggcgacgctcgtagtccacagtgccatagctatggacttgggatatggagcaggagactgaaaagctgtgatagtttagggattggcggagggcacaagtgggatttctagatgggagagaacgagagtaggaaagggaagaggaaagggagactgatgagacattggggttttgcagacaagtttggagaagcatttttccttttttgggagaaaaagactaactgtgaaaaaatgagagaaagagggtttaggtttacagagcaagcagcaatgacagtgtttctcttttcttgtagataaacctctcgttatctgaattttagtcacgtttctagtttgtttaaactccacgtattagaaataaatatttaatttttatgtaatttagaaacaaacaatattaacgatcattgtagtttattttattttattaaaaattaaataaatattaacgaacaagatcctcatctaaatcgctacatgcaaacgggaggtgacacgaattgggtcatggccaacattccaaaacggggtcggagctcttttggtaacgcccagagaggggagccacactggtaacccccttctccctttttgttaataaaaaaaagagaaaaaaatctacatgcaaagaaaaaaaaataataaaataaataaaaaataaaacaaaattcctattgcaattattattcaatatttttaagggtaaatattattttgaatattgtgttttgcaaaaattatcaattaaactatctgttttgttaaatgacaaaatagattatgtattttctaataaaatagtacaaacaggatattgaattgatttttgtcgaaataaaatttaataataattcaatctagaggtattatgataaaactagttctgcatttgttcgcgctagaaatcgtttaaagttgtttatattcaaaaaattatcaaaaattgagttcaggatcctatttatactattttgaaaaatataaggtccattttatcaacatctaatcgataacttttgtaatacacaaggtctaagatgatgtttaccttatttataatcacccatacttgttttatcaagctatttgcaaaaaataaaatgttagaaattttattacaaaagataaatcaagatattataattcaattataaaataatacaaggaataaatattaattatatcaattttataagaacatatctttatatattaaaagtgattatttaataatattttttggtttaacaattttttttaacgttattttttatatagggaaggttaacgtttgatgtttgatgaaagggtcaacgttttagaaagagaattgtaataaaatttatattttgaagtccttgtatatcttagagtggccagttgaataaaataaacacacctatataaaatatataaaatttaaataacacactaattaaaaatattaaattaaaatgagactttttaaatgttgaaaaacatttcaaaatattattttataaaaaaatttatacatgtggaacggatcgtatgtcactgctatttcacattattcttagtataaatccaaaataaatcgccatatatggtaccaaataaggcacaccaagcacataaacatattaccatacaaagtacaaaataagtcacaacttacatacaaacaaactactaaattcatagtacaaaataatcttcaagagatattataagataaataataaataatcaattacaacttctttaaggaaaaaagaaaagctacattagagcaaaagaaaagtatgtctatgttatataacaaaaaatgttgttatttttttaaaaaaatattacaattcaaattcaaactcgctacacatatctctattaatttttaatctcttatattaaatgtggttgtataacataaagtatttttttaatattgcaattcaaatttaaactcattgcacatatctaaaaaatatatttttattattattttttttatccaattcatatatctaaaaaatattttctattattgttttctctttaaataataaaatagaaaaaatatttatgtttcttaaagaatcactattgtgatgtcgttacatattgcaattatcaaaaaaatatttttctattattatttaaaaaaaataaaaaaaaatgtatgatatttttaaaaaataaaaagtattataaaatataatagttaaactaaaattataattaacaacaaattttgaatattattatattttctttttataaataacactttgattaattttttttaataagaaatgatgttgtttattgaataacataaaaaaaaaaaaaactaattatacatgttgactgtgaatttagccaactgacgcagagtttgactaggattagattttatttacgactaccacatgcggaatgataataaatgtaaaggacaagaatggctaatcaggatttttttttcccatcgaactttgacatgtaccaaatcatatatgctccctgaacttttttggctgttaaaaattctacctgaactattgaga

SEQ ID NO: 110456 - DNA, 19183 bp, Cannabis sativa
cttttcattttgttaggagtaggtgcttgctgctcgtcaaagccgtagcttgctgtctactaaacgagccttcactgcccgcccggcccctatctttaatcttaagtaaagtgaagtcaaatcaatgaagtgaacagcccaacctctttgtttgaagctttgccaggaagcttctacttgttgaagctttgaagcccctaattccaaaacacaacaatagactttctttatactataggttgtataggaaaaagcttatctttgatagcggtcataggggggttcagaaaagatctgatcgtagatagagacttcaacctgtgcgggggtaggggcggatgtagccaagtggatcaaggcagtggattgtgaatccaccacgcgcgggttcaatccccgtcgttcgcccatcaataaatggaccatttgttacggagacacaagaaaaaacctagaaaaaaaaaagaaattttctgcaagtcatctcgaggctttcaaacgcatccaagcaattggtatccgattgaaacatagaaaccatagattcgcgtcgccaacttgctgaaagcacaaatagaatggccgatcattcattgtatgaagtttttaagacctcactaatcagccttacactttttagttcataatgaatgaaatgaccccccctgatgaagataaaatctcccctcccttttactaaaccatggggagccccggagttgtttaccgggcaaatttagttgtcgtgacgatccctttcttagtggaagatcggaaaatctttctcttcatcacgagactgatcggatctgccgtagacacccgagagacctccacaaggcaggcaggctaaaagagtaagaggacaacaagcaaagagttcttcatttctttgttgagattgaaatcaagttctttaaaaagggtttaggtataatgcacgcaggccaagtcaagaaaaggacttccttacttttctttcatagtagtcttaatgactagtagtttgaagccttaaccggttttttttcggcactcggttccttctgaacttgacttaagacgaaggctttttcgattcggaactcttagtcgagctgatggcgagatcgattttttgttcgaggttcaagagaaaagagaggaaccacccccccaatggtgcttttacgaaagtacggtcaccggtggctaataccttctcgacactatcgaacctgaaatcaactctcaatcgctttttttagtggggaggaatttttttcgtatcctggacttaagtgttggaggctcgagagacctatctgccttgttgaggggggccagttgttttcaagtcaagccccgtatccctatctctttttaggttggcataacaaagaaagagagtgccaagaaacaacacatacccctcacttttggaaggttcgggatcgtcagggagcccctatagacgtaaagacttgacttcactgaaccggcactactatttgtcggctcctaccactcgtccctcttttacgaaaatcccggggtttatgcatttttcggaaactaaagtagctcgtcaagctaaaaacagaggagttccctcactacgaaaggtgatggacgagttcaggctctttttaaatcatttcttcagtgaggggttccaaacctcgcacgtatatgggtcagtctcctatccttgccgctgttgacctctctcctgtccagccacagagcagttcgcagcaggatctttctcaggcttgcagacctcagtctcctctcgtctcctttctttcattcagcgactgggtcgccatgaaagatcttggtgatcttcatttcttcttgggaatcgaagccaaacgtacactgctctagtcttgactcagactaaataaaccttggatctgcttactcgcactcatatgcaagactccaagccgtgtcccacaccccttgcgtctggctcaaagctctctgcatacgatggtgctcctctctctgatgcaacagaatatcgtagtattgttggcgcccttcagtacctccctctcaccagacctgacatttgctatgccgtcaatcaagtttgtcagttcatgcacgctctcaccaccgtacatctccaggctgtagcatcttacggtatctgaagggttctcttggccttggcctaaccatcactccgggaccgttaaccaccttctttgcattctccgatgccgactgggctggctgccccgatagcagacggtccactacaggcttctgcgtatttctcggaaaaacctactgacttgggtttccaaaaagtaaccgactctttccaggtctagtgccgaagcagagtacaaggcactcgcccttactacctctgaactgttatggctttcttacttgctacgcgatctagcggtgccatttcgctatctcttcgatcctgcactgttataatgctagcgctacacacttggcggccaatcctgtgttccatgcccgctctaagcacatagaagttgactaccacttcgttcgcccttccctgtctcactgagccgcctaacccaagtagctgtcggccgttctgttctatcattccatgcatggaatgttccttccctcctagctcaccacccgggtgaggaaggtcttgaagagcctctttgaagtgggaattcttcctttgaaaggcgtggaaatccaccagagcttgctcatcgaagaagaaaagcgggctctatacgccttgcagaatggaaagccttggttggatggtcttgaaaaagcctttgaaagctcaacactcgagtgacatcattcagctcatagagatttcgacaaaaagatgagagcttctatttcctttcttttttgtttttgaaagcgccggtgtgatgatgtcaggaaagggccacgtcacctagaagtctgtctacttgatttgatgagttaggaatgaaaaccttagctgtacgtaaaggagatggaatcaagaggatagggtggaattgaccccagtatgccaatccaagtcagaagactgagtctcagagtcagtcaagagtccttccataccgagtaggaaggtcagatcgatgagatcgctcagtcgcagtggagttgtttggagtttccttggtggacaatatagagccaaatcagactcgtgaggtcggtgaactaggtggaaagtgcaggatcgaagagatagaaaggctgatggatggatccttccactgtctttgaaccgagactaggcaattgagaagaccatagcatagagagcatagaaaagcctctctctcatccactttgagctcaataaacagcagctgggctggaagagcatcaatcggtgcatcttccgcttccaaagtcttcgtctttgcccagcatcttctgcatacgactttccactggttccattcctgatgacttctccgaatgaaggaagaagtcagtgagaaagggcctgagtaaatcagtcgtaggtcaggtttatatataagacctgatgggttcttgcacatgcttgctttccaacatgagcttcttctgagccctcaacatggcaaatgaagccaatcttcttggttggtacggaccagctcggggcttgctttcgtagggtccaaatggcgtccgtgtagtgcatcattttcactcactctggcccctcaacataggaattggatggatgactcactctctcttgaatgagatgtcaaactggtcctcagagcccctctcttttggatgactgatcaacacctggtactgacgagctaccccctgacgaaagcacagacctatctccggctgactctcctggtcaccgaaacacggacgagggcttctcttacctcattcacccccaggatcaacaggattggttgggtggctggaagctgactgatcggctcgaaagaagaacgcaacgaattctgaatgatcaggaagggctggacctctcttggttgaccgaaggccccacttctcttcccgagctcatggactctgttcatggagggtgctgagcgaatcgactacacggaacaatcaagcccgaattaccctggatggaagggaagaagaatatggacagatggaaccaaagaggagctctccctgcttagcgcaggctacatttgacccctagatcatgaagaaggtgtcccctacaccggaccggaatctccatcccgattgggaaccaaaaaagtagtgattatcaatggctggttgagctcaagctcctgcttcttggtcaccacaggagcagaatcaaagcgagcaggaccagtacccttagttgttctataccttgcaggagaaggaaaaaaccattcggggattcctttttttattagcccaaaatgaaactctaacagctaggtttcgagagggctatatctatctccggaacaggggaagaaagggaggaaggaattctattctttacagccctttccagaccttatgtaatttccttcggttgggttagctttttggtaggaaaggcggtagtagagttgctagaggtccttcgcgtcactctactgtttgttttccaggcaggcgcttttagccctgctctaactcctccgatttccctttgctttctttattacaactcgcacgtgcccagcctcaacgtcacttcccaaaccaaaaccgcctttcccagatctatgaaaggtgaaacgttgaaggtccacaacaggtaacataaatgaacagttgattttttattcgagctgctgagggccggagctcgtatggatacattacttcattgttctatgaggcgttgcactaagcatatactcggatagggtcgcgaagtgcaaagatccggtctttgacaaccgtcgtaaggacaacaaaacctatacttatgtgtgttcgacactataactataggcgagaccagttgtaggagccgagtggcgttctgctcgattaggcgaatgcgagtgagggataagctttccccgttcgctaggagggaaactccggaagagttcgggcaaaacaaaaatagatggatggtgaaagcccctttctattatattagtaaagcgcgctccttgcatgactccatatctttcattattaaagcgaaagcgacaacgtgtcaccctaaccttaaaatcgataaacgggaatgcgttacctaataatgagcaatgctggtaacagcaaatggttcctaacctcattaaaatcagagtacggcatatccgactatccggcagcttggataagtaacgcgatgaaccgtacctgtatctctaggcgttatgatgtcttattatgtagatcatgtcttgcttgagggttccaaaccccgcccttctctaataggggaaagtacagacccacgcctagggatatacgagcgccattcttcagacgctgttcgatagttattgtagccgggataagcaggcacgaacttccgtatagcgccctagttttttagtacaagtagctaagggggctgggaggtacgacttgcgtcaaacttgtgaaagaatactttaaaaacctgctgaacaaggctcctttcaagtcaaacggagattaccacttccggagggaccaaccattatacttctaggggagggtctaacatagcggaaggccacggcttttgtgagtgttccgcacaatacggtacggtatgccaccagcataaatgaggcgcacaagagccactggcacgagatagatttaatgcccgcctggaagtgattcgctaagtcgggttttccagcggccgcctattgtagaatcgtcgataacctggctgccactatcatgtgtgtaaagacttactgtataggcatactggaaaccgtttggcaagtcaagggaccctgaaatccgctccttagctataacgttccagagtcatgcagaacagacactaaccgtcctccaataactattaattaattggaccttcaaggaacgagtagagtacaaaaacaaaagattcgagtaaccctccgagctatggatattcaaaaaaggcaggtttttattcgaacgaatgtgagaggagcgaaaggagacccttgagaaatgaacagttaaagtaaagcctcaactttcatagaagagcgtcagtgggataaaacagcaatacaaaaaccggacaatgtatattgtgaaatggtggcgctataacaaatccagagtaccttaacttgcggttgccgcacaaagctggtcaccttaaccagtcatacccatttatggagattccggatctgaagagctcaaattaaagccatgaaacaagtagctactcctactgcaattgggggcttcttttatttgttgccagccaaaaaaaaaattccacctcgactcccctctaccagagaatccatgaattccgggcacccgcagtagcagcagggatgggaaagacaaataaccagccaactatatatgcctaaaagcctgccttccttatagaatgggctcctccttagaattaacgagatctagagtcttggatgaatcctcttgaaacgggtcgccctagaagactcgatggcttaacagcccagtgaataacccgattcagagagataacccggtctttagacactcgccctacttctaaggatagatagaaaaagttgggaagtaccagatgcggaagcagttccagtcccagctgctgaggtggcgtagtgacaggtgggagcaataacaacagaagcagcggaagatcctgcagtagtatattcggttgtttgcggtggaatagattcaagcgtccgggccagtagatccagagcaaataggcgttgacttagttgcttttgcagttgattctaatcccgatgttgatccgacgcaacttaccggtgatagtcgcagcaccaagagctttcaagggaggcagacatgtatagatagtagagtggcataccttctggatcgagggtcccacccggtaaacaccatacaggcaaaatacctgcggggggaggaggcccttctcactcaagctcaagcatttacttttctagttagagaccaacgtcttggggctaacgtgggatccgctcaaggacctacttggtttaggtaaatatctcatgcgttccccgactggagaggtcctttttggaggagaaactatgcgcttttcaaaaatggtcggaagaacgggtttaaaatatagaaatatatatatatatattaccggctggctggtttttatgcaaaaaagacaaaacgggatttgatttccactcataaggaaggaaggttagatacctttgacagggttgtatttttggttgaaatgggatggtgttcaaactcccgaaatgcagtctagacagcgggccgtcccctttctgactggactgactcggggaagggtcaatctcctccggagcatgctgcacagccactcattcgtcctgactaaatagtagagtagaatctatctctcagcgattcttttctccgctaatcaccccttcccaaccagcccgcccgatcgattttgtaagatcggctaattcaaaagggttaatctggtccgaagttgtcggaacgtttgctttatcgaacaaagctttattaggggtcttggttggccccctattttcaaccattacagctggcgtcgaccagctttgcgatacggacggacacgaagaagaacgcaggcagcgtgcagagaagagcaaagattcccgacccagagcatgttattgactcaaccacaaatctgttgaatgaaggtagcttgcttactctcagccactagttagaaggaaatctcttgacttcgcttatgcccttatggcccttatgcagtaaagaaagcaagtgaggcgggctaagattccattcgaagtaacgtaacaggattcgatgttgcaccatcttcaactcttctctggatccggagtttttcgagaaaaggtcccatccttcaatatcatgattgggtcgaccaggccagatcatgagtgaaatatcatgatcgggtcgaccaggccagatcatgagtgaatagaaaatcgaaaacgtacatagctgttccagctgaaatacttggaataattctaccacttctactaggagtagcctttttagtgctagctgaacgtaaagtaatggcttttgtgcaacgtcgaaagggtcctgatgtagtgggatcattcggattgttacaacctctagcagatggtttaaaattgattctaaaagaacctatttcaccaagtagtgctaatttctccctttttagaatggctccagtgactacatttatgttaagtctggttgcttgggccgttgtaccttttgattatggtatggtattgtcagattcgaacatagggctactttatttgtttgccatatcttcgctaggtgtttatggaattattatagctggttggtctagtaattagggggcggccgttcggtcgcctatgatactaggaccaataggtcaaaaatgggtttgtgccgcaggtgttgaacgatctactctacacaggtgtgggcttacagggctagggctcataaaccctttctttcattcatcaatagggccctggtcggtcacttttccgggccgggatcgataagtggaagtcataaaaaagagatgtttctcttcgcacctcagatcaagaggaagggtagcttgtcaagctggatatatatttatttatatctttttatttaaatattattataaaatatataaataaaaagattcgctgtcttttaaccggctgttcttctttgtcaacgcctactaaggacctataggttcgcctactttacttatgaaagataatgagaatgggttcttaaaaaaagaaaaggcgctacttagccctacattagtagaagtaagcggctgagttagcctaccctactaatgtattgtatagtaggcgagcgagttagcgaagacgcttaggctaatagataagagagcgtcggtgcgtagccttcattctactacgctacgcaaaggttacgaagtcacttagctcgacgttaggagagtcaaggggggaacgccatacctacatagaagaaccgctgttcgctgactttctaaggtctaacctttcgctcccctactgaaaaggggcaaggccgcttcgcaccactgatagactacttaagattcaattcaaaaggccctacttagtttcgcaagcttttgtcattgtcagtcaactaagtagggcctgaggccccctgcgaatccgtaaatctgaggagcatgccgcaacaaaaggatggtcccctatgtctttcattatttccggaatggaaaaaacggaagtacccccatcatggtgaacctctccttgtgatcgggatgaggtagatgcctcccagccgggggggggcggatcgaatcggagtttccttaggtagccaccgaccaacagttatccttaaacttccgtgcttggtggagaagaagcgaacaaaggtacgctcgcttgctgtcttgttctctgccgcgaactgggatcgctcgccagctaggtcagattggagcaaccttttttgagaacatttttattacccatattcggggacaaggggcggaacgacctctcgatctacttcctgcagcccaggaataaaaacgtcgtctaggcgttccctgttgctccgatctcccctacgcctaggacgttgtctgggccaagagccatagttagttgctgtttccatttggttgtttttttcttgttgttgataccggcaagacccagccagatgatgtctgctggttggtagtgagaggactcttagtacctgcatacccaaaagggggcgctgattaaaaaagaatcatttgattttgtttcttgctctcccttagcagcgggaaaggagtctatctatctgcctagctttggtagatttcctccaacgcaatccacagaaattccacgaatcccttggtggataagtccgacgactcagcagcagtgcggaattgagtttctcgtctggtggatctgatctatagttagggggcaatacataccaaaaggttcgaagaaggaacgcgcataagagtatataaccaacccacccttctgtataacctattcacattagtgaagcggctggatgcataagggaagtcaacctacgagcacggaagagcgtagtattgctgcccctctctaagtaaaggtaaagtatctccttcagctagaatggttggaaattgaaagaagcgcggaaaagggtcaaacgcggttgctagcatcgaagagagccgtcatcgacgataaagtgggagttcggacttggcgaacgagctcttgccgcgggagaggaaagcggggcaggcaaaataaccattccggtggttgatagtggagcaaaggctggataaaacatggataggcctgccgtatcatccaaaaggatgtagaaacaggaagggctcgcggggtcgatcccacatctcatagagaggaggaataccagggatgagttgggataactaactctacagctcacaggaatgggaaaagtcattccacattaccattatactcatccgctttatttaagagagaatagggagtaaggctgaaatggctataggcttccaaattctttttgaaacgtatgttgattgaactagatgctgggtgagggcttaaagaccctattcacatagcgtttctatgacagggcagattttcctataaataaatagggggggaaaaagggcttttttttcatcgggtcatcctttttcgtcgaatgtcccgggcccgatttagagaaataacttttcctttgctgcagggccggggagaaccattcaagcgcagagatggagatggctctgctgcgatagaggatgaaggataatccgtaggcaactggtcgttactagaagatgataaagatgcaggctgctctttattattagaagagcgaggtgcaagtgctggctgctcaatagagggctgcgaccctgatttccttgggactttgactccccctgatgcacgggaggcgcaggaaaaaccacaggtgaagaagatccagaagatgctgatccaataggcgcctactaaaataagggggagtagaagaactcgtgctcatggaaggtaacatgccgggacggcgagaacgagaagaaggttctgaaagaagaaaccctttcctatctggtgtcagctgatccttcagcgtctgcaccaactaaatcggaagcaacattcgaaagacgagagtaggctccaggaggatcaaaagactgattctcggtcccctaaagttagaaagcaggttagactgcaatgtatgcctatggaaagaaaagtcacgaaaagcgatccatatgatcataaagaagggcttgcctatacgtctttctagcgtacgcgcggttcctttcgattggagcctgtcgctgcctggatcaatcagcctattctagttcgccttgtgtcatccgatttgagggaatgaattggatcgtgaactctttcagaccctggcctttgatctttcgctaggagcgaggttgtccttagaaagaatggttggaaccgagcccctggtcagacctatgagactactcgaatgggggcttttcatgttgggaagggggtgtctgaagcgacaccttttaactatactaacaattttgtgtacgaattgactctggtgatggatcggggttagaactagtctgaagcttgtcaaaaggcttttgacggtttgaagatggcgatggtgattgagccggtgctgaagttgcctgagtttgataagccattttcggttgaaactttcgcttctggcagagaccttgacgggctgagcacttgaccagttggtgatgcaattggcaagtgaacaacgagtcttggttgaagactcaagcttgtgggcttggtagaagcggctatgacacttctttagatcttctatcagtctagcccttcttccacatgagatcctatttttcctaactccatgtagcaccactatccaatgaaaaaaatcctgctctgtggagatgaacaataaggaatgtctgtgggtccttcttcatcgaagtgtacagttctctaaaaaatgtgcgatccaagaattttaagtggattagtgcatgaattacattttgggaatgcttaagtgttaagggcatcttgctatgggcacatacatgcgctccaatacttgactttcctcctactgctcattatctggagctacttcctcccgcatacttatttcccccgcaagtcttcaaccaagtcctagactcagtctttcaacgatccatttgagtcacaaccctctttccttctttattcgagagtaatcttggcttcttcttctcgatgatgtccctgtgagtgcctcttccgtagtgaatcctgaaagaaaataatatatgcttttgaccccgtgtgagataccgcttacttaaaagaaaaagctggctcttcaagacctcccaaagggcactaggagactagacatattacattacgggcactggatctcggggcactcagactagtgataacgggaatcctagacctgtaagagctagactcgcacgaggttacaaaaaaaagaaattagattaggcgctagcttaggggcccattcctaaagccatgagagttggtcagaaaaacgttatcctagactatattgaggagtaaggtcttgaagagccatgacaatgaggtcattcttgcatgggcttgggcttgctttgatgatgggtaggcttgttgtgctttggcccttctgtgggctttcatcgaggtttcatcgaaacaggcccgagtcttcatttgtaggactttctttgtgatggttcatgtaggcttgggtctttcattcgggccttcttgaagatgggcaccctgtgggccaatgcgtataagcttgggctttcttaacgtggctcatttgacgactcagtacatggatgtcacgagtctattggcatagaatatggaatcttttccacgtaagctggttgtacaaagtttgtttgttcatacaggcagtgtgatttggggagattttgtttgctccgcaaggtagccagagccagccagtttttcattaaaaaggcatgatagtcttcaactgcagaaaagtagcgcggagaactagtaagaattgtgcctgccatgcaattcgtactgcatggcgatattactctaccactctataaatggaggctcgataagtgtcttcacttcatcaaattcaaatccaagaaattgagtactagcacgtatggctatggaggctacaaacaggctttctgcaattgctgccgaaatggggcaactgcaaaatcaaattcaagagcaccgtagctatcgcaccttttgataagtgttagaacaatggatcctgcaaggaaagaagcgcgcattcgcgctaccagagagcgcatagagggtttggaggagaggcagcaagcgctgcgggcggagcaggaagacctaattgtgcgtgctgtcacccgcggtcaccggggagactagaatagaagagtccgtcgactcttttgagttttagaaggtttattaattaaataagtgtctggagacatttgttttcatgtctggtgttctttgtctttttttagtgtagatctactccggtgcctactggagatagactcctatctatgctaactatctttgttttgttttatttgttatgtttgcatgtatagtatgggaaaacccctagtgtaaaatgtttactacttaatgctatgctaatagaataaataattaataaagactttttcccagaattactacaagcacttgtagagaaaggtgggttaactaaagaaagatggaaccagatgcattcttaaaagaaagcgctttgccttacctatgatgcaaagtaagattggaggggccggctttcgaaagatgggtttcagagaatggaaccgagattatgggagtaagtggagttgggcgggctactctccagggcctcatcgatagatagatagaaaaccccggcaaaggactgaactttttttttagttaacctgggtttacatagcccaaggccgaagaaaagcccaagggaaaagcgctttgattcaaaagttgctgattcatgtgcagcttcagtctatagcatcctttcaactatacggattagtccctacagcgcttattcctccaacaagtgattcgtcgaaaagactagcagcatttgtccacttctctgactttgaatactttctttcagcgggtggcatctattcccccatttgagacagttgaagcagattttgtaacaaccgattcgagcacaacagccaaagagcggattggcacagcggattcgagagcagtctgatatcaaagagcggaaaggtgcttacaacacaaaacatccggaaataaatatcctactatgaggacaaagagagagactcaacctggtgatgccaatccttgataacaagaacacacgagcacatgactaagcccttctccctaaattaaacagagaaaaggaagtagtgcactagcagggaaatagagaagttcgacctacccacctacacgagggggatccctctatacgttacgtctacttatttatttacgaatactgactgctaactaatctcatttaatagctattccatcttgagcaagaggacggtagaaaaattgatacaagaaggatagtccgaaccacctaatgaaacccagttaacaaaagcgggagaatcttccttacatgcctagcctaggatattggatccattatactaagggtctgagaacaaaaagggaaaagggcaagggtagacgaagagaagtgcctaaacaggtgagtgagtactgcaggttcaccccagagacaatgagttcgagcgttttcgacacgaatccagggctgaggagcaaaatatgaaggggggctaagggcgtagcaaaccaaacaaaagaggctcgagagaccttaccttagtagacctctttttactagcatcagcggctatatcacggatttcatacaatgaaaactagaccgggttgcccgtcctacttgagaaggtacctacaaatagacgcccagtttctatgaaattgaacatacagcctgcgtacctcccattcatggaagacctgccttattgttgatgtcttttttgaggttaaggcgtcaaggttgtagcccctttcggaatggctttactgcgaaaaagcctttgattcgcaatgccactttgaaagaaagggaacctcctcttagtccaggaacttcttatagttagtagcgatgaattataggatcccaaagcaataaccacagatggaggagcattcattcctctttttaaccagttttcccaaaccaggatatcctgcctatcccgaaaaagggactctctccaaaaagtagcatcgtagcaagagtggttttgactaagcatatgacgaaggatcggccgaagctagagctaagtggctggtagctgggtaagggtaagtatggaaagcataggtcgacttaatccaattgattggattggtgaatttcgttactaatccgaaaaggtcagcctatagacagacatttgaggctcgagagaccactgagatgattaataatctagccctggcttccttagttttcttatttagttagatggttaaaatctaatcaatggatgaactagagtccttgagaatcattcaaagactttcttattgctttgaaaatgacttcgaagacgcccttgtggagcaccatttcattcatatctcgacaagccctagttgactattcttctacttaaatacacgaattcagatattaaaaaatcttaccccttttgggattggttttcctactgccttgtccaatcataggcattctgtcttggatagataaggcatcgtgatacccacttagttacatcatcaatttcagatattgactgcgaaagcttaatgtcgatcagaaagagcattaaaataagtaattgtcggagcactctactcaccactgaccctgagagaacaaacctatggtctctcgagcctctaatttcttttgtctctggattttcttctttcttttttttcctccctttcttcttcatccccgaagtaagcacactttcccaagcttgaagcaggaataggaataaatgaagcccatataagaaaatcgatatgctatccgaatgattctatgtaagaccccttttcggagtttcaacaatcagacattgcacaaaatcaagttcttagagaaaaatgctcaatacccaagtaggcttacaaggttgcttataatcaagtgctttatgggtcgtctcatacctttcaattggactttatcccgcttctatacacttgtaactaatagaatgctgttcttctttagatccactccgatagtctaataaatcaagtcaatgcagcctactattaagtaagtgaaagatagaaaagagccacatcacttattctttcgactggatcttacggagcctgttcatacatgacatggtcgagtatgatcatagaaagattctctgcaaacgaacctctgtatggttgcggtggttggaacaaagacagatttatgttttgaattcaaatggggcagataagggcacagaccaatcaatagttcaagtcacacactcccataatctcaaagaattcactagcacttccgcgcaacaactctaccaagggcgatcctattacagttacaggaatagcttccggcacacctcttacaagactgcccaataaccccgaggtaaggaataagcggttacgccaaaagatgcggtcaatacagccccctgcaattcacaaggtaaagcagatagacaggaagtggaggatcatcattagtaccatcatacttgccgaccatcgatgaactgatcggattaaccaaccgcttcagtcattatatattgaagagggtcggatgagtcatagcgtacttaagctcctagacaatcaaatatgttgacatgaggggggacatatttactagttatatcatccgcaattgcctgaatgaccttcttcgaagcaagaatagcatagattttaggtaagcagaaccgtatatgaacatctcgtacggctcctaattgtattattcactcgaaaagagaaggaaaatccgaaaactctttattatggtggttataatgccataatctcaagtcggctcattcatctatatgttgatcaggcctctttcatcttctatttcccagggaattgaatcaatcctcagattcatactagagagtcaataaaaccttttcaaactaagtccaaaaattccttgagtaagaatcgttggatcatcacttattcaatgaatagacataatgactaaaaatccaaagaaacctttgtacgaagatcaaaataagcaaaaataagagttgtgaaacaataaaagtcaagtatgtagataaatgaaagggtgagagaaaaaaatatctatgatatagaaatgtggggggtctatgattcattttcataaaggaaaatgtaataaagcattaatactgattgatccctaattaaacaaaattgttctataagaaaagaacaaaaagatcacgagcgaagacgtgtcgaagcatgattctattgttttggtactcccgatgggaatggaaagtggaggtttctcgctctactgaaaagtttaggaaaccccgtctttttgggcatcaatccgattctcttactttgatggccacattcccgatccaatgctattgatccaggagggcccagaaagacctgtgcggtcagccgaggtagacagcgcagtagtggcatgtctactcaatagagtggatggaacctccaagctgggggacctttaggatctgcataagctgtgccaaagacactgaggcccatgtgctgtttgatttagagaagtagtaagatctaagtattgtactccctcgcttgtgaaagagaggccccctctgagctaaatcaatcccgcacagatgaagattgtatttagcatcattgaatctttgtttttatgctttaagatcgaaagggaatcaaaagttccatgccttctacttagacaacccgaatccgcgtatacccactagagcaaaactaccaacccaactgggccttccacttctgtaacagagactcaaaggtgcgaacaaagaaagcttgtttggactttgaaagtcaaggcttcgcacctacttcttctgtctctcgtcataagacagccggccggattggcttaagcgcaatagcctgtttgttttaatagaatcgtaaactaaaccgctctatcgctacacccgttacttactcttacttagccctttgtcaaacagaaaacttccgattgacttctgctgggttggtttctcgcttccaaagccctaagcaagaggtcccatactgtcctgtcttgaactagaacagctaactcggactcagaggaaactcctgacttgttagctgcaggtacgaacatagagagtttgttaggtcccatccggcccacatcttaccagggaatgcgaactcgaactaatggcttgactttcctttagctacaggctaatcgagccgacctaacagccaataaactacagctggaataaggttctcctatttatttccacttccttataggcacctctagaaagctttagaacggctgtttaacttacttcgcagtctggcctttgaactttagcaaatagtcttattggatagaacggagagagctcgtaggcaatatgagatagagctggagatttttgctaatctaatcgagggcttttcttccgatttcactatttcactcccctgctctgggataaaactagctaggcatcttcctcagttttgttaaccgattcactttcactcaccgtctccttaccacgctagctttgaatagccaggcatttaccttggaatggtagactgaagaccattaattaagtacattacaaaagtgaaaggggttcaatagctgctgattctgtaagggctaaaataatttattttggctttttgacccctctcgaaagatatgaaagatctccctccaagccgtacat

SEQ ID NO: 110457 - DNA, 2611 bp, Cannabis sativa
ctcattactcacaacaagtgaaaaatcccagttgctcacattgaaggatgttgtttctggaaaaccaactttggcttttcaacttaagcctaaggtatatcaatataactctttcttttattttttttccttttttctttcatataaatttcaatgatgtaatactatgaaatatatatctcatgtctcaacagatggtcatgttaagggtttccatgcattgtaatggctgtgctagaaaagttgagaaacatatctcaaaaattgaaggtacacacatacataaacatatatgtaaataactgttgtacctttacaatgtttgtgatcaatctatctctttattttaatttttttctaattttgtgcctttaataaaacaggggtgacctcgtataaagttgatttagagtccaagatggtagttgtaattggagacattcttccttttgaggtgctagagagtgtctccaaggtcaagaatgcagagatttggactaattctctatcttcatgatgatttttctcgaggctcatcacaattccaatattccaggcatccaaacagggtactaagaacaagaagctaagagaaacttcattattatattatatatataaagatagatagatagatagataatatgagtacatacatttggaagatctgttatgtacctttcaacttgtgcagatgaaaatacagaatgtgatgagcctatacaaattttttcaggcctcttgaattaatgttgttattaggttctttaatttgttggttgggattgttgtgtaatcttgtatatgcaacagtatttgtatgaggacattattggccactatatttgtatggctaattttgttttgtctatgtatttatattttgcaatattaagcagtttctctttacatctttctttctttttatgtaatagtgaagcaaaaagcttttaaagcatactcagatttttgttttgagtgtgcatgcattgcagtttaccagtttagtttactcttaaaaaaagttgtaggagccataaataaacttgaatattattcattatcaaaaaacaaaaacttaaatattattgttatgatataatagtaatatgttaatacataaccacatgggtattgataatgttgtctgaacctcaattcaaaattcggatattctcaagatgaagaaaaaaaacatatattttagataatggattaatggcttggcagcatacaagtggagttcaatgaactatggttaaatcctagttaggtagctcatcccaactaactataggcgtcttcgcactattttgctcatagtacatttgatccgcacgcactaaatgcatatttcatattttagatataatccgcacaataattcaaaattatatatgagaatgacatctacatttgatttattaagttttgaattataattgtattattagtattatacttttgaattatttttttttaattgtatatataatttttttaaattttataataaatatgtgtagattagatcagttatttttatatatcaattaatattcaatttgtacaaatgtagattttaaattttttaatctaattcaatccgcacaattgtaggtatccacactttatagattaaattggattagaacgtactaactaaaaaaacttaatatagttaaaaaaaaaacacacaaatttatcctgtttgtcttaattttttccttttgtttataattttttttgataaggtctttctttataagttagaaattctattttctatagacaacatcaaaattactttattaattggataatctgaaaacagggcacgattgaaagaaaatatagaagggattgaaaaatacaaagaaagaatagagagaaaaaaaaaaattggttatttagtaaatagaaaaagaggtatacgtcggtcgatattaaatagggaaattatatttacaccccatagaactataattacactctattactaaatttaccccattttttaattaaaatattatttttttataattacaccccaactttgtgtaccgaaagggtatcttttgaatacaccccaaaactttaggattgaaaaaagaaaaagagaaaactagaagtcattaatggcttctacacattaattgtccaagtaaatctaataaaataaaaaattaaagtcattgatttgtgaaaagaattaaatggcatgttaagaaaaatcagaaaatagtagcagttttagaattattttgaggaaaaaaaataaagtaactgaatattttttattttgtttatggtctaatatttcttagtcttgtatataactaaattcatcaaatgtatatttagttgtttttcatgagaaacgaaaacacatacatatacacagaaatttgttttgtatcgaatcattcctccgatgaattacaaaaataaatctctgtgttttccattaataatttttgagtgaaaaatattcatatcgatctgcttttaaatttataattatatagaaatttaaatagtatagtgtttataagaaaaaatagtggggtgtatttattaaaaattaaattaataaactaaataaagatgt
